United States Patent Application Publication US 2018/0305689 A1 - sequence listing, part 87

SEQ ID NO: 1243401 - DNA, 4001 bp, Homo sapiens
taccccttcaccgctgtacaagacttctttaacagttgctaggaagctgtttgcaaatctagtctgcaaatcacacgccgggaccaggcacagaccttctgataaaacaggaggccctagctccccggctgtctgttctcctgacccactgaccccgtcaggcttaagacccatagagattttctccccagttacccaccccatccccttcaaggctatagaaattgcaatgatgatagaggccacagggaccctcctgtgagcagatggaggatctccaaagattacaagaatttaaccaacttgagtgatcagcctgttttacagcctcctgacctcaacctgttcttccccagccctgggtggaatgaggtcaccctgtttgtttaaatcagctcctaaatgaccccaggttacttacagatgaacccaagttaactctcctcattaccatgctaaagtcttcaccccgggagaagctatagcttcatgactataacctatgcaacctatgcgctagcatcatgactcactgggacccctactctacatgcaatcatgcaccctctcctttctccatcaccccataaaaccctcctgtctctttctctgggggacacactacttgggagaatatgcccagtgtcttcctttcttgtgccaagtaaaactcccattgatcaaaacccgcctcttggtggagtcatttgtgactcgttaagggaatgaaccccggtatttttcaggtaacatttccattgttcttattgtacgcagtagagaaggtttccacagtcaagcccctgtcccccacaccccaggcccgggtcggattttctaaggagagggttccctgaaccctcacaggtatatagtcctctatggcaaggatccaaggtcccttgatgttttccgtgagaccccaggggaaaatcttgttaccaaagcaggactaggcccctgggcatgaatttgctgaagatccaggcccaacctcagattccacctgctctgccccccagggtcacgggtccccttgcattttgttcctgtgttggccccggggccccaggcgtggattttctgaacagcaggtcggttccttccctgtcccacgattggttcacggtcattgcagctgctatggccttgaactgggatctcctttattttcccgtgggcctttttcagggggcaaagacctccgcagccctgcctacctccagccttggcctacacccaaccccagagtctgagccccgaccctagtcctctaaattcctgacctgctgtacctctggctccccaatttctcggctccccagccagtgcctcctgcaacttctcgcaatcaaacaccccagcctccagcctttgccctggcccttcaggcctctgaagcagctccggtctcagagccccggctcctgcccgggtccccaggctcctgcagcgccctccctccagccgcttgatccccaagtccctgcctccagtcccccaatactggtcccaccccccaggttccccccccggcccctcaccggcgtagaaggccgagaccgcgatgggcgcaccgaccacctggtcgcacagcaacttggccagcatggcgcgcggcgctcggcccgggagcgcgcgctccagcaggcccagccacacgtagttgaagttggcgtggaaggtcaccaccaacgtggccacgcgccgcgtctggcgccagtcggcctagcggccctgcagccgttgctgcagcacgtccccggcggagacgagcgagctacggcacgctcgtagagcgtagagctacgttgctcgagcaacgtagagcagcacgttggtgggccacgggtggcgccgggccgtgcgcgacaacgccggccaccagcccgccatgtccgcgctgtgggcgcccgcgatcaggagcccgcgtggtcggaggcttcctgcaccgcctccgggcctcgccagcctccagcagctactgcgctgcagcagccggcacctgcacctgcctcctccaggagctcctgagcggttgggcgccccgcgcacacccagctcgtgccgtccaatccggaggccacgggccgtcgtgggggctgaacgtttgaaaggtgcccggcccacccccatgcatgggtccgttgacacaaaatacccagaataggcaaagccacagaggcagaaggcatggggttatttatttatttatttattttatttttattaattaattagatatttttgagacggagtctcgctctgtcgcccaggctggagtgcagtggggcgatctgggctcactgcaacctccgcctcccgggttcaagcgattctcctgcctcagcctcccgagcagctgggactacacgcgtgcgccatcacgcccgactaatttttgtatttttagtggagacggggtttcaatatgttggccaggctggtctcgagtgatctgcccgccgcggcctcccatatggggttattttttggagtgatgaaaacattttgaaattagataggtgtgatggttccatgactttgtgaatatattaaaaaccattgaattgtacacttgaaaaaaggaggtgcatttggccgggtgcggtggcacatgcctgtaatcccagcactttgagagaattagacaggaggatcctttgagggcaggagttccagattagcctggacaaaataggaagaccccatctctacgaaaaaaaaaagaaaaagaaaaagaaaaaagtattgtaattactcagacttggtggtgcgcactgatagtctcagctactgctacttgggagtctgaggtgggaggatctcttgagcccaggaattcaaggttgcagtgagccacgatagggccactgcactccagcctgcaaaaaaaaaaaaaaaaaaaaaaaaaaaaagaaagaaagaaagaaaaagagagagaaaataaaatggtaagttttatggtatgtgaatttatcttaaaaaatgaagggacggccgggcacggtggctcactcctgtaataccagcactttgggaggccaaggcgggcggatcacgaggtcaggagatccagaccatcctggctaacacggtgaaatcccgtctctactaaaaatacaaaaaattagctgggcgtggtggtgggcacctgtagtcccagctactcgggaggctgaggcaggagaatggcctgaacccaggaggtggagcttgaagtgagccaagatcgccccactgcactccaccctggctgacagaggaagactctttctcaaaaaaagaaaagaaaagaaaagaaatgctaagcaaagtgttctggtgtgttttgcctgttttggtagtggaagggaagaaaatctgtctttttctttcttctccccctttaaactatttaagaagggaactgggcacggtggctcatgcctgtaatcccaacactttgggaggtcaaggtgggaggatcacttaggtccaggaattcaagaccagcctgggccacatagtaagacctcatctctacaaaaaaataaaacattagggctgggtgccgtggcttacacctgtaatcccagcactgtggcaggctgagggagctggatcaccttaggtcaggagtttaagacgagtctggccagcatggcaaaaccctgtctctactaaatatacaaaaattagctgggcatggtggtgcgcacctgtaatcccagctactcaggaggctgaggcaggagaattgcttgaaccgggtaggtagaggttgcagtgagccaaaatggtgccactgcactccagcttgggggacagagcgagactctgtctcaaaataaataaataaacattatttaaaaaaaaaagatcccctgggcatacaataagtaataccatactacttaggcaaataaagcccaattctatcatttgggaatcttaagatcagttctaccactttgtggatcttcagactcaatctctattttagagatattaacattgat

SEQ ID NO: 1243402 - DNA, 4001 bp, Homo sapiens
ccgcactggtgggacactctttctattcatcgttttttgagacagtgtttctctgtcacccagcctggagtgcactggtgtgatcatagctcactgtagccttaaactcctaggctcagatgatcctcccacctcagcctcctgagtagctggtattacaggcacacaccactatgcacagctaagttttttttttggaagagacttatctggaacttctggcttcaagggatcttcccacctcagcctcccaaagtactgagattgcgggtgtgaaccactgtgcccagtctcaccttgaccttctgatccaacagagtctgggggagcagagccaggggcaggtgtgtcttcaggagtcgtggggctggtgtgtttttcagagtctccatccctgagcagtgggtcagggaaggtctggtgagctgaagccccagccctgtcttcctccactccccttgcacccaggacacacacacctgagggaatccctgggactttgaactcaaggaagggcacccgcatgaagatgggagctcggtgacacttttccaggtcaccgccctggtagatcatgtccagaatctggctcacccaggtggtgcctggagagggagggagatgggaggtgagcaggctgaggtgagcatgacctcgctggccaaggtggggactgccacctgggagagggtgggtggccctcctcacctaccggacttggggtaggtgctgatgagcaggtcatcaggccgggcctggaagctctgcaggggccccagtgcctctgcaaagtacttgatgagcgggacccccttcacgtactccagtggcgggcgagagatgtcctggatcagctccatgttcctgcgtcaggggccagagccaggcccgttcccttaccaccatcacaacagcaagaaagtggaattcttgctttcagggaagtcactgaggcctagggaggctgagtgacttgcccgcactcacaaggccagtcagtggcggggctggggctgaaaaccaggtcgggctctaatgtggtggttccccagcctggcctcacctttcattcacctgcggagctgttcaaaatcccagggcctgggccatggtgcagaccagtgaaagcaccctcgtggcgcggggcccagatgtcagggtgtgtgaaggtctccaggagagtccagctgcactgaggaacctctaggaccttcctgtgctgtcttcctgccagccagcgccctttgtctcaccatttcctgctgggacccccagcctccacccagtaggctcctctccccgatgttcccctccttgagcccctcggcccctcacatgtggcaactcctaggctggccaggcctgtgatccacttgcccggccacagtccatctgggctccaggacaaacagcccattgagcaactgagctggtattgggggccagagcctgatgtgggaatgagcaaaactgtgatgactcagcaaaaggaggatcctgggcagggtggctcccacctgtaatcccagaccctagggaggctgaggccagaatttggagaccaatctgggcagcattggaagaccccatctctaaaaatcttttaaaaatattttttaaaactatccaggcaggatggtgagggtctgtagtcctagctactgaggcaggagaatcacttgagcccaggaattcaaggctgcagtggccaggatcccacagcactccagcctcggtgacagcaagacctggcctccccggaaaaaaaaaaaaggaagggagggggattcaggccggccggggttgtctgaaatgggatatccatggggagagggcagggatagcagaggcctcggcttctggaatgttggagccacaagctgagcagggtgagggcgtcctgggccattccggtgtgtcactcacctgagctcttgggaacctggccttgtgccctcctcgcccgcagtggctgagtgtgggtgttgtgtggggaatgcaggggtgttgtctgtgctgagggtttcttaggtcagtgtgggagggatctggagccggggctggacttagatttgcttccggaaggaaggggtagggttgggggtgggggagcttctctattaccctccttagtttgccagctggagacaagcttaaagtgatctccaaagccacgactgggtttggtgtgtagaaaacagaagaatgaaaggggaaagggcccaatggtgggtttgtttttgtgggtttttttttttgagctgtcactgggctcctgacctgcccctgaactccaaaagacaagctttctctaattgacccaggcaagagaggggagggattggaggagaaagatgggataggcaggccctggaaaggtcacctacctgctggctccaggccagtcttgaaggtgccaggggtcctggcccagtgcaacccacaggcctccagcagcccatgcactccaggctctgaccacaaggccagtctggagtgatgcgtgtgggcagagtgaaggggcaggggtggagcagagcatggatccatagaacaagaaagaacaaggacactgcagtcccattgccctgggagccagccccagcttcatggctccctggggacctcacagaacatcgatagaagatcctagaagaaccacagcccctggcaggtacttttctttccatgggtttgaaggaggctccacagacagaggccagaggaggttgaggcttggaagccacagggccccgtggaaggagtgcatccccccaccctcctcgttctttgtcctcactatttaaagtccagggtcaagctgggcacgagacaggtaaacaaccatctgagtaaaggtgagtctcccaagccttcccagggttgcgtgagctcagaggcaagcggggaaaactgaggcatgggatttccaggcagaggagaggctgctcccctgctagggccacaggcccctcctccctcctctgtgcccctgaggaatccccatgactggcaggtcctccggctactagctccacccctgccctcagcaaccttcaggaggccctcttgactgagactttgtattgcactctagtgaaaaccagccggaccagcagggggtggcacagaaaagaggcgagaatgtgagattaatagagtgctagcaagacaacagaaaatcccaggcagcagtttcacatgaccagaagaaggaaacttgaaatagctgcatgtgccaagggccaataagtccctgaaaaataggatgaggaccaagctggctgcgaccaaccagaagcaacatggcgctgtatttgatgtaggtttcacctaggatctcactgtacaatcagtaacatatgaaaccgtacacccaccagtgccaagacggctccaggaacacctgtatttgggtgtaaattgtggcaccacggtcttgagaaatctttaccttttcctggaatcttcatgaatatacccctctttagttgaagaagcccataaaggtcagccccacaccttgtagggcatgagacactctcttgaggacccccacgttcctcttcttcagtgagtccctttactctgcaggaaatctgcctacgttcatgacttttgcacttgtccttaaattgtttctggctaaggtgccaagagcctggagaaggcctggcacggtggctcactcctgtaatcccagcactttgggaggccgaggcaggcagaccacctgaagtcgggagtttgagaccagcctgaccaacatggagaaaccttgtctctactaaaaatagaaaattagtcaagcctggtggcacacgcctgtaatcccagctacttgggaggctgaggcaggagaatcgcttgaacccgggaggcggaggttgcggtgagccaagatcacgccattgcactccagcctgggcaacaagagtgaaactcggtctcaaaaaaacaaaacaaaacaaaaaaaagcgtggaaacgggctgaggtcgat

SEQ ID NO: 1243403 - DNA, 4001 bp, Homo sapiens
ctcgttgtgtctcccaggctggagtgcagtggcacaatctcggctcactgcaaccaccgcctcccaggtgcaagctattctcctgcctcagcctcccgagtagctgggattactggcgcctgccccaacgcctggctaatttttgtatttttagtagagacggggtttctccatgttggccaggctgatctcaaactcctaaccttgggtgatctgcccacctcgacctccgaaagtgctggtattacaggcgtgagccacaacaggcccagccccctgccacctgccgctttttttttttttttttttttttttttgagacagagttttgctcttgtttcccaggctgcagtgcaatggtgaggtctcggctgactacaacctctgcctcccagcttcaagcaattctcctgcttcagcctcccaagtagctgggattacagatgcctgccaccatgcccggctaatttttttgtatttttagtagagatggggttttgccatgttggccaggctgatctcaaactcctagtctcaggtgatccacctgcctcagcctcttcaagtgctggaattacaggtgtgagccaccgcactggtgggacactctttctattcatcgttttttgagacagtgtttctctgtcacccagcctggagtgcactggtgtgatcatagctcactgtagccttaaactcctaggctcagatgatcctcccacctcagcctcctgagtagctggtattacaggcacacaccactatgcacagctaagttttttttttggaagagacttatctggaacttctggcttcaagggatcttcccacctcagcctcccaaagtactgagattgcgggtgtgaaccactgtgcccagtctcaccttgaccttctgatccaacagagtctgggggagcagagccaggggcaggtgtgtcttcaggagtcgtggggctggtgtgtttttcagagtctccatccctgagcagtgggtcagggaaggtctggtgagctgaagccccagccctgtcttcctccactccccttgcacccaggacacacacacctgagggaatccctgggactttgaactcaaggaagggcacccgcatgaagatgggagctcggtgacacttttccaggtcaccgccctggtagatcatgtccagaatctggctcacccaggtggtgcctggagagggagggagatgggaggtgagcaggctgaggtgagcatgacctcgctggccaaggtggggactgccacctgggagagggtgggtggccctcctcacctaccggacttggggtaggtgctgatgagcaggtcatcaggccgggcctggaagctctgcaggggccccagtgcctctgcaaagtacttgatgagcgggacccccttcacgtactccagtggcgggcgagagatgtcctggatcagctccatgttcctgcgtcaggggccagagccaggcccgttcccttaccaccatcacaacagcaagaaagtggaattcttgctttcagggaagtcactgaggcctagggaggctgagtgacttgcccgcactcacaaggccagtcagtggcggggctggggctgaaaaccaggtcgggctctaatgtggtggttccccagcctggcctcacctttcattcacctgcggagctgttcaaaatcccagggcctgggccatggtgcagaccagtgaaagcaccctcgtggcgcggggcccagatgtcagggtgtgtgaaggtctccaggagagtccagctgcactgaggaacctctaggaccttcctgtgctgtcttcctgccagccagcgccctttgtctcaccatttcctgctgggacccccagcctccacccagtaggctcctctccccgatgttcccctccttgagcccctcggcccctcacatgtggcaactcctaggctggccaggcctgtgatccacttgcccggccacagtccatctgggctccaggacaaacagcccattgagcaactgagctggtattgggggccagagcctgatgtgggaatgagcaaaactgtgatgactcagcaaaaggaggatcctgggcagggtggctcccacctgtaatcccagaccctagggaggctgaggccagaatttggagaccaatctgggcagcattggaagaccccatctctaaaaatcttttaaaaatattttttaaaactatccaggcaggatggtgagggtctgtagtcctagctactgaggcaggagaatcacttgagcccaggaattcaaggctgcagtggccaggatcccacagcactccagcctcggtgacagcaagacctggcctccccggaaaaaaaaaaaaggaagggagggggattcaggccggccggggttgtctgaaatgggatatccatggggagagggcagggatagcagaggcctcggcttctggaatgttggagccacaagctgagcagggtgagggcgtcctgggccattccggtgtgtcactcacctgagctcttgggaacctggccttgtgccctcctcgcccgcagtggctgagtgtgggtgttgtgtggggaatgcaggggtgttgtctgtgctgagggtttcttaggtcagtgtgggagggatctggagccggggctggacttagatttgcttccggaaggaaggggtagggttgggggtgggggagcttctctattaccctccttagtttgccagctggagacaagcttaaagtgatctccaaagccacgactgggtttggtgtgtagaaaacagaagaatgaaaggggaaagggcccaatggtgggtttgtttttgtgggtttttttttttgagctgtcactgggctcctgacctgcccctgaactccaaaagacaagctttctctaattgacccaggcaagagaggggagggattggaggagaaagatgggataggcaggccctggaaaggtcacctacctgctggctccaggccagtcttgaaggtgccaggggtcctggcccagtgcaacccacaggcctccagcagcccatgcactccaggctctgaccacaaggccagtctggagtgatgcgtgtgggcagagtgaaggggcaggggtggagcagagcatggatccatagaacaagaaagaacaaggacactgcagtcccattgccctgggagccagccccagcttcatggctccctggggacctcacagaacatcgatagaagatcctagaagaaccacagcccctggcaggtacttttctttccatgggtttgaaggaggctccacagacagaggccagaggaggttgaggcttggaagccacagggccccgtggaaggagtgcatccccccaccctcctcgttctttgtcctcactatttaaagtccagggtcaagctgggcacgagacaggtaaacaaccatctgagtaaaggtgagtctcccaagccttcccagggttgcgtgagctcagaggcaagcggggaaaactgaggcatgggatttccaggcagaggagaggctgctcccctgctagggccacaggcccctcctccctcctctgtgcccctgaggaatccccatgactggcaggtcctccggctactagctccacccctgccctcagcaaccttcaggaggccctcttgactgagactttgtattgcactctagtgaaaaccagccggaccagcagggggtggcacagaaaagaggcgagaatgtgagattaatagagtgctagcaagacaacagaaaatcccaggcagcagtttcacatgaccagaagaaggaaacttgaaatagctgcatgtgccaagggccaataagtccctgaaaaataggatgaggaccaagctggctgcgaccaaccagaagcaacatggcgctgtatttgatgtaggtttcacctaggatctcactgtacaatcagtaacatatgaaaccgtacacccaccagtgccaagacggctccaggaacacctgta

SEQ ID NO: 1243404 - DNA, 4001 bp, Homo sapiens
cgtgggggcggtgtgtctttcagagtctccagccctgagtagtgggtcagggaaggtctggtgagctgaagccccagccctgtcttcctccacttcccttacccccaggacccagccatgcacctgagggttcccctggatcattgacctcaaggaagggcacccgtacgtagatgggagcccggttacacttctctaggtcgccgccctggtagatcatgtccagtatctggctcacccaggtggtgcctggagagggagggagataggaggtgagcaggctgagggcacgaccttgctgaccaaggtggggactgccgcctgggagagggtgggtggccctcctcacttaccagacttggggtaggtgttgatgagcaggtcatcaggtcgggcttggaagctctgcaggggccccagtgcctctgcaaagtacttgatgagcgggacccccttcacgtactccagtggcgggcgggaggtgtcctggatcagctccatgttcctgcatcaggggccagagccaggcccgttcccttaccaccatcacaacagcaagaaagtgggattctctctttttttttttttttttgagatggagtctcactctcacccaagctggagtgcagtgtggcacaatctcagctcactgcaaactccacctcttgggttcaagcaatcctcccgcctcggcatcccaagtagctgggattacaagcatgtacaaccatgctcagctaatttttttttttctttagtagagatggggtttcaccatgttggccaggctggtctagaactcctggcctcaagtgatttgtctacctcagcctcccaaagtgctgggattacaggtgtgagccagcacccagctgcccctttgcagagtttttgctttcagggaagtcactgaggcctagggaggctgagtgacttgcccgcactcacaaagtcagtcagtggcggggctggggctgaaaccaggtcgttccccagcctggccgcacctttcagtcacctgcagagctgttcaaaatcccagggcctggggcatagtgcagaccagtgaaagcaccctcgtagcgcggggcccagatatcagggtgtgtgaaggtctccaggagagtccagctgtgctgaggaagctctagggcctgcctgtgctgtctccctgccagccagcgccctttgtctcaccatttcctgctgggacccccagcctccacccagtgcgctcctctccccgatgctcccctccttgagcccccctcatgcccctcacatgtggaaacctcccaggccggccaggtctgtgatccacttgcctggccacagtccatctgggctccagaacaaacacagcccattgagcaactaagctggtaccaggggctagagcctcgtgcgggaatgaaaactgatgactcatcaaaaggaggggcccaggcagggtgactcccgcctgtaatcccagagccttgggaggccaacgggaaaggatcccttgagccctggagtttgagaccaacctggacaacaaagcaagacctctcctctacaaaaaatatttttcaaaattagctgggtgtggtggcttgctcttgtaaccccagctactcaggaggctgaggcggcaggattgcctcagcctaggaatttgaggctgcagtgggccaggatcccactacactccagcctgggtgacggagcaacaccctgtctcaaaaatacacaaaggaaaagaaggaacgcagggggattccggccaggctgggttgtctaattgaaatggaatatccatgggaaagggcagggatggcagaggcctcggcttctagaatgttggagccacaagctgagcagggtgaaggtgccctgggccattccaacgtgtcactcacctgagctctcgggaacctgacctgttctctccttgcctgcaggggctgagtatgggtgtggtgtagggagtgtagggctgctctctgccctgagggttttgaaggtccagtgtgggagggatctaaagtcagggctgggaactccaggaaggaaggggtggggttgagggtggggaagcttctctattaccctccttaccaccacagctccagccaagcttggagtgatctgcaaacccaatatgtgagtttagtgtatagaaaacacatgaatgaaaggcaaaaggggccaacattggtatttgggtttttttttttttgagctgtcactaggctcctgaccttccctctgaactccaccctgcagggcaggccaacagacaagctttctttctttctttttcttttttttatatgagatggagactcgctctctcgcccaggctgcaatgcagtagcacgatctccgctcactgtaacctccccctcctgggttcaagcgattcttctgcctcagcctcccgagtagctgggattacaggtgcacaccaccacatccggttaatttttgtatttttagtagagacggggttttgccatgttggccaggctggtctcaaactcctgagctcagatgatccgcccgcctcggcctcccaaagtgctgagattacaggcatgagccaccatgcctggccgacaagctttctctaattgacccaggcaagggaggtgagtgagtggaggggaaaggtgggataggccggcctgggaaaagtcacctacctgctggctacaggccagtcttgaaggcggcaggggttctggcccagtgcagtccacaggcccccagcagcccaggcattccaggctctgaccacaaggccagtctggagtgatgtgtgggggcagagtgaaggggcagaagtggagcagagcatggacatatagaacaagaaagaggctgagcgtggtggctcacgcctgtaatcccagtactttgggaggtcgatgcagcaggatcacctgaggtcaggagttcgagaccaagctggccaacatggtgaaaccctgtctctactaaaaatacaaaaattagctgggcatgatggcgggcacctgtaatcctagctactcaggaggctgaggcaagagaatcacttgaacccaggaggcggaggtttcagtgagccaagatcacaccactgcactccagcctgggcaacagagtgagactctgtctcaaaaaaaaaaaaaaaaaaaaaaaaagaaagaaagaaagaacagaaagaataagaaaggacaaggacactgtagtcccattgccctaggagccagccctagcttcatggctcctgggggacctcacagagcatcaatagaagatcctagaagaaaaacaaccctggcaggtgcttttctttccctgggtttgaaggaggctccgtagacaagagactagaggagattaagacttggaagccacagggccccgtggaaggagggcatccccccatcctccttggtctttgtcctatttgcattcaatttcaaggtaagtctcccaggcttccaagaattgcatgagctcagaggcaagtaggggaaagctgaggcatggggtttccaggcagagtagaagctgttcacgtgctagggccaggggcccctcctgcctcctctgtgcccctgaggaagccccgtgactggcaggaccttgggctactagctccgcccctcccctcagcatccaccataaggcacccttgactcagactttttattgtactcaagtaaaaacctgctggacccacagcaggtggcacagaaaagaggtaggagggggtaaggacactgaggatcaggtctccagcaggtctgtccagtgtgcctgcagaggcaagcagtgtggtcacaggcagcccagggcagggagtggggtagggagcccgccaccaaagcccactcacctcttctaattctgagtcttctacttctttctcagtgtccatctggcacagccagatcaggtctccccaaagcagtgacttctcacagctaccaaggagaggggcaggtaggagatacagagtcagatgc

SEQ ID NO: 1243405 - DNA, 4001 bp, Homo sapiens
gtgggggcggtgtgtctttcagagtctccagccctgagtagtgggtcagggaaggtctggtgagctgaagccccagccctgtcttcctccacttcccttacccccaggacccagccatgcacctgagggttcccctggatcattgacctcaaggaagggcacccgtacgtagatgggagcccggttacacttctctaggtcgccgccctggtagatcatgtccagtatctggctcacccaggtggtgcctggagagggagggagataggaggtgagcaggctgagggcacgaccttgctgaccaaggtggggactgccgcctgggagagggtgggtggccctcctcacttaccagacttggggtaggtgttgatgagcaggtcatcaggtcgggcttggaagctctgcaggggccccagtgcctctgcaaagtacttgatgagcgggacccccttcacgtactccagtggcgggcgggaggtgtcctggatcagctccatgttcctgcatcaggggccagagccaggcccgttcccttaccaccatcacaacagcaagaaagtgggattctctcttttttttttttttttttgagatggagtctcactctcacccaagctggagtgcagtgtggcacaatctcagctcactgcaaactccacctcttgggttcaagcaatcctcccgcctcggcatcccaagtagctgggattacaagcatgtacaaccatgctcagctaatttttttttttctttagtagagatggggtttcaccatgttggccaggctggtctagaactcctggcctcaagtgatttgtctacctcagcctcccaaagtgctgggattacaggtgtgagccagcacccagctgcccctttgcagagtttttgctttcagggaagtcactgaggcctagggaggctgagtgacttgcccgcactcacaaagtcagtcagtggcggggctggggctgaaaccaggtcgttccccagcctggccgcacctttcagtcacctgcagagctgttcaaaatcccagggcctggggcatagtgcagaccagtgaaagcaccctcgtagcgcggggcccagatatcagggtgtgtgaaggtctccaggagagtccagctgtgctgaggaagctctagggcctgcctgtgctgtctccctgccagccagcgccctttgtctcaccatttcctgctgggacccccagcctccacccagtgcgctcctctccccgatgctcccctccttgagcccccctcatgcccctcacatgtggaaacctcccaggccggccaggtctgtgatccacttgcctggccacagtccatctgggctccagaacaaacacagcccattgagcaactaagctggtaccaggggctagagcctcgtgcgggaatgaaaactgatgactcatcaaaaggaggggcccaggcagggtgactcccgcctgtaatcccagagccttgggaggccaacgggaaaggatcccttgagccctggagtttgagaccaacctggacaacaaagcaagacctctcctctacaaaaaatatttttcaaaattagctgggtgtggtggcttgctcttgtaaccccagctactcaggaggctgaggcggcaggattgcctcagcctaggaatttgaggctgcagtgggccaggatcccactacactccagcctgggtgacggagcaacaccctgtctcaaaaatacacaaaggaaaagaaggaacgcagggggattccggccaggctgggttgtctaattgaaatggaatatccatgggaaagggcagggatggcagaggcctcggcttctagaatgttggagccacaagctgagcagggtgaaggtgccctgggccattccaacgtgtcactcacctgagctctcgggaacctgacctgttctctccttgcctgcaggggctgagtatgggtgtggtgtagggagtgtagggctgctctctgccctgagggttttgaaggtccagtgtgggagggatctaaagtcagggctgggaactccaggaaggaaggggtggggttgagggtggggaagcttctctattaccctccttaccaccacagctccagccaagcttggagtgatctgcaaacccaatatgtgagtttagtgtatagaaaacacatgaatgaaaggcaaaaggggccaacattggtatttgggtttttttttttttgagctgtcactaggctcctgaccttccctctgaactccaccctgcagggcaggccaacagacaagctttctttctttctttttcttttttttatatgagatggagactcgctctctcgcccaggctgcaatgcagtagcacgatctccgctcactgtaacctccccctcctgggttcaagcgattcttctgcctcagcctcccgagtagctgggattacaggtgcacaccaccacatccggttaatttttgtatttttagtagagacggggttttgccatgttggccaggctggtctcaaactcctgagctcagatgatccgcccgcctcggcctcccaaagtgctgagattacaggcatgagccaccatgcctggccgacaagctttctctaattgacccaggcaagggaggtgagtgagtggaggggaaaggtgggataggccggcctgggaaaagtcacctacctgctggctacaggccagtcttgaaggcggcaggggttctggcccagtgcagtccacaggcccccagcagcccaggcattccaggctctgaccacaaggccagtctggagtgatgtgtgggggcagagtgaaggggcagaagtggagcagagcatggacatatagaacaagaaagaggctgagcgtggtggctcacgcctgtaatcccagtactttgggaggtcgatgcagcaggatcacctgaggtcaggagttcgagaccaagctggccaacatggtgaaaccctgtctctactaaaaatacaaaaattagctgggcatgatggcgggcatctgtaatcctagctactcaggaggctgaggcaagagaatcacttgaacccaggaggcggaggtttcagtgagccaagatcacaccactgcactccagcctgggcaacagagtgagactctgtctcaaaaaaaaaaaaaaaaaaaaaaaaagaaagaaagaaagaacagaaagaataagaaaggacaaggacactgtagtcccattgccctaggagccagccctagcttcatggctcctgggggacctcacagagcatcaatagaagatcctagaagaaaaacaaccctggcaggtgattttctttccctgggtttgaaggaggctccgtagacaagagactagaggagattaagacttggaagccacagggccccgtggaaggagggcatccccccatcctccttggtctttgtcctatttgcattcaatttcaaggtaagtctcccaggcttccaagaattgcatgagctcagaggcaagtaggggaaagctgaggcatggggtttccaggcagagtagaagctgttcacgtgctagggccaggggcccctcctgcctcctctgtgcccctgaggaagccccgtgactggcaggaccttgggctactagctccgcccctcccctcagcatccaccataaggcacccttgactcagactttttattgtactcaagtaaaaacctgctggacccacagcaggtggcacagaaaagaggtaggagggggtaaggacactgaggatcaggtctccagcaggtctgtccagtgtgcctgcagaggcaagcagtgtggtcacaggcagcccagggcagggagtggggtagggagcccgccaccaaagcccactcacctcttctaattctgagtcttctacttctttctcagtgtccatctggcacagccagatcaggtctccccaaagcagtgacttctcacagctaccaaggagaggggcaggtaggagatacagagtcagatgc

SEQ ID NO: 1243406 - DNA, 4001 bp, Homo sapiens; identical to SEQ ID NO: 1243404

SEQ ID NO: 1243407 - DNA, 4001 bp, Homo sapiens; identical to SEQ ID NO: 1243405

SEQ ID NO: 1243408 - DNA, 4001 bp, Homo sapiens
cttccctttataaagccgatttgatgggctagaaatggcaacttgatacatccttcaatttttcctttgctggtgaagttagtcataactttaattttgaggaatttgaaaggttgatactaaaattttttttttaattgcagtggcagctgcattacacagttaataaatgagatctatttgcatctgtcttatttccgtctgtcttttgttgaatgctggcacttagtatgtgcctctaatctaaaagagctctctgctcttgaagttatttcattggtcacacattaaaaaattactgagcacttactttacaccaagcaggcattgttttaggtgcaggggagcgagaggtaaacagtctctgttctcatggagctcacatcctaggtcaggcaataagcaataatcattactttgatgtctgtatgggtaggtctggcaggatgcagtctaatgtgtttgttaatacagtggtttaaagagtgtgcagaaaggggtgttcgagatagataaaagtggggcagaaaggtgacaacagttaaagcatactgataggtacacatgggctttgtttaaagctattttctctacgttggtacactttgaatatttctataacaaaaaaatgctagtggcatacaaatgcatgactgccttgggagatttttttctttttgttttttctttttttttttttttttttgctcactctgtcttccgcgctggagtgcagtggcgcaatgtcagctcacgataacctctgcctcccgggttcaagcaattcccctgcctcagcctccccagtagctgggactacaggcgcccgccaccacacccggacaatttttgtatttttagtagagacgaggtttcgccatgctggccaggctggtctcaaactcctgacctcaggtgacccacccgcctcggccttccaaagtgctgggattacaggcataagccaccaagcccggccaagggagaattttttttcttttgagacggagtctcactctgtcacccaggctggagtgcagtgacatgatctcggctcactgcaacctccgcctctcgggttcaagtgattctcctgcctcagcttcctgagtagctgcgattacaggcccacaccaccgcgcccggctgattagtgtgtgtatatatatatatatatacacatatatatatatatacacatatacatatatatatatatacacacacatacatacatacatataaatacacatacacacatatgtatatgtatatatagttttttagtagagatggtgtttcaccatgttggtcaggctggcctcgaactcctaacctcgtgatccgcccgcctcggcctcccaaagtgctgggattacaggcgtgagcctccgtgcccggcctgagatttttttttcttttggatggaatacaatttccaatagtgtctaggccgacacccctccaccctcctttgcctgtcattcaagtcaataccctggagaaaagaggctgtgggggaggccatgttcgattaggaggtttaagagtccatcaaagtgtcatatgtgttaggtgtgaaatggcgacactgggaattactgttaataaggggtggctgcagcacggtgattgttatgagaacatccccaccgccccacttttgtttgaagactttcgtactgaactacatgttgtttactttcaacaacgtatacactacagttgacaaaagttaatctcggtgataagaatatgcctgttaatttatctccactgtgctgaacggttaaaaaattgtttttcttcaataacaaaaggcttaacattttatttaaaaaaattagaatatcattatttcattattgtaatgggacgaatcctccctcctttctgccctggttggagagaaaggagtgcagcccacttgccctcactaccttcagcctcctcagtagcttctggcgcctccacattcagaggtttcagcttccccgccattttccaacgcggggcctgcgcgcgagcctcgcttgatgactggttaaaaaagaaaccacgtgagggtgaaaggcttttcagcacgcatgcgtgcaacccgcggttacgccagcggttaaatcaggagtcagctctgggcaggcgcagaacacactgcggccctgattgccagcacacatgctacaaccttgaggctgtaactccacaaacaagggcagaactagggtaatggccagttggggagtgagggtagtgtgcacacacacaaaaccctagggaggtctctcctgctttaggctgcttgtcttgtgcaggttgtcaaagtctgggacagacgtgcatgtgctatgtggtggtacacaatagttcgagtctgttttcgtttacaaatcctcatcaaagagttcatgagagagggttacttatctctgtttcacagatgagtaaaacgaggcttagaggctaagtgcatctcctatgtaaaaatgctggatttcagccactgtgtgcagtcaggtgctgtgtcctgggttccacaggtggacactgaaggccaccttctcattaatgttagcagcagccagcattgagggcgggtcatttctggcagggtaaagatgaaaaaagtacaagaagggcaaaggaatatccttgtgggtcttacttttaggccttttatgtagtttttttctttaaaataccctcaggccagtcccaagcatagcctggccctgaagtgccaattccagcacccccgtgggccaccctagacaccttggccagatctggacactcagggctgagattcaactaggaggcagaccacggaagcaagtttggaggggacagtccctgacagaggctagagcatcatccaagtggaggagatgagacagagggaagggagagggaggcctaaggatttccccagagggggaggtgcatgactgggcagggaaagcagcctgctcgcctggcggctgccaccatctctctcatcggtgggccctcagaccttgccccattgcttagggagacaatgactggccacagacacacccccacacacatttccagggtagacagaaggtaaaaaacaaaggtggttgctcccagcactgcctggtctgggagctccaactatcagagtccagtgaacaagccattatgggcagcttggtccgtagaggtggctggtggtgtggagtacttgggtgggtaacgaatgaagagccggtcctcctctttcttcacccagcgcaggagtttggtcactaccaagattgcacctgccttggtcaccagagggctgaggcaggtatagagctcgaatttggaggtcacctgggggtttcggaggagacagagtcagatgggccagagctggctatggacaatcctgcctaccccagtgcagctgcatgtctgcctcctgcaacctggaacatgtacctggcagcacctcctaccaggtgctgcctagatactgggctaaggtaggtaagctgatattgtgcaatttcagctggacctagtgacttcaactggatgatgctggttgtgtgtgtgggtactctctagacctgtttgctcattgggaactggggaaaacagtaacaatgtttaatattctgtcagtaacctattgtgtacaaggtcctgctctaagctcctacaactatgttttcatcatctacagccagggaataatataaagaggaactcaatttatgcctcataccacatggagaggcctgaccccacaaggtcactagcgcctttcctgtgccacctcccagagcgctccccttcactccctctgctccggccactctaccctttccttgctattcctcaaacatagccaggcttggttccacctcatagcatatcagtcctttccctctgccaggtgtactcttcctcctaatatccacgtagctcaatacctccctactccactcagatgccatctgctcagggaggccaccctgatcact

SEQ ID NO: 1243409 - DNA, 4001 bp, Homo sapiens
gcggcgacccgacctctgcgagcccgcctcgagcgcccacgcccctgggcctgtccctgcgttcccaggcccgtatctgggtggggggcggtgtcacctctttctttcccgaaccctcgcgtatttagtaattattgacaacacgggccgtttagtgagcatctactatgcccagacattgtgttaaacagccactttacatgcgtcccctcaccaaatcctcagaaagtccccgtgggatcgccattgttcttattctctttataaatgcgggggacattgggaccccaacaggtgaagtgacttgtccgggatcacatggctgacaaaagccggggttgattcaagccaggtactctgcaccgcgtgggcccgtggagtcccctcagagcccactcaagagtgtgggaacaggagccttcacctgggcccgcgattcccaggctggagccggaacggcgaaggggaggtgagagtgcagcaggcagagcggggcgggagggagggtatggaggcagcggagctgttgcttcctgcgcggttgggaactgtctggcctgttttctagcatgcaaatagggtgacgggcacagctcatgcagtgctgggacagacatgtccacccagcttcctgcacgtggtgggtacccgagggatgacagcccccacgtgactgattattaatatcacctgtaagtgtttgggctgaaaagatgacaccgttgacctctgaggttccgtcaaacctcaatgcctcctgcccaccagttccgggagacaggcatgagggggaccgcagtcattttaaccagcgctgcacggggcagccctgtgtttccaagaaacgacctccagcctcaacctcatcccttcgctcctttcccgctccagctccgagagtggagccaagggggaagccgggacatgcacttgtccccaagagtgggccacaagtcgggacgtgcgctcggaccaaaacgcagcgtcctgcctcccggtctggtcagagccactccgcaggggaggccaaagcccctgccccaccgtgggcaccgccctcctccaagacaggcgccgaggtgcggctggcccagaggttgccacctggacaaaacccagagctcggcacccaactgccacctcccctgccggagggaaggagcagcagggccctcccagggacgccccagtgggctaggctgctcccaaacctgccttccacaccgccgccaggaagccctcccagcccagagcctctcctccctcaactcacagctggaactgggggccaggggacaggctccctgccaaggagacccgagggtgtgtgtgcgggggaaggggaggcgcttctcggttcccgtagccccctcctgcccctcggagaattccgtccccaccccgtccctgcttccaggtcacgagaacaggaaaaacggagtaagggctgcggaaagggactgaaattagacccggggaggaggtaggggtagaggcgaccggcggtgacctctcaaggtccctctccggcgccgccggcccctcctccgcccgcaggtgggcgcgccctgcccggtgacgtcaccccaacctgaggccggcgggggaggggccggcgaggatgagagtgagtgaggtcggggggcgagaagcagggggcagggggtagggggcagggggctggtaggggcctgaaggtcgcgaggcaggggcgggagcgggggcccgggcagggaccactcacccaggacgcgacccggagcagggtctggggccgccgcgcaaagctcacggggtccagggcggcccctgcgcggcccgcgccgaaggaggcgccctccatggccggcccgggcgggacgcgcgcccctggcgccttctgtccgcctgtccgtccggccggccccgcccgaggccgctgccgctgccgctgatgctgatgctgatgctaccaacgctgcagccgctgccgcctcccgggagcgcgcgccggccgcggcggggacgcgcgggacggggcggggccgcgcccgcgccccccactgggtccatgcgcgcggggccgggtccctcctctccctccgccgcgcccacctcccatcccccaccctcacctgcctgccccggtcccgagatggagaccatcctcaggaacccaccagccaggtccccgggggcagggtggggctcgggtgctgggcgcagactttgctagagccgggaggacagacaggaggagtccgctcctctgggaagggcacttgggtgagggagtaaaggggtaggaggtccacgggctgcagcatcttcccccaacccacgggagaggggaccggctccctggccctggtcccaagaagaccagatggataactggggtctttctcatggccccccactgtgctctagctgctatcacagcttctagcctctggcggggaggatctggtgggaagaaaggcgttggccccaggagcacctgttgagggaggggacagagccaccgtggccagcgccgctgggagtgttggtttcggtgtctccgctccttgcccgtggccaggtggtggtgctcccaatgccctccctactcctgggtctccccagcgtacttgcggcgcctagtctggaatggagggcagggagcggcatcagagactaggagtcgggtgggggtggtgcctggctgccctgtgtcccgctgagtcccctccacagaccccagccttgggtgcaacaaggtccctctcctcatgttcctagcaggctggaagttcagatgactcctaggtttctgtctagagcactgagatgtctgcactgacatttacagcgccaagcgcttgacctgtgtagtggcggagactgttaccaccctgtacttcagataataagcaacccaggtccctgctacacgagccgggtgcacagatggtgctgcgtggcccagcccccctggagctcattcttcagccttgctgggcacaggtgggcagagcaggtgttgccagaggcgctactcactgtgttccaagtccatcacactgtgcgtccgatcacaacccctctcacctgttggccacagacctcccctctgtgtcattcattctctacttcatcactaacatcagcacccagacatgctgcactttctcctaaaagccaaacactgttgaccccacctcccctccagctgccttacgttactgcttcctttagcagcaaactctgcctgcaacaccctcctctctctccctctgacccggcagaatcagctcccaccgccacctaaactcaaggttgccactgacctctccgtgccaatcccaagggcaagtctgatgctgctgtcgactcatttatttctttagttatttatttattttttgagttacagtcgcactctgttacccaggctggagtgcagtggcgcaatcttggctcactgcaagctttgcctcaggggctcaagtgattctcctacctcagccactggagtagctgggattccaggtgtgccaccgcacccagctaattttttttttttttttttttgtatttttagtagagacggggtttcgccatgttgaccaggctggtctcgaactcctgacttcaagtgatctgcccaccttggtttcccaaagtgctgggattacaggcgtgagccactatgcccctcctggaggtcctcctccctcatgggtccttcctctgtgacctgtgagccttaggagcccagggcgcgatcctggggaggtctctccctctgtgctaactcctttggtctgcgtgtcaacagctctggaacaccagctcaagccagaacttttccttgcactagagttccactggcctggatgccttcaaaaacagactctggcctggcgcagtggctcacgcttgtaatctcagcaccttgggaagctgaggtgggtggttcatgaggtcaggagttcaagaccagcctggccaacacagtgaaaccctgtctctactaa

SEQ ID NO: 1243410 - DNA, 4001 bp, Homo sapiens
aaaaaaaaaagatgaatgcctcttgactcgtgcaaagtatacaaaattcaaattttggtgcctgcaaataaagttttattggaacacagccacgcccactcatttactactgtccatagcagttttggtgctatagtcagagtggaatagttgtgacagagaccatgtgagcctccaagagaaaaaaaatagtatctggcactttacaggacaacaaagtttaacaccttgttctagaaggaaaaccaacatcactgggtcatcgccatatgagatgcttaacatatctaccacagtcccctcttgagatcccaccttgacccctaagcagctatgtggccttgggcaagtcacttaatttctctgtgctgaaggcggccattaagaactccaggagccggtaatcatgttcatttctcactaaattgcgcacccagaggggcaggaactgtgctgttttcatcactgtatccccagtgccagcacttagtaggcggtcgcccaagtgtttgttgggcgactactcaatagcccctggacaacattcagcacacagtgggtggacagtaatgtgaccttcattgaacttgaagagaaactggcgattccacgaaagggaagccaattcagggaatctaaggcaggagatgaatggaagaggctccgccaggtgacacagcacagagttcccggcaggctgaagcgtctgaggacacgatgaggggatatgtgacccagaggggaatgggaggaccagcagcacccccagctgtggctgaggggacaagatgtgagccaagatgcaccctggacgtgggagtctgtaagcttctctgcccagctcagaggcgccagcgccagaagcaagcagctcaacgggtctcactgcgggtctgcctgcttgaccttggcgctgacctgcggtcacttcccttcttgcagaggagaaaggtcttttcaccaagaagcccggcccacccctccgccccctccccccaaaaaaggctgcttagaaattatttcagaattatttcagcccaaggattcttgggggacgtttcttcaaggtgaagagggtccacatctcccagaccccaatgcagcggagtaaagtaacaggctcccttctcttcaccagcgcgcctctggcctctgggtgtcccccacccctcagcacccagtgcccaggagagacgacgtccttgtccctcctggtcggaacagctgcctcaggctcgctccgccggccaattagccggagccgtcaccacggcaacggcagctggcgggccgggtggctggcgcgccccgggccgccctccccacggcccctcccctggggtggggtgccaaggagagggagggggcaggggagaagaaaagtccgccccaccccccattccctccccaagaggcaagggcgcgcgttgcagagtacacataggaccctccatcccggggtttgggggtccccagtctctcctcccggggcgcacccctgttgctgcacaggttgcccgcgcacgggcaccctttttctcgaagcaagtttgtgggagcctagccgtgggccctcccttccgcgcgctcccagccggagggggcgcggcaccccctacccgcaccccggaccttgcccccagcctcagccctacctggatgtacgccattttcgcccgcgcgcactcactccggcccgggcatggcgccgccacggccactttgccctcgccaacagcggagggggaagaaagcaaagggggaaaggaagaaaaaggcagccggtggccccagacgtgactggcgtggctgatgagcggcgcccgcccctccgccggccgccccgtccttgcctttccctgcgttccggctctcggaatcggggccgcctccccggttcggagatatcgggcgcccagggcccccgcctcggcctccctcgctgtcccgtgctccccaccgaggcgctccccaggctggaataaggccggggcgcctgggcaagcagcccggggcagctgcggggactgcagcgaccccagcgcaggcggggccggagacgccggggccggagcgcgcaggaggcgggggaggggatgggaatggggaagggggtgggagggggcggtacacaggtcagcccatcctgctggcacgggggctggcacctaccgaaagcagcgcccccggggcagccgtggagccgaggggacacagtgcagcctgccatgaagtctgcagcagggagggtccttcccatccagccctctccccaaactgggttggaaaaactttattcccgccccacccgacgcgcctagcacggttgcggtgaggcttgcagaggctgcgtggatgggagcctcaagttaaggtgggcgtagggcgtcccaaacggaggtgctgcgtccagggctgcagggggcgcgcggagagagcggagcgcccctttaccctaaacctgccggagttgcgccctggacgcaacaggtctagcgcggggcggcccggcagcgccacccagcgtcgtgcccggcctcgtgcgctcctctgcccacgggcaggcggccgccagcgagcgtgcgccccggggcgtgtccaccgccgccctcctgcctgtcctcgtggctggggcgccctggacccagaggcctccatcaaacctcccagcccaaggcctctggctctccactcagagattcgaggtggaacattgccctccgctggatttcttattttattttattttattttattttattttattttattttattttattttattttattttatttttgacacagggtgtcactctgtcacccaggctggagtgcactggggtaatcttggctcactgaaacctccgcctcccaggttcaagggattctcgtgtctcagcctcccgagtagctgggactacaggcacatgccaccacgcccactaatttttgtatttttggtagagaaagggtttcaccatgtgggccaggctggtctcgaactcctggcctcaagtgatctgcctgcctcggcctcccaaagtgctgggattaggggcgtgagccactgcgccgggccggttttctttttaatatgcccagtcatctcctgttgccggacaccagcttatcagcattttaattttaacctcccagtgcctctttttcctcagtaaaaacaggagaaaatctccaccctgcctatcctccagggctgatttgtgggaataaatgagaaaatgaatatgggagtaacaaaagatggatattcagatgcatatattttttgtctaaaaatctagcagacctatacattttttagtatgatatatttagtttgtagcatatagcacgtaacgcatattgagtgcttatgattctgcaggcatacacgcctcaacacttcacaagcgttatttcatttcaacctgcagtaccttgatcactcctattaggtagcacctgtccagccagagtaggcactcagtaattgtttttgttgccttattcactctgcttcctgagggaggtgctatgattatctccaatttatgagggactgcagcccagacaggtaaagcctctatgaaggcctgacagctggtagcccagggcactgacatttgaacccacaagtccagcagtgaacccaaagtggccactcctaaccactttgtggtatttatccacaatctttctccagcactgatggcaaggcatgccaggtggggagtgagcctcacagaggaggatgcctattggaacgggtgctccttgggggcacttgagggagttcgaggaatttgctaggtgttcccataagtaaaaatagttaaccctttttcacctgaggtcaggagttcgagatcagcctggccaacatggcgaaactccgtctctactaaaaatacaaaaaatagccgggcatggtggcaggtgcctgtaatcccaactactcaggaggctgaggctaggagaatcacttgaacctgggaggcg

SEQ ID NO: 1243411 - DNA, 4001 bp, Homo sapiens
aaaagtgcactacgggaagcatatgttctttgaggaagcagataacaaaaaacaaatatgtagcccaaggccaagcagtagtgagaactgtattaaagccaaccacccgtccaggagaaggggatctggtagtgggctgagggcgtggtttcagcaaagccagccaggaaaagcctcgttgagaaggtggcgtttgagcacagcctgaacctagtgaaggagagaaccatgtacgcaactgggaagagggttccaggccgaacggtcaacaactgtgaaaatcctagagcagtgaagtgtgtgagaaaatgaggcagccagagtgagcgaggtggagagcggtggagatggagtcagaaagacggcaaggggcagcctctctcccggctcgtaagtaccgtcatcatacatttacagactacacccccaagacgctcaagttactccacagccagggactgcatctgagcatcgtcttcctactgtcaagcacagtgcctcccagaaaatgcactaggggttgaaaaaaataaatttctatcacaaggggccgggcgcggtggctcacgccggtaatcctagtactttgggaggccgaggcaggcggatcacctgaggtcgggagttcgagactggcctgaccaatgtggagaaacccggtctctactaaaaatacaaaattagccgggcgtggtgacgcatgcctgtaatcccagctactcgggaggctgaggcaggagaattccttgaagccgggaggcggaggttgcggtgagctgagatcgcgccattgcactgtagcctgggcaacaagagcgaaactccatctcaagaaaaaaaaaaattacatcacaaggctttggtaaatacagtcctctagaagtatgagcagccatagcatccctcctttttaattaacaaaaataacaggggcaaaaataacagcagcgctcgctgaccaagcgccagcatctatctgccaggcacatgctaaatgctgcactcttctatcgccgtccctgttaacagagttcaggaaacgaaggctcagcaagaactttagtccaacagctcttagctgccacagccaagacttgattcccatccgattcagaggcagagctccgaaccagtgctctcgcatgcaccgaaatgcaaacgctagcattagagtctcgctatacaaaaatcttttccctttggccgggtgcggtggctcccgcctgcaatcccagcactttgggaggccaaggcgggcggatcacctgaggccagaagtttgagaccagtccggccaatacagtgaaaccctgtcaatactaaaaatacaaaaattagccgggcgtggtggtgtacacctgtaatcgcaactaccgaggaggctgggcacgaaaatcgcttgaatctgggaggcagaggttgcagtgagccaagatcatgccacagcactccagcctgggtgacagagcaaggttctatctcaaaaataaaatagaaacaaaaatattttctcttggaaccgcatagcctgaaacgatcctagacaggcggagggcgctggtggagagcacgaccccacaaaagccctcagacaaggcagcctcgacttccccggccggcttcccgccctcgctgcgggctctccaggaccctttagacctccaaggctacagaactcagtcggatccgcaataacgacaggccggggactgcgaaacgtgagcctgccgcggggactggggattgggggcgtccctcccctcctacatctgcgggtccgctcctcgaacacgcgcagtccgcgcggagggggcgcatgcgtgcacttacgtgaccccggcctcgtcgtggtcgtctggaaaatgggcctcggcgtgatgctcgccggaccctggcaccacgagggaaatctcaagtagaaccccagctttggcactcgggacgggtcagccccgccgcagctacccacggtcttccggtttggaccggaagtgcctcctgcggaggcaggaagtcccgcctcccagccaggcctcttagggtcctggcgcgccccctcccgggaggagagggaacgggcgtgcaggcggcgcgtgggcagcggaaataaagctcccttgagtcccaatagtggaggccgggtggacttaggttcgaatcccacatctacttcaccaatttcctcagagttgtattaaattaatcatttaacgaactcccacagaacacctactataagccagacctgtattggtcagtaggtatcctactgattgtccttaaatcccaagaagcgggctttacaaataagggtacaaatacctactaagagtgaagcttttccaggggtggtcaggcagggagagctttaggcagtggtcttcaaactctagctagcgtgcgtcagcagtagcacctggggggctagttaaaacacagtctccaattcggtgagtctggggtgggacctgatgatttgcctaagttcccaggtgatgctgaaactgcttatctgggggccatgctttaagaaccactgtccagtcatgaaccttaccgttatcctaacatagtacttctcaaacttcagtgagccttagaaccacctggggggcttgttacaagtttgctaggctccaccctacctctgccccccgagttgctgattcagtagatctgggatgtggcccaagagtctgcatttctagcaagttcccagatgatgctggtccaggggccatactttgagaaccgttgctttaaagaatcaatttccaaattctcagctgtcatctatgtctttatttatttttttgagatggaggctagagtgcagtggcacgatcttggcacactgcaacctccgcctcttgggttcaagcaattcttctgcctcagcctcccgagtagctgggattacaggcctgcgccaccatgcccggctaatttttgtatttttagtagagacggggtttcaccatgttggtcaggctgagtcttgaactcctgacctcaagtgatccgcctgcctaggcctcccaaattgctgggattacaggatgagccaccacgcctggcctatattgtttttatctggaagtttttacctggactaaaagtgccagcagggctgtgttccttttgagaggctctaaggaagagtccactatcttgtcttttctggcttctggaagctgcctgcattccttggctcatgacccctttccatcttcaaagccagcaatgccagtcggattcttctcatgaggccatctctctggtttttactcttctgtctccctctttcccatgtaaggacccatgtgattatagtaggcccgcccaggtaatccaggataatctccctattttatttgttttatttatttttttgagacagggtctcactctgtcgcccaggctagggtgcagtggtaccatcatggctcattgcagcctcaacttcccaggctgagatgattctcccacctcagtctctcgagtagctgggattacatgcaagcaccaccatgcctggctaattttctttttttttttttattttgagacagagtttcactctgtcacccaggctggagtgcagtggcgtgatcttggctcactacaacctccaccttccaggttcaaacgattttcctgcctcagcctcccgagtagctgagactacaggtgcctgccaccacacccagctaatttttgtatttgtagtagggacggggtttcaccatattggccaggctggtcttgaactcctgaccatgtgatccacccgccttggcctcccaaagtgctgggattacaggcatgagccaccacgcccggcctaatttttgtagtttttgtagagatgggatttcatcatgttgcccaagttggtctctaactcctgggctcaagctaccttcccacctgggcctcccaaagtgctggggttacaggtgagagccctattttaaaggcagctgattagcaaccttact

SEQ ID NO: 1243412 - DNA, 4001 bp, Homo sapiens
aagtgctgggattacaggtatggcccacctcgcccagccactacagatatttttaaattccctaagcagctaatatgataaaatagtagacagattcatataatatataagactacatgtacaaaataatataatttcacgaactaattcctcttcaaataggaatgcttgaatttctgtaaattaaatgagtacatatatgtgtactccaccacatactcatagagattagagagtcttctataaatgaagcataatatacatgtttcataacagatgattactttcaggatttttgcttatttaaacgtgttctcagtcatacaatagagagttgcaggccaggtgtagtggctcaggcctgtaatcccagcactttgggaggccaaggcaggcagatcacttgaggtcaggagttcgagaccagcctggccaacatggcaaaactccgtctctactaaaaagacaaaaattagctgggcatggtggtgtgcacctgtaatcccagctactcgggaggctgaagcaggagaatcgcttgaacctgggaggcagaggttgcagtgagccgagattgtgccactgcactccagcctgggcaacagagtgagacctcatctcaaaaaaaaaaaaaaaaaagagttgccgttagaagacaagtgacctctcgattagcaacttaaaattctattttgcagtctgactcttaattgagacaatgtagcatatttaccatacttttagtggaaataacctaaattcaaattctgccacttactagtctgacattgggcaatttccaatgtacctgaaccttggtccttcatccgtaaaaattgaatacaagtagtaccgatcccaggggatcgtaatgaggattaaatgatgtgtatgtcaacagcctactatggggactgatacttagtaggcactcatttactaatattagtaacttgtgttcacttcccgctggtgtggtgtaatgtttgcagaagtttttgcagttttaagtataaaatctgagactgggaggtgatcccctttggcctttcatgtgcccttgctaattctacagatcccttcccatcccttcccccaaatatacaccccagtgataagcagagctctatcttccacgtcctttccaaaagctccagataacatcagagcccctatactgaacaatttgtctgattctgagaagggggttcagtagatctcgggcctaggtccgtgttctgcccctaatttgaccacgtgatcttggacaggttacttaatttcttcagtgagccttgggtgtcctcagtcgcaaaaggagtagcagcttcaaccactcccaatatcccttcagattttagactgggaagaaactgtccacgcaccacaaagattaaaagcgcctggtaacccctaaatactctccccaaacccatttcaaacgtcactgcttccgatgtctggacttcttggcatttcgtacaaatctcaagggtccatgctggcccctgcgccctcacgcggctaggacctcacatttctacgtcgcgggcgccctaccctctctggagctgggtccatatccccctcccaagagcgctgcagtaagcactgaatgaaataacggccccgcctgacagagcccagcacaaggcaaatgctcaagagatgttggctaatatcagcagtcaacggatcccgcgccctccttgagcctcagtttcctcaagaacgtaatgaggacgggcatagacaatgctcaaagcccccagcagcgggcggagggtcccgaggcgggcctaaggggcgcacgctgcggaaggcagggcagccccggaagccgggcggccctgagagtcccgggtccagcccggcgcggagatgcgtcctctcacctcccgggctcagcagcagcttcaatgcctccaaaatccgatccagaccgcatgtctcctgagccccgctgcccacggcctgtcgggccgccatgactggagtgtaacaccacgctcgcgacccgctcaggcgcctcggcagggcgccgccgccgccatgttaagtgtggcagaaggctctgggcacactatggggcggggccaaatcgatcgggaacgcccccttcacattttttttccgtcccggcttagtccggggggtaagagggaacccaaaaatggctaatctgcccacgcgcacaatttcagaagctcaatatgattaaccgctatgtaaagaaggaagagagaagtaatgtatcattaaagctatatttcaatatgaaaatactcaggtactcaacactggcagacataatgaagcagacagatgcttccatctgcttacagtgaagtatggataagaaaaacaatattcaggctgggcgcggtggctcacacctgtaatcgcagcactctgggaggccgaggcgggcagatcacaaggtcaggagtttgagaccaacctgtccgatatggtgaaaccccgtctctactaaacatacaaaaattagccaggcgtggtggcgggcgcctgtagtcccagctacccgggaggctgaggcaggagaatcgctcgaagctgggaggtcgaggttgcagtgagccgagatcacaccactgcactccagcctgggcgacagagcgagactccatctcaaaacaaacaaacaaacaaaacctaagtacagacgtacacacgcatatatatccatcgtgaatgtaaagctacaaatgttgttatgggtaatatgattttttttttcagtgaacttagtaaagttcccagtaaaagttcgatctgtgttctgttttcatggttgatgcattcctcgaaaattcagggtctatcaaaaccatgccctccgccaaactgtttttatatgtaaaacagaatggatttgagattcagattatcggaaacaggttttcacctacataaatcctggtgggacgttgaaaaaccatgttgtctgaaagtcatgccgcagacacaggacaatgtttttgagggcaggacctttatttttattttattttttgagatggggtctcgctctgtcgcctaggctggagttcagtggcgtgatctcggctcactgcaacctctgcctcccaggctgaaacaattatctggcctcagccccccgagtagctgggattactggagtgccccagcatgcccggctaatttttgtattttttgtggagacaaggtttcgccctcttggctaggctggtcttgagctcctcacctcaagtgacctgcccacctgggcctcccaaagtgctgggattacaggcgtgagccactgcgcccggcccaaaggacaaacttcttaatggtccggtccttgggcgagaataagctgcgcatagctattaccctttttggcatgactcttgtttcttcttttctttgtcattttggaatgcagggcctgagagggaaaaacgctaaaaatttttttttagagatggagtctctatgttgcccagacttgtctcaaactcctggcctcaagtgatcctcctgcctcagccttccgaataaaatcttgtgtgtgtgtgtgagacagaatctcactgtcacccgggctgaagtgcagtggtgtgatcttggctcactccaacttctgcctcccctgctcaagtgatcctcccgcctcagcctcccaagtagctgggactacagatgcatgccaccacacccggctaatttttgtagagatggcgtttcaccatgtcacccaggctggtctcaaactcctgggctcaagcaatttgcccatttcgaccttccaaaatactgaaattgcaggcgtgagccaccggttctggccttaaaaatatttttgaatgggaaataaatcacctacaaaattgccactgtgctctttttattttgtgtattcctttccaggttttgtcattagacaatgttttctccattgtgtatgggcacaggttcatttgggaaataaaaaattttaagagtattttgag

SEQ ID NO: 1243413 - DNA, 4001 bp, Homo sapiens
tacagcatggagctgttgttaagattttaatgagatctcatacttaggaacaccatgcagacactcagcatatggatttttccttccctgcctccaaggtccccacaaagctttaatcctttgggggatcattctaccccaacagcttggcttgaacagttaaaagatgccactagtgctaccatttgtcaggagagagccctctcaggaatccaggccaaaccctgggattggggtaaagatgaaggtcacagtggatagaaaactccatgaggcagaggcaaaagccagaggctcccatcaggaaaagcttctgagtagagccctcctggaaaggaagctcatctcatccccattcttaaacctcaccccagcctggactcctagggacccctggccgagcccaaactcagaggaaaagagatggcaagaaccaggcatgcatcagggaaagatgtgattgaggacttgagttcaaattctggttctgccactgtgtgaccttgggcaacctctctcggcctcaacgttctcaactgtaaaatgggaagatgccaataaaagaggcccccacagggtgaatgcggggatgtcacatgagagaatggctgtcaaagcactttgtaaaagacagatcgtttgacaaatggatgagattattgacaccatcacagcaagaggttggaaggtaactgcagctgggggaaaacattgccaggcacctccaagcacacacacacacgcatacacacaaacacatatacacacacttccttgcaaggacaagaaatccaaccagaccaggcctgaaaagcagataagcagacccaccatgggaatcagaggcatgggaatcaaaaccacagaatagccaggagaacgggacatatcagggaggagaggtggctgtgaggggcaaagtgaaggagagaagactgaagtgcaaatccatctgattagctgaagcaccctagggtgtgaacgccggtgacatcagagaccctgtcacctgaggtcccccaccaaccagacacaatgaagggaagaggaaggggaagggggtggcaacagaaggcaaggctagccagaggctgaccactcgctcagctgggcttccccatcctgagagggcctacccaagtccagcttctcagaaaggcgcaccctttcttctcagaactagacacagggacccgcgcccctgcaccccgtgtctcacctggtaggggtcactatggtgccccagcgcctccgcttccgcctggggtcctccagcggctctgccaagcagggagaggggcaaggagacctttccccttgccacctcttcctcggctttcgcccttcctgaggggcgggcccgggaagcctcccctggaggggagggggtgacaacctaatctgacctcgcggtccagtcctccccctcgtcgagggcgacagctgccgaattccggatttctgattgtggggtctgaaccccgaatatctgaacgggatggagactgaatccgatatttgaacgcccggggaatgaaccccggatactggtgcacgcaggggcctgaacctgatatttgaaattctatgaaacagagacccaggtttagagaggttgggacccgagtcccggatatctggactatgaggactgttacccgggtatctgagaaaggaggaggggcaaagcctggaaatttgggacccaggggcctgagctgtaggtcttcggccaccgactgggggcccaccccgaggacgtccggccgcacggcccctctcacgccggggtccgagggtgacagcccccactcccgccccggcctcctccctctcccttctctcttccgagaatagctgaacgattgtagctaaggtgctgctgacggtccccgcgccctctctgcctctcctcttctccgtctcagcctctctccgcaccacagccccggtctcgtcccggtctccctctccctcttcctcccaattccaagatggagaccgggcgggagcgcgcaggcgcggtagggacgccgggctaaagggggcgggggcgcagaggactcagccccgccctctctcctcactgccgcggcctgggagaccggcagccgccaagcccgagtgcgcgcccgccccgccacgcggaccccaggccggaggaggcggggagaagagctagacttgcaaggggaggagcccggcactctgtcccacgactggcggtggacagagctgcagcgcatgcgctcgccccgccttcgctctgagcccgagcttgttgctaggggaagctttgagggggcgcgggtggacggacagcagcggcgatctgcgactgcgcgcagggtggaagttgggaggggcaaaggaagctgctgctgggcgcggaaaaggcgggaaaatagactgctccgaggttagcaaccatctaacctggaaaagggcctccaagtgcgaggaatctttgcgcgtcgacgctgggaaaactcaatcggtcaaatctcttacggaaattgaggcgctgcaggttgcaagacttgccaaggtcacagtgcatttatgtcacagcatttccatgacctgacaccccacccgcccaactaactgtaattatccattttatttcgtagaagaaaacaagacaggtgtttaccaaagccaagtcaaccatggggagagctcaagtaacctatgccctatgccaacctgtgtccaaactagagagtcaacaggaaagagtcccccaaaacttctaagcctgcctaccctaaaatccccacctcaatccaacccccaataaacaccatacacgccactgggcaaaaaagctttttattttcccccacattccagctcttcactttttctaaaaccttttccaactcagagccaaggcccaagaagttgattcacacctggggagaaagaaaataaaacaacaaaacaggtcgaagagctgctagaggaagctctgagatgtgtgcagaaattgaggaaggagcagagggagtgacagctagagaccaatacgggcatttaatcccaactaaggtagcctcaggaccccagggtctgtcaggggccaggaagccctcctttcccagtccaaggttgagagggtcctgtcatttcctgtcccaagtaggtggttggggcatttaggcccagccatcagcaaaataagcacagttgatcttgagcttccacttcctctggcctgatcagttccctgggcctcaactatttccacttttcccatagtaacttcctagggcactgcagccagctgaagctgagaccagttcaagagctggatgcataacacatggctctcaaatttcatgcacccccctctgacaagtgaagattttttgcagaaatattttttcctttagtgagctgatgtgtgaactggttaaccaacatgacccccacccactgctacgtttgtgaagctgattccctccaaagatcttgttaacggaatcagctttttctaaaggtaacgatgactaaatggaagacagaaggtgcatgtcaagttcttgggcacatactatgtccccagtaaatgagtatcatcagttagactcttctgagcggttcaagttgaattttacaaaatttccatcataaaactgggtattggaatttcaggacaaaagcaagacaaacatggttcatattcaggacaaatcatcaaatgtgaaccctcttaactcaccattgttacccaaatgcttggatgtgaactagttatgagtcttaaaatcacaatgttgcttgaaagaagtcagccacaaaagaatgtgtatgattctgtctacatagtttcaaaaataagtaaaaccaaactatattatttaggaatacatacatggcaatacattataaagcaggacagtaatttctagggagagagagggcattgtcaggaaggaagggaccatggggggtttctggacagctggtaatattctactcagtggtatttataa

SEQ ID NO: 1243414 - DNA, 4001 bp, Homo sapiens
ttttatttttgttgtatgaaactttataaaatgtaagtaatcaaccgaaaaaccacgaagtccccgatataactctttaaagtgtttttaaaatttgattttatcatgaaactggggttttattctgcattaagaatgtgtttctatgtacacataaggaaaaaaaatgttcaatactgaaagtcaaggaatcatgtactttaccaaaatattcagggtagaaatttttaatagatggagagaaacctaaaaaggagtaatttcaatctatcagaaacaaccttctatccttcagtttgacagcccattttttgttgttcttgggtgtttgtttatttgtttgtttaaacccgttagtcataaacggtaacaattgcatttcaatgtgctcaggaccataatgaaaataggccttcaatacatagagaagcagaaatgaagcaaaggagctatatacacagagcaataagtaaatccatttaggacctagaggctcagcaaacacaaagctcctgccagactcaaggccttcagattagaattagtaatgataggataggagctttacttgacaaataagtatgtttgggagcctagaggggaagtgcccatatgtcaaagaaagccaggaaagaagttggaccttgatgccttgtatttaagcatcccgagacccggttcccaaatccaaaggaccatgtaatcttagcctctccttaggaattgtgcatcaggaaagtgaagaggattgctagacatttagtcctgttataagagcactaaagatttggcagtcaccaggtatggagtctcaggaggagcttaccgatggatggggcatagccattatatttgcccgagtccagggcatctttcattgcctgggtaacttcagggtctgtaggcaggtttccaaacacagtagggtcccctttttatgggaggaaaacacaaaaggagccaagaggttattctcccatgttcagtactcagactcacccccaactgccatcttctccaaccagcctgtgaacatgagagtagaggaggacaatgacagcccctcagtagtgtccccaactcaccaatggacagggaaatcatggttttgtttggatttggtttcaccttcatgttgtccacaatggctcggatggggttgaaagttttcttggccatgtctgagggcctcacagaccacctggcctttctgcctttcatttttcccggcacagagcttctcccaccaacgttgacatgcacgtccagaattgaggggaggttgcctttgctgctcatctgaatcatgtatgggtccatcactagcgaagcctgcgaggggaaagaagttccctgtgatgttgataacatagcgctgggggacagaggagctacatttggacctaaacattgggtgacttcactaaaagtgtctttccaaactctctctttatttttttttctactttctgttgtaaagtagctttactatgaatgggggagttttaagagtttttactgagatggaaaataaagcaagaacccattctacttaagtaggatttgctacacgcatctgcaattcctgtcaaagcttaaccatgctctatgtgaaaccaagaaggaataagatgaaaattgttcatcagtcaaagcataggttctccttcctttccatgcgagcctatccaagaaaatctacctaatgcttcttgtcatctgcagaggaccaggaagaaccactccatcttgttagaagttccatgtaaatatcattgttagtaaaagtaaaaccttatcccataagcatgttacagccctagctggaaaaagaaatcaatacaccaaaaagaaaaaaattaacagctcaatcagtcaccactgcctgatcagcttgggcttgagatttttaccttccaagtaaaggagaaagcagcctccaagaagccaaccccgaaagctcccttagctcttctttgacaggttacaggggcaatgaactcagatgcaaatcctaactcctgaaatagtctccacaaatgggcgttgggcttgaaactttcatgccattggttggaatgacaactcagcagccagctctcccctcagcttctttcctcctctcccccgtcattgcctctcatccctaagcccacctcccaccctcaaagcaggaatttgtcctcacttcaaacatctggaattctcctgtgttaactctttctgggcacttggtgagatggtttgagaacatctactgtcagaaagtacttctggttacagttgatagcttttattaaattttttttacaaaacagcctgttaaaattttaacagtacagaaatatataaagtaagaagtgagcattcttccttgcacctgctccctgtacacttcattctcactcccaggggtagagggtggtaatggtcaggctctttccctccattcagagatagatacattacatataggtgcatagatacataatttcatagatttcaaaacacagataggatcgtgctctacaccttgtttggcaacattttttttttaacttcctacatcttggacgcccatccttgtcagtccacaaagttttgctccaatcagaacaaattgggcacttaagttccattcaacaaatagctgaaaagcacagggtgtccaaggcagctgaaacctgtgcagttttatccttgcactgtgcatgaattcttcatttacctcctatggttgttggaagaatttaaaatgtcaggtgcgatccacacaaaacaactttgctaagcaaaacacaaggtccacagccaaaatctcaacattcctgtgagcagatggaaaataccacccactgaagggttaagagaagcctcagtgatctccccagggctcagatcctgtctgtttatttgttggaagacaaagatttttcacatcagtttgttcttctccattcacttttcagggagtcaagcctccagtggggttgaatacagtagtccccccttatccacagggagcacactccaagacctccagtggatgcctgaaattatggatgtctgaaaccatgggtagtactgagccctaggtacactatgttttttcttatacagtaatggcaggtaacgtctatagcatggatacactagaaaaaattattcacgtcttgggccaagggcatccttgtcataaatgttagtttacatatttgattatttccttaagacagatttctatacaaggactgtgttgcaaagaataagcatttctcttttacatttttagtaaatatgatatatccttatataataaattcaaatagagatgtacgtgaattaaaccctgatcaccttccctccctgcattctcattttatataaaaaaatcatttttagtcatttcttgtgtacccttccaaatgttttctatgtttattacaatacgtataaagctggtttgggagttgctaaaaaaatggagagtaaacgtggtctatagttgcactgtctaatattgtagctactagtcataagtggccgttgaatacttgaaatgtgactggtctgaattaagatgtgttgtaaaatacacatcaggttttgaagacttagtataaaaaaagaatgttaatatctcatataattttgtatgattacatgtttaaagaatattttggggctgggcatggtggctcacacctttggtaatcccagcctttcgggaggccaaggtggatggatcacttgagctaaggaattcaagaccagcttgggcaacatagtgaaaccccgtctatacaaaaagatacaaaaactagccaggcatggtggcatgagcctatagtcccagctacttgggaggctgaggtaggaagatcacctgaacccaggaggtcaaggctgcagagagctgtgatcatgccattgcactccagcctgggtgacagaatgagaccttgcctcagaaaaaaaaaaaaaaaaaaatatatatatat

SEQ ID NO: 1243415 - DNA, 4001 bp, Homo sapiens
acagggcttcccccgatccctgcacacatagccaagactaaatcaatcctacttactctccacgattcagagcaggttcagctgactccctgctctaggtgcctcaggaaaccctctggagatctctaggctaaacccgaggtcttctattgaaaccaactgtttaagtacttttctttctctccagatgattggctccttgaaaggactattttatccttagcacctggggcctgacacctgggggcccaggagatgctgtaggctgactggcccagcaggtcaaaggggcacaggaacaacgggcaggatccagagagggggaaggaagaagtcagaggcaatcaccccctacctcgggagtgactcaggccccggagagaactaggaaagagtcagcccggctggggagatgaggaaatggggaagaggcctctcccaccctttacttcagtgcagatacaagactgccctgtttcacagcgggatcctgactgcacagtctcccttccatcagccagacttccccacctctctactccatccctgggacctagggctatgggggaagggagatgcctgcacccctcccaggctatccaccctaagggaccaagggtctctaccagaaccctcgcccaaccaaccctccagaatatccggcctgtagctggagttccccatcaaagagcagggatgacctcaggtatcatctcattcaatccactttatagaggaaaaaactgaggcacggaaatggggaagccactagctcaagggcacacaacccatcaaaggcaaggcttaaacccagacctcttgacccctggtctgaaactccactaacatgccaatgtcacaggcacctcaggatgctcaagacacggcagctcgcgctgatcaccccgtggatcctcagaggaggctgggctgccagagtctgggcaaagtgtatcgttttcgtttcgccctcccccaacctttgcttccccgaggcggtcccgctgggtgcccactggtactcacaggctgcccgagtactggctgcccccaaggaagccatacttgtccgtcttgcgcagggccagcccgtttatctctgaatctgagcccatggagctcacatcatccgccaaggactccaaggtcccagacatgaggctcacggagtccaagtaactcagcgtgtccggggcctgccctcgaggcccagagatgccaggtcccaggctggacgtggagcccaggtcttgagagttttcagcaggctccggagctggggtcacggtcacgacagctaccggagcctcacaagtcccagaggggcctgtgccagggcctgaggggtcctcaggagcctgtcctgctgatgctgatgttgctgcggcagctccatgcccacctgtcacttgtcctgatgcactccgtgcagtcactcctgaggccactgtggttcccggcttgggggcaagcgggggtttggcggtcagggcaccaggagccgttctggaaggggtcctggtaggggtcccggtgggggtccctggtcctggggcgggtgagggtcgagcctcctctgtcttcggcgagtctgcccctgcggccagagccctcgatgtctcaactccagccactgccgcgggctctggggattccgggccggaggggagctgcggctttggggcttcgggcgaggcctccagggtcagcaccaccaccgtgctgcccgtgacagccggggctggggccggggctggggccggggccggagcagaggtctcggccgaccccgggacccaggcgggccgcgcctccccgggggccaccagggtgacgggggccgaagtggccgtagtcactggaggtcccggagccaccaccacgacgggcccggcccgggaaccccggggcggcggcgagggggccgcgggggcgccatgacggcgcggcggggccaccaggggcgccgtgcccgtctccatggccgcgggccgcccctcacatccccccgccggggaggccgcagaaggcgccgcccctcgggcctcccggcgaggccagccgagaaaggggagagggcgaagggcgcggctcggcgcgcgccgggggcggagcggccgctgggcgcgcagaggcggggcaggggtcggggggcgccgcgcgccggggtctctctcgagccctctcaccccctcgcgcgctctcgccaccgccccctccctcctgcttgggggcgagccgccgacctcgcgcctgcgcacacgccgcagagccggctccgcgccagcgtctcggcgttccacgcctgcgcgcggactggctcatcgcgctccttttttctcccgcctagtcagaggatttggacgaatagtgggagagagagaactgggcttctgccaatcgttggaatcgtgggcggggctggaggcgaaaaaggggtgggtcatctggaaagaggaaacggagaaagctagggctgtaagaccaatcagaggacgaggaaaggcagggggcgatgggacgaaagaaataaccaatagaaacgcaggggtctgaacctcctggccaatgaatatgactgaagggtgaatgaccgcggaagggcggaggaggaggcagggctgtgcgagtaagaggtggggcctggaggcttcttaaccaataggaatggtaaaaagggagccaatgaaaaggggagcaggtggaggtcaaattgacaggcagtgatgtctatttaggcggtgacagacagcatccgcagtcaataggaagagctgaagaattctttaggtctcccaaaatggtcagtaaggaatgacagctgggaggaggcggggcaagctagagattaattcgccccgtcagccaatgatcgtgttctcccactttggccacaggacaggaaaatagatagctgtctcagccaatgggagcatccaaagggcaaagatgctgccagcaggcggtgccagcccagggatagtcggtgacaaccggagacaagccttatgggagggtgacagctggggacagcacggagaaggggcgggggcattagtgcagccctcaaccaatgagtgccgcgctgccccctctcgagtcctttccggtcccctattcttcgttcagctcctgagccccacactctggtggtctgtgggaccctgagccccaccacagatccagtgccctgacccagtactctcatcctttactctataattctccgatctcggcccccaactaaccccaacactccaggcccaggtggcaatagccagagcccccagatcctataagcaacccatatctctgcttcacccatttcctgcgggaatcccaacctccaagtccctctcctcagttcccatctatctgagctcctccccagaacccaggctccagttcctcagaccttatccctctgagtaccccctccatttcttctagtggggatctcaaaccccaaatccatgaatccctaataccatgaactccccatatgtgtgttactattcttttggggatccaaggccccagtcccgtcaacccctctcccctcactgccacatccctctgtgctcctcatgttccactgagaatcccgacctcaatctcatgagcgctccaggttgtccttagatcacaagcataaagacctgacgttatgagctccaaccttccaacttctaaacgccctcttctttctctgacccccatattctgatttccatatagcatccaccatcctggaattccagtgagacctagctcccgacttctcagctcctccttggtttctgagtcctctaaggtccctcactcccaactcagccccatgtcctgtcaattcccactcagtgtctgatctccttctcctcacctttcccatctcccgtttgacccaagcttcctgagctctcctcccattcccctttttggagtcctcctcctctcccagaacccagtaataagtgggctcctccctggcctggaccccc

SEQ ID NO: 1243416 - DNA, 4001 bp, Homo sapiens
tgagttgaaaaggacttctttcttccatttacagagttgtcataacagaaaaggtatgctcagacaggtaaaacattgaacagggtaaatgttaagtgctttttttgtaacctgcttcattgtccttatgtactttaaaccagaaaccatctaaaggcaaacatttaatatgttttctgagcttggctcaatctgtagataattaagagcaacactgcatgcccaaggtcactcgagcctgctggacactcctggcaggtgtggtcagcgagagctagtaaggctaccctacaggtgacttcacagaccctgggtggccaaatttattgttgttatgaaaaccttgcctagattacttctgcatctcggaaggtcaccctcaacccagtggaaagccactgcaatagttgacatctatcactccgacaaaaggaccttgatccacttcaaccatcatgtagagaaaacctctggtccggccctggccaggctgtggggaagcaaagatgaacagcgtggctcccgccctcttcacagggaaagacaggcttctaagtagagcaagcactccccaataagtcctccatgtaaagcctctatctgagtgttcagattagatgaggatcaaccctcagaataaaaggcggtgcacgcaggggtcacgccacaggctaggaacagtaactgtaaaatcttcgtaagattttctgatcttctctaatctggattggttttttttcccagtgtgtgttccttaaaatgaaaagaacctgactgcttgtcttcgccgcaactgagcaaacatttacaggtgcctactgtgtgctgaagacagagccctggccctcgggcggaggaaacgccacgtgtgccatctacaggtgcctactgtgtgctgaggacagactgtgaagacggagccctggacctcgggtggaggaaacggcccacgtgccaaataatgggacggttccttctgcacactgcctggaagtcacctggtgactccagagcaaacacagcaaaacagggaaaaatcacccgctagtgcttctatcggcactggaagggcaggctgacgccccctttctggaataagctgctgggtaaagacagtgacatcggcttcacaaccacagccaccaacctaacagcccacctgcacctccacaccacccaggtggcttttagacaacctttgacctttaatatcacccccgcaagcagtaacccgggggccacagcgcgtttccctgcggggcacggccatcaaagaaggcctgtggccaggccgcggggactcccgcctggagggggcgggaacaggtgcagcccagcccaggtggggccggctctcccctccgctgtgctggctcagggctgggagtccctggcttccacctcccagggcccgaaggacagcggccgcctggcacggcgcacccagaggggccccccactggacagggccgggggctggcggacccccaagcgggtggtcggtgggggcgtgtgtcatccctgggcggggcggggcggggcccggggccgctgcaggtccacagggcagggcgtatcagaatctgttgcaatctcaccgagcccccaagaggatttccgaccctgcggagacggaaagcgccccaaggaaacagtgacacagtcactcttccagacgacaccatgccctgggccgggccgcgggccagcgaccgggcggggatcgggcctcgcgcccagggggtcccgctcctgcgccccctcccgtaggccaagccgcagctgcagcgccgggcggtgccgggctctggagcccccaacccgcgcgtggccggggatccccgcctcgaatggggcccgcagcccggcccccacgctcccgcccccagcacgcgccgaccgcggtgacagcggggacccggccccgccacccgccaccccgccgcgcgccccccgcacgccccgagcgcacccacctccgcgcgccgctttctcctcagcctgccgcgccggcctttctgcgcacgcgcgtgctcggccccgcccccgccgagctgtcgccctgtgcccaccccggagagcccgcggggctccggcctgcccggctctgggcatgcgcgctgacggtcggcggccgcagcggcggaagctggggccggccgggaaccggtcccgtgcggagaggaggcaacggcagtgcggtcccggggggacaagccaaggggggcggggggtggcacggccctgccgagggcatcgggggcccggacagccgcctgtcggagtcgcggtccggccgggtcacgcgtggatccggaaccgcgtgggcacgacgtcccttcccgagtcgggggagaagggctggaaggaggttctgggacgggccctgagctgaggagctgtggcgccgagggtcagagacgcggcagagagagggacggccggacggagccggcagacggggacacaggcggccaagaaagttacgggacccggcagcagacgccgcggggcgcccggacgcggacgcccagcccgcaggggccaaggccgccgccctcgtggggctgcaggaggcaggggacgccctgtccccccatgggggtccaaggcgcctgcggtggccacagtctttggggaggtcagtgcgctccctggcgggtcgccgcacaggtgggggtgcatcacagcggccccggggatgatctgagatccccgagagggcccggcatcacgaaggattcacagccttccgggtatcccagtgcccctgggacagggccgacagccagagggcgggagaccatggggtcctccgggtgtgccatatcatctgcctctgtgcggggcgggctgtcgctgcgccggtcacatccccccagggccagacgggaggtaccgagggagctgccggcggggacggggcggcggcccaggtggcgacacgcgcgacgcgagcaaggactccttggcaggcgaaggcacagggtgaacgtgcgcctagatgtgggagcagcggccgccctgcccagccggcgggctcaggcggcgctgcagcgcccccgccgttcgcgtcgctgcagcctccgcaggcgccgcgtccacgcgtccctccagggtagcacgaggcttccgcgggcggcgatgagcccgggcccccggccccccgcgcccccagccgcggctccaggcccgccccccagcaggaggtagcggcggccggggagcaggcgcgggcagccgcaggccgcatccccggcgggcacccacagcgcgctactcccgcgccgcgcgcgctcctctccgctccggaacacggcgagcaccgccaccgggaagcgtgtccacgcgccgcgcgcctcgccgcgcgcacccaccgccacctgcaccgctgcggggagagcgagagggggcggggtcaggaaggggcggcctgcccgcggtagggggaggcacggggaggacaccaggagggcagtgggggctgaaggggcggggtcgctgcccgtggaggacctgagggatgaggatgggccttggggcccagcaagggtcaaggcgttccaaggggaagctggcggaggagggaaggtagggagaggaggaaggtgggaaggtccgcgggaggcctgagggcacctaccatagtccttcttgcagaacttctttaggctgatgcggtagctgccacgggcaggtttgcagtgcgagtcacagtctgggtagaaggtgggaggctggcacagactccctttccccaccctctcctcccagagccccctcccccaaagtcatgccagtctggggccctgtcctgtgtccactcaccctggggctgcacagggctgctgtcctcagtgggtccagggataggggtctctgcagagagggagggagaatggcctgcgatggaggggcagagagatctgcagggctcggggaatagacgggacaacagcagggagctggggtggccttggcttggtggctgaggcggggca

SEQ ID NO: 1243417 - DNA, 4001 bp, Homo sapiens
cagcatagctggaaggagagcgggaggcgaatgagcaccacccaccccctcagtccccagggccccgccctgtgctaggtgctcctctccaagtgaccccaatggcccctgcccttgagtttctgggcaacagcagggacagggcatggggtggaaccagcagtactgcagggggctgtagctaccgtcgtcactgagaagtagagacccgcagctggctggtgatccctgaggcagtagggggtgggcctgtgtcaggtggagtcagcccaacagcccagggcttccagggattccccagtgagagccagggggctccttgggaacacccctgccggcggtgggtggccaggcctgggtagccagcccagagcacatcctcccagtgtcttcatccctgaggtctggcatacctcttcccctccctgactcctctctccatccccaggcttgcccagagcccgggtcccacgagcagctgtcatttctgtgacctcactcgtgccccttctccttccttctccactgcctccacctggtccagcccatcacagtctctggccagccactctggcctcttcactggaccccctacctacctctttttacttatttattttttgagaaggggtctcgatctgagaaggggtctccagcccaggctggagtgcagtggcacgatctcagctcactgcaagctccacctcccgggttcacgccattctcctgcctcagcctctccgagtagctgggactacaggtgcccgccactgcgcccagctaattttttgtatttttagtagagacggggtttcaccgtggtctcaatctcctgacctcgtgatccgcccgcttcggcctccaaaagcgctgggattacaggcgtgagccaccgcgcccggcctcccctacctacctcttaaccctgctgccaggtacctttcagaacataactgaagatgtcactgccctgcgttagcccctcccttctgcccacacacctcccagaccttgcccagaagagcctctgccacccttgcctctgctttctttccttctcatggcccacagtgcaccccactgctcctgtcccagcctctgggacgggtttcctatcttccccctattccctgtacgcggcctgggcttctcttcccagatgtcaaggcctggctcactgcgcttctggaagcctgactgccaaaacgaaagcggcccctcagcccccgcacccagttgaccctcccacgacggtgctgccagcctgggactttcctttaccagtgcttggcacaaccaaagccccacagccgccagtggaaacgataatcccatgaggctgcgctgccagggcgggggcaccagcactgctgttcggcaaaggcttggggagtgacggggcacagcactcagggcctcctgggcttctgcggacccgcccctctcctgcattctccctgctccctggagaagacggatcgcggatgaaaggtccccaggccgactgctcagaggtggttcttcgcccccgccgcctcccgggaccagccccgacctaggctcagccctctcctcccctcatcgggacttctggtccccactccaccccatagccggcttctcgatgagcccacgctgctgctcccggcggccgggctccgatcgccgtcctccccgagagcagccggggccggctctcccgcctagtatcaccgcagcctccgcgaccccgcgggccggcgcacacacagcctctcgcctccacggaccccaatgcgtgcccaccccacgcgcgcctccgctatgccggctgcaaacccagctccctccccgcacggccccagagctccgggctcacttggtcttgaagcggcccactccggccgcggtctctgccatgttgccgccgccgccgctccagctgaaacctgctagggtcccggcagccaccgccgcgtgagggaggttagcaccgaactcttcacagaacgccacactcccggcgcgctgcgatggcgtcaccgcgcgcgaccactgtgacgtccccgccggcgccgcgcacttggcgccatctttgcttcgggcagtggcggctgcatcgggaagcggaagcgggcggagacgtttccggcctggagggagggccgtgagctgtgagggtgcttcgcgggtcggtgggggtagaccggcggatgtggcatcgctggtggcctggctctttgataccagtataaaaaggcatttgtagccagcgtttactcctgcttttcggcgttctgggatgtgggggtaccagctgtcgggtgcggtccgtgcgtagagccgtcaacctgaccctgcccctgggctcgcagtgtggctcttgataaataacgtaggtaaatgaataaaccgggtaatctcaaaggcattcatgtattgagcaccttctgtgtgcaaagcactgtaatcggcacttggcggacaccagagaagaaacagaacgggcgacgagtgatagttgctgagcgcgatggaaaaaggaggagggccgggcgcgttggctcacgccagtagtcccagcactttgggaggccgaggcgggtggatcacctgaggtcggaagttcgagaccagcctgaccaacgtggagaaaccccgtctctactaaaaacagaaaaaaaaaattagctgggcgtggtggcacatgcctgtaatcccagctacttgggaggctgaggcaggagaatcgcttgaaccccggaggcggaggctgcagtgagctgagattgcgccactggactccagcctgggtgacagcgtgagactccgtctcagaaaaaaagaaagaaagaaagaaaaaaaaacagaagggagggagcggaagggaggaaggaggaggctgtattgagaaggtgacgcctgagcagacacaagttcgcgaagcagggagccctgtggaacgaatggtgttgagaacagccagggcacaggcctaggactgggggtgccaagcattgagtagcaacaagccgggtggctgcagggagtgggtgcagagggcagagggcatgcagttgcctgtgcgccgtggcgaggagttagcttttactctgagttcaaggttttgagccatttgtgctactggctctgaagctggtagaaagtaacagccaggccgggcgcgatggctcacgcctgtaatcctagcactttgggtggccgaggccggtggatcacgaggtcaggagttcgagaccagcctggccagcatggtgaaacccagtctctgctaaaaatacaaaaattagcctggtgtggtggcgggtgcctgtaatcccagctactcgggaggctgaggtaggagaatcgcttgaacccggaggcggaggttgcagtgagccaagatcgcaacgtcactgcactccagcctgggcgatagagcaagactgtctcagagaaaaaaaaaaaagtaactgggccagtctgggcatcatggcgagaccctgtctccacatacacacacacacacacagaaaatttagtaggggtggtggtgtgcctgtagtcccagctactctggaggctgaggtgagagggctgcttgagcctgggaagctgagtttctagtgagctgtgattgggcctctgcactccagcctgggcaacagagaccctatctcaaaaaatagaaaagaaaaaaatgaaaaaacgaaagtaactgagaaggagaactgagaagtatgatcagggaaaatctctgagaggagagatatttgagggaaagaaagtaggccatcatggtggctcacacctgtgatcccaacactttggaggcaggaggatcacttgagcccagaagtttgagaccagtctggataacacagtgaaaccccatctctaaaataaacacaaaaattagccggcagtcgtggtgcgtgcctgtagtcccagctactcaggaggctgaggtgggaggattgcttgagcccagggaggttgaggctgcagtgagccgtaat

SEQ ID NO: 1243418 - DNA, 4001 bp, Homo sapiens
atcgtgccactacactctagcctgggcaacagagcgagactccatctcaaaaaaaaaaaaaaaaaaaaaaagaagccagagggcggaatcttagagctggaaggttttcttgtctcattttacatttggggaaacaggacagacgggttaagtgatctgtcacacagcaggttaggaacagagccatgactcctacccctcaaagcctatttgcagaagcaggggtgactaactttcttgctaggagcttcctgtccccaccctcctctcctcccctgatctccagcaccagaatctgcagctcttagatgaatttgctttagaaaaaatataccctgcctgcagtagggccgaggactttccatgctagggcttgagttcctgccccagctaaagacctcatctaaggtcaaacactgaccgtgtccctgcctctagggtgaccctggacctagtcatatactgactcctattcgagttgcatactgatcccgaatcctggccagatttccctgatgctggtcaatgggctggcccttgaccccctgtccttgtctggatgctggtctaagccacacactaacctataacccagagggacttcctgaccctgccccagactgacccatgacccttgccatagattggtccctaaactcagccacagactccacagactggcccttaacccttgtcacagagtgactcctgattcctgccacagagtaacccttgccccaggccatagtcagattctaggcctaggcagagctctagcccctcgggaaccacccagtcctagccccctccccagggactctgcctttcccaagagacccccaccagaaacacggaccctggccagcccctcacctcccagctttggtgatgatcatttctgttcccacagagctgaactccttccatagctcccggttctccaggctcaggctgacccccgggagggaatggagggcctctggagctgatggggccggctcagtgcccatggcagggggcagaaggggcagaggtgggtgcgcggccagggtgcggggagcagcctccatcccggagaggaagcaatccagtttaggggtgtccagttctggaagccggggaagaatgaggagccagccgagggccacagcccccctattctcctacccaggagctggtcccaacgctcaccggggtagcggtagccctccgctagggcgggtgggaagctggagtcggccccaggttgggcgggccccaggcggtagccggcccccagggacgggtacaattctcgtggatggtacatgttgtagttccgtctggcctcaggtctcgctgcttagggcccccggtgctgcgagatgccccctttatagctcacagctcagccccttccagatccaggatcacagcccctcccctctttggggccctggagttgggctggggtggagacccctggggcctcgaaggggtccgagagggggtcggatacctgggtacggtcccctcctcccctccctccccaccccgggaggcttcattagcctcgaccccctgccccctcattacataattaactcctcggcttgattgatccccagggctcggacagggacgcagtttggcgcttccggccagctggtccccgttcccacggtggggagccccggctagggataagctggggggcggggcctggaacctggacggagccaagagtcccgggacacaccttggcgccccagaccttctggcaggtgaccgccctccgccccccttcacttggaggccgggccctggagggaagcagcgtgaacagagggaaagtgcaggctagagggacgcggcctgagctgatttcacagggcactcggggccgcgaggaggccgcagcccagtcccgagcaccgtagtcctccctggtccccatgctaaaaaaacctccatcccgagccaagcctccaaagttcgaaggcgctcacagtccgacagcttctgacgcctcgcgccagggtttcccgaaggtcccgcgctggggaaccctcggaactacacttcccggcaggctcagcgctgaggcgcgcccgaaggagccggacggaccacgcgggggccgctgggagttgcagtccgaccgcgagggggctgcgaggccggcggcgcggttgcctccctgggacgctgcccctaggcggcggccaaacgctgcagatgagcagacgcagatcagccgaggtcacggcgtaggcagccagagtgggctcaggacctccgccagcagtgaaaccgtcccggttcccggagacccagcttggacggctgtgcctaccccatgccccgccggggctcagaaccgcacaggtctataggggcggaaatctccgcttgagctcccccttcccggattacacgcgagcctgagctgtctccactccattgttttattatgtacaaacgctacagaacgagggggacagacacgcgtggggtaagaagggcctggtgggaggagttcacagagcagacggtgcactgggaccaggagagcagaacacaggccataactatagggcaggtggggcaggaacgggttaaaaacgagatccaagccagccagatcgcaggaggtgcgggggcgtcgtcccccttctgttctccccccaaggtcacagtgcatgcaataaaatatatatacaggagctagatccgtcctctgcaggggctctgagggtccagagctcccttcgggtggcgggaagccagtggcgctccctggcggccaggccgggctggagccacatgcgtcgggggagcgggggtcagtcccagccgttgtctttgatcatgtggttgagttcaatgatgtacttcccctctttgtacttctggctgctctcaaaggcctgttcctgaaaggaggggcgggaccgtcatccccggagcaacagtctcaccacaaggcactggggttgggaagtggacatgagtggccccattttacatatgaggaaactgtggcccagaggggcagggccgtatttctcacaaacacagagtagaatagaactccctgactcaaaggtacttttttaagtactaatgatggctccaacagagaagatagggaagtggctaaaagatttcacagttcagggtttgcaaactggtagcttcatggccattttggcctacaacatgtattatgtttggacagcagacagtttaataaaaataactttaaagtattaaaatataagtaggccttgctcactccagtttgcccagcctgcccccaactcccaaccctgccaatctatgctaccctttacacatctacagtatctgcttggccttgcaggcacttgaggtttttttgtttgtttggttttgagagggagtcttgctctgtcgcccaggctggaagtgcaacggcgcgatatcggctcactgcaacctccgcttcccgggttcaagtgattctgctgccttggccccgagtagctgggattacaggcgcccaccaccacgccgagctaatttttgtatttttagtagagatggggtttcaccatgttagtcaggctgttctcgaactcctgacctcaggtgatccacctgcctcagactcccaaaagtgctgggattacaggcgtgagccaccacacccagcctggcacttgagtttttgacctcttgtttaggccagctctttattaattattattatttttgaaacggagtctcgctctgtctccgctcactgcaaggctctgcctcctgggttcacgcaattctcctgcctcaacctcatgagtagctgggactagaggcgcccgccaccacacccagctgattttttttttttttttttgtatttttggtagagatggggtttcaccgtgttagccaggatggtctcaatctcctgaccttgtgatccacccgcctcggcctcccaaagtgctgggattacaggtgtgagccactgtgcctgg

SEQ ID NO: 1243419 - DNA, 4001 bp, Homo sapiens
caaacacattgtgaaaggatattgccagccctttaggcacgaggaagacactgccctgaaggcttcaactccaggctccctgatgaccttctttggaacagtgttcccaacctgcttggctaccacccagcccagtgggtggtgggcctctcacctgcccggaaggccagccccactgtggctggggcctgtggccgtgctgtttgactggtgaagccacactcgcccagtgtcttgccatcatccaagagttggtcatcctgaggagagaagcaggatcttgggagaggccctacatggggcaagtcccaaagacttctgaccagcaactacacgggaagtcagaggagggaagagagagttccctcagtgtggcccaggaccaccacgctgcttgacaaatacacagattccagggttatatccaagaacttctaaatcaaaacctcccagggtgggactttagaatccggttttatccaaattctccaggcaaatctaatttgaggagccactgagctatctggagataggcagacctggctttcaatcccagctctgtcaccctggactaggcatttgaacatttttttattttagagacagggtctcgctatgttgcccaggcatgcagtggcacagacccaacataagcgctatcatagccccctccagcttggaactcctgggctcaagcaattctcctgcctcagccttcagagtagctgggactacaggaccatgccaccacggctggctggtagttgagccttttgatgcaaagtttcctcatctgtaaactaggaattaccagaattctcaattcgtagggccaccagagggtttcaatgagctaggaagaaacataaagcactaagtagacatgtggcacacgggacatgcacaggcacggtcatttaatatttgctaagtcccagtagttatgagtgaggaaaggcctttagagaccatgggagctgaggctctgagcctggagctaaaagtcagtttcccagtttccagctctagaatctgaacaatgcacttgggcgacaacctcacaatgttgggagacgtaaatcagaggctgatgcatctgactccccaatgcagaccccaaaccccaagccattctgactgaataatctcagttcgtttgcaaggggaaaggggggcttctaggacatcagcaggaggtcgggaggtaataacaaacggttgcttggtgaagaacgagtgggacctgactttctttgcattcactgagttccccaccctccacccgaaggagtgtccggggggacagcgtgattccgatgggcctgcgaagaagggtggggattaaggggtcgtggttcgaaccctggcgctgccaatgacctttggctggttaagcgaccaagccgaacctcaatttcgtcaactgcacggcgcgggcgataccgttgcaggggttgcatgccacggtgccctcggcgcccggggcccggcacgaggtctaaacatcgcccccggaccggagatccccgcggcgagcgcagctcgcgcttcacccgcacaacggatgtcccagtcccgcggctcgggcgcccgcaggcgtcgccggccgctactgtttacatcgcggacagcgtaggcgtcagccccgtgcccggcgccgggtacccgctcccctcggcccgcccgcgggacccaccttgtacagccgctgctcgtcaggaggccgcttgaggatgccctcgacgatgcgcttcagttcgaacaccgtgctggactccttggcgtccgtgaagatggtggtcttgtggcgccggatcatgaggaacacgtcctgggggcggcgggccggcgtgagcacgaagcccgggccccccgcgcggcccagccgccccccgccgcccccggcccggcccggccgcccctcccccacgcccgctcaccatcgcggctgctgcctctcccctcgacgcgccggcgcagccgcgctccgccccgttcccggcagcccgcgcgtggcccagcatgccccgcgccgcgtcccttcccccggcgcagccccgccccgtgccgccccgcagccgccgccattttaagtgatctggaagcgggcggtatcgaggggcgtgcggccgccatcccgacggcgggcatggcctttggaggcggtggcgccgtcttgggactggcagaggggaggtccccgtgttggtgcggtccggcgggctccaagctcgggcacaccgagctcggggccgtcttgtcgcggcgtagtcgtggccgccatcttgggcaggctccgcatttggggtcttctggccgccgtgctggggacagtcacccccgctccctgacccgggctggatgcgaggactgtcgccgctcagaggggcttatgacctgtgaagagccctgggggctgctgttgggcttagggatggcccgggcgaactccttgggctagaagaggaggcacgggagcggttggcgaccgctcttcgcaggaggagggaaggggcagctccttgccccaggagccctgggcgcctgtccgccttcctgcttggctgcatttcggctctgaaaaggcctagagacttgattctcctggctggccgctctttccaccaaggccctgtttcctgaatgctggacactatcctgcatcgccccaagttacatttacatgagagtgagggccccccacttgacctctcccttgcagagacaccccaggctgggtcgtgctgggcgggtgtcggaggcggcgttggagagatgagccagagggtggccctggacgccaaaccgccctgcagtcctccgagctgcgctttgagggctgttgagagaggggtggaaggtggaggtgcgatttttgcctcggcatctagagaggcgaaggagcagccctgggctccgctgctgactgtggccatgggccgttaacctcatcaaagcccagtttcctcctgttgtagatgggagaggaacagtttttgaactgcgtagaacctcggcaagtcttagcgctgcatttgtgttttctaagctgtaattctagttattgctacttttgacttgtggaatgtggctcctccctggggagtcctccaaagtcccttccctcgtgtgacttccttcactgcggttcactgcagcccctacccccgctcccagggtcctcagcatcgcagtccctgcagaacctgtctcttcttcatgacgtgagtcatgaggcattggacaggtaattgctgggaagagctcttggccaggctaaaatttctttctcagtcgcagtgtctggctgggggcggtggctcacgcctgtaatcccagcactttgggaggctgaagggggtggatcacttgagcccagaagttcaagaccagcttggccaacaaggtgaaaccctgtctgtactaaaaatacaaacaaaattaggtgggcacggtggcgcacgcctgtggtcccagctgctcgagaggctgagccaggaggattgcttgaacccggaggcgcaggttgcagtgcgccgagatcgcgccactgcacatcgcctggcgacagagtgagactctgtctccaattaattaatcccagtgtctttacctacatagaactggcaactttaaatcctgtgcttctgtggagggagagcgaaggaagagtgtggacagtgggggccaggaagttctcaggtagcccagcaggccacgcagaagtcaaggggtgtgtaggtacaggaggggccgtctccacagggagacgcctggatccatactccatccaggcttcatctgcagagaccaggggtggacacctcgtttgtgggggccgtcacagctgatgccccagctcaggatgtccaccagaaaccaggagtcaccatcctcttaagggtggtgcctgtcctccagagagcatatcactgggttcaaaccccagctcctaccggcaaagcccggggcctccacctgggtgttcccatccatgaagc

SEQ ID NO: 1243420 - DNA, 4001 bp, Homo sapiens
catgccactgcactccagcctgggcgacagagcgagactccatctcaaaaaaaaaaaaaaaaaaaaaaaaaaactcacgtcagggaatatctatgtgaagacactctagagagatggatgtgtaacaatgagaaaagtggctccagtatctttcagcacgcagaaattaaagaagttaaagaacaaacacaaaccgagaaaatacgttagagacaatcgatagcaagcttccacgagcaaaaagactgtccaaaccccctataaaaaggcaaagatataaacaggttgtcacaaagagaaatataaatggtcaacgaatacatagctaggtgctgcatttcactaccaaagaagtgtaaaataaaataatgtgatatcatttttcacaaattacattgacaaaaatttaaaaagacttacggggccaagcacagtggctcatgcctctaatgccaacactctgagaggccaaggtgagaggactatttgagcccaggagttcaaggttgcagtgagctaggattgtgccaatgcactccagcctgggcaacagagcaagattccatctcaaaacaaaaagctttcagtaactgctgtgaatctagcaaattactgaaccttgacgggggtcttggggaccactaaaggtggacttgatgcgagaagggcagtcaaccaagcatggtgactcacgcctgtagtcccagcactttgtgaggctgaggtggacagattgtttgagcgcagaagttctagaccagcctgggcaacaaggcgaaaactcttctctacaaaaaagaaaaaaaaaaaaaattagccgggcgtggtgacatccacctgtagtcctagatactcaggaggctgaggtgggaggatcgcagagcccgcagaggcagagttacagacggaggccagggcttaggagaaaacgtcacaggaccgcatgagcaaaccatacagtcaaactgttacttccctgtgccagaaacgagctgccggagatgcagcaaagagtaagactaatccgctgggttaggctgatggggatgcgcgaagagcaaggccctgggttaggcagagttgttgtgaggattaaagcagaatgctcgcagaggcctggcaagtcctcaaccctggaaccgagagaaggcccctctagactcgagaaagggaagccccacccgactcctgcccctacgccgtggccccacccccacggtggccccaggcctcatttaaccccgcccacgccatcgcctcgccacccccccgtctttagccacgccctttagcgtcacggccccacgacagccacgtggccgcaggcccatttaatcccgcccacgtcgtggcccggccccgcggacgttggccacgcccttggcatcaaggccccgcaccctccacaacccggaccccgcttaaccccgcccattcggtcgccccgccccgacagcacggccccgccccatcccttagccccgcccacctcaccggggttagaacccagtctaactccgcggcccgccgtcttcaccccacgccaccgcccacccgcgtcgccctggccccgacgcacggccccgccctccccactgcggctgggacccacgtcacccttcccacccctggcatcacaaccccgctccccgacccggctggacgctcgccccgccccacaacgtcaagggccaccccacccccacccgggccgccgcgctcctcaccagctcgaagcggttgttgactcggacgccctccttccctgcgcccccgggacgccggacaccaagctcccgcttgggcccttcttcttccgcgtcatcgtcatcacggagatcgaaatgcaaggcgccgggcccgaggggctcctggccgcgctgttcccccctcagcctccggagggcccggcgcgacataggaccgaacgaccacgacgtctggagagagggagaaggaagcgcagaaaactcggctgtcggcgcgcctgcgcactcttcgcgcggggtcgggggcgggggagctggctgcgcgcctgcgcactcttggcgcgaggggtgggggcaggacctggctgcggcgcctgcgcgtcgcggctctccggaactttcccgcttcagcggcggcgtctgggcgggctccggggggtccgggccaggtctctggagagctgggtgtctgcgcgccgtgcgcaccgggcatggagaggtgccccgcggggatgacgggcttcgattcggggtaacgggcgcgcagccggcgacagtcggccctgcccggccttgcccatccatgtggcccggaacccgcagccgcgttctgcccgccggggcctgtccccgcaccgtgcctgcagcatttcagctgcgtcccggacgttgctagttggtccttttcgtgtcagggtgtcattcgagtgatctagccgtcgatgcccgcctctgccctggagccgccgcccctcgagcagcattgagtgacgcggcccttactgcccgcccgaggcctctttagggacagtggttctgacagttctaggacaggccgcccgcgtttgtcacgatctaagggccgggcgcggtgctcacgcttgtaatcccagcactttgggaggccaaggtgggcgaatcacctgaggtcgggaattcgagaccaggttgggcaacacggtgaaactccctctactaaaaatacaaaaattagctgggcgtggctgcgcacgcctgtaatcccagctactcgggaggctgaggctgcagtgagccgagatcgcgccactgcactccagcctgggcgacagagccagaccctgtctcaaaaaaatgaaaaaaataaagtagatgaggctgagacagtgctgggttcagtgggcggagggcacagcttcctgtgcctggggttggggacatggggacaggagggcatagagaagacaggtgccagcagcctcctgcccgacttactgcggcttcatgagcacaagcagcagccctggtgagccggcctggcccctcccaggatgggttagggttttattttattttgtgagatgaggtcttgctctgttgcccaggctggagtgcagtggcgcaatctcggctcactgcaacctccatctcccaggctcaagcacttctcctgtctcagcctcccgagtagctgggactacaggcatgtgccaccatgcccggctaatttttgtactcagtagagatggggtttcaccatgttggccaggctggtctcgaactcctgacctcaagtgatctgcccacctcaccctccaaaagtgctgggattacaggtgtgagccactgcacctgccgtggtttagggttttaacgtgggctttcatttccaagtgttcctgtatgaattacaacccagtctccccatgatagggagtgtgagtccccgtagaaccagaacaaccgtcgtccttaccaagcactacacattagcttattgctggctgtgtgaccggaggagttccctgaccctctctgtgcctgttttcttatttttaaacaggaataaaaatacaggccagagagtccgtgaaatgcttacacgcatgctagaagctggctgtttttactgggggctctaattttgtgtgtttggatttcctggaccccagctgacaggagtattttctcccgcaggcccatcagttacaagtcctgtcccttctgacctccaggccccacggctagcattacagcctggagtcaaagttctgggtgagctgtgtatctttggccaaattctttgacctcgttgagcctcagttccctcatctgtaaggtaagatgacggcagaacgtcacggaggagcagggcagggccccgttaacaggctgagccgggcgcaggtgagcagacagcactcggcacagggcctgtctagagcctgcagtcacacctcctgcccctgtggatcctctccctggagaacgagaatacggatctgggaaatgagaccaaagtaccccccaggc

SEQ ID NO: 1243421 - DNA, 4001 bp, Homo sapiens
aaaataaattcctgtttggctaaaccactatcgtggagtatttgttacatgcggctaaaaactatcctaactgagcagggagacaactggaggctaggagaccaaggaagtgttaggaatgtccacatttagtttttgtttgttgtttgtttgtttgttttgttttttgagatggagtcttgctttgtggcacaggctggagtgcagtggcgcaatctcagctcactgcaacctccgcctcctgggttcaagagattcttatgcttcagcctcccaagtagctgggattacagacatgtgccaccatacccagctaattttgtatttttagtagaaatggggtttcatcatgttgaccaggctggtctcaaactcctgacctcaggtgatccacctgccctggcctcacaaagtgctgggattacaggtgtaagccactgtgcccagtcacatttagatatttactcatttattcagcatgtatttattgaatgcctactctgtgcttcgccctgtcctaggctgggaatacattcaaaacattagtgtaaacaataccagtcagcaccgacattggtcactacggacccacacagacatacaggtgccctgcactgaatagcagtcttgaatacatcagtgacaaagcaggcaaaaatctctaccttgatggagactatactgtattctaatattcaatcaagtatagagcatgttaaatgataagtattacggggaaaaataaggcagttatgggccaggcacagtggcccatgcctgcaatcccagcactctaggaggtcaaggcgggaagatcagatcgagaccagcctggccaacatagcaaaaccctgtcttcactaaaaatacaaaaattagctggccatggtggcgggcacctgtaatcccagctcctcaggaggctgaggcacgagagtcgcttgaacccaggaggcggaagtcgcagcgagccaagatcgagccactgcactccagcttgggtgacagagggagactctgtgtaaaaaataaataaataagtcagttattttaagcatgtgctttaaggaccagaacacacacatgctcaggcatgcataagtatgcacacaatattttcatgaaacccctgcaactttgatgtagcttcaaggagaaaaggaaattctattcagtccaagaaaccctgatttgactgggattatcctgaattgactaagattgtattactgatcgtattcgatgatgcagctcaaaccgacctgcaaggtgcctgccaccttcatcttcagtcaagggaagcagaatgagcgtgcagtatccccaggacacagccacagccctgtccccacccctgtactcacctgcaatgggcagttcacctcattggccgcgcactccagccgcctcttgaccgtctccaagttctggttctcagtcagaagcctgtccagctcatagctcagctctgacttccagaagccaatgtccgacagcctctggcccaggttccggcaggtgccctcctgcatctggtgcgtcagctggtccttgtcctgcaagagcctcatggagtcatccgtcagccggctggcccacagccgggaggcctcggccccacgcacctgcagctggttggactggtcccagtcgtgggggctatagcgagagaagagtgcggagcgcagtgtgggcaggatggtgggcggccgcagggtactggtgctctcgtccgggcaggtctggacgttggctatcttgtagaagaggctaggcctccatgaattgaggtagcggtacccgggcaggtagtagggctgatagcattcctggatcactggcgcctgtacagctggcagtgaggtcaagccacagcatttcttgggaccacagtaactggcggtctgagtagtcccaagaaactccatcctccctcatgagccccactcgggcaaaactcagctcaaggagccaaaggcatcaccaggaaaggtgaaagtgcttctcttggggactagcagaacctctatgactcagcactggtgtcataaagcctggggagagggactcttagcggggcctttgctcacttacaggccagctgcagccatattgtccaaaacaaaaagacaaaaacaataatcagcaaagtgaatgtgagtttcataatccacagattcggttgcaagaagtgacattttatcttcctattacaactgggcgggaggaaaattaatgtagtttacccagtgaattcatcagctcagggacaatttggtcaaagcgagttgttttctttctttctttgtccccaacatggcatcaaaatggtccatctgaggtgaggcatggtagctcatgcctgtcatttcagcaccttggaaggctgtggccagaggatcactcaagtacaggagttactagtataggagactagtataggagactagcctgggcaacttattgagaccccatctctacaaaagaattttaaaacgagctgggcacagtggctggcacctgtggtcccagctactcaggaggctgaggcaggaggatggcttgagtccaggaggtggaggctgcagtgagctgtgatcgcaccactgcactccagcctgggtggcagagcaagactgtctccaataaaaaaacaaggttcattggtaccatggaataccactcagcaatactactcaaaacagcacaaatgaatctcaaattttaagctatgtggaagcagctaggctcaaaagatgacactgtgtattagtccatgtatatgacattctggaaaagacaaatccatacggacagaggacagatcagtggttgccagggtctagaggttgggggagagttgttggctccaaaggagcacaagaaaatcgggaggggcgagacagtatgttctagatcttaattgtgttggttacacatttagtggaaacctatagaagtttccactaaaaagagtaaaatttactgtacatcaattatacttcaataaacctgatttttaaaaatagagggagggatcttgagcatcaggaggcagagaccacgtctattttgctcaccattaaattcctggcatccagcacactattgaatgagtgaatgaatgggtatctaaaacgagagctttcttgttccagaaaagttattaactctacattctataacaattttttgttttcagagagacagtcttgctctgttgcccaggctggagtgcagttgcatgatcgtagctcactgcagccttaaacccttgggctcaagtgatcctcctgcctcagcctcccgagtaactgggactacagatggatgtcatcatgcctggctaatttttttttttttttgtagagatgggggtctcactatgttgcccagcctggtctcaaactcctggcctcaagcgatcgtcccgtcttggcctcccaaagtgctgggattacaggcacgagccccccacccccaccctaccaccaccacccagcctataacaatattttaattacaccaagaaattttcctccctctttggctggtgagagtagcaacaaagtgacaaggtacagaacaagaggagtgcttgatttgtggggcttctttctgctgttgaactgggaaagagatgaatctaactctcaaatggtctttgttagtagagtatgatgttcaatagcaattttcccccaatcgcctaaaatcacgagtgggtatgagaggaccaaggcagcaaaaatgaagataaataacatttagtaagcatcttcaatgttcttgtgctttacatagactcatttatttcatttccacagaaaacctttaaggaaggcatcacacccacatcttctagcgtgggatcagaaaagcaagtgggccctggtcctcccgacgttcacaacccttacctctcaggatcttctaagatgggacgtcacatacaggaggggactacacacagaaggcagccaagaaatggacgaaaaagt

SEQ ID NO: 1243422 - DNA, 4001 bp, Homo sapiens
ctggggctgaagatacgggcgtgttgggcagagccgccaacccccatcctcggggcccccttcctgccacaaggaaccagcagcccggattacacgggcagccccaacaacataaccagcgtgaagtccaaaaccacaagccggatgggaaaatctgttaatccattcctaaataactgcgattactgtgtgagagctctcggggccctgagcggcttccccaacctggagtctcactggacacccctcccctgctgctgacgcggataactcagtgcttgctttgatcacagcaacctctgaaaacccagcttctcaagatgcagtgtcccggcaaggactgcagtgtgatctgaggctgagcctgggagccggctggggctgggagtccacatgggacacgtgtcagtgatgacagctgtgcttccctggaaaacctggaacgtccccagctgacgggctgcctctgccgcctgggatgtgaacactcccaccccatccctctctgacacagccggacggggagcaagtgggggactttgtgagacacagcaggtgcctcccgtcgcaaaggagacagacacagaccgcttcttctgttcaggggttcagccaggagcaggctctctctctagcccctcacagggactagagaggctcttggtccagtccttcaagccactctcatcacttctgaggctaccggcaaccccaggatgggcccagcccactcaccccgcagcaccctcgatggtctccatcaacaccaggaaggcttggtccgccgggccctccaggaagaagctggcccacagctcctccaggcggccatggggcagcagctccagccaggctgggctcagcctgctggcaagacatctgaggacaggcgagaagtgggccgaggcaaactcctccttctccctcgggagcgctggaggctccatctcaccgagataccgcttcagggactccagggtgcagaagatgtggccgccatcctccgaagacgagagggcatgaatggcttcccggacggcgagtcgaacctctgagggtgctggctccatcctgcaggacagatctgggcgtcacgggaagacgacctgtgacatggacacagggctcagcttggggcacggaaataatccacacaagctcaggaagcccctcggtgagcgccccgagaccccacacccctcaaccctggtcccacccaaccctgtcccgcctccttcccctccagtgcctgccggtttccacccagagttcgctcctccgctcggaccccaacgctaccagccactgcagggcttctcaacccgggccactgtgcccagggaacattctcagttgtctcaaccgggagtgccactggcgcgagagggaggtggaggctagagatgctggtgagtgttccccgggcacagcgcggccccacgcgtcctcgcacccaaggcgggaaactcggcccgcgggagctgccggccctcccggctccctgagcggtgagaggtggctccagtcgccattcctccgccccttagaaaccaacagcttacggggaacacgggttcggggctagaggagccgcacgcggacccgcccccgatccaggcccggaccccgacctgtacccggaccccgaccggactcctacccgacctggacccgacccaaccagacctggagcccaacccgacccaaccggacccccgatccccgatccccgacccccaacccgacctggacccggctcccgggtgactgcagcgcgctcaggcgccgcgcgccaccgattcgctgcagccgattccccacggccgccgcggccccggacgaaacgcgatcgcggcccagccggttggccccgagcacgagttcctgggtccgggcgaggctcccgcgggttttcttgagcctctggggcgggtctccgcgggcctctcagcgcgaatctgcggaggacgccaggcgggagggcgcatctgcgcctgcgctgcgcggggacggggcggagcctggacgcgggagcggggggcggtggggtgggcggggcctgacgcgtgagtggggcggggcctgagggcagggccgcgcttccccacgtggctgcgagctgggttcgctgcgcccgggtggtgggttctcgccttagtttctcccatctcggtcgtccctaccctggagtgatgtcagccgtctcttccctccgcctcgggtcccacattctctccagaacgccgagcgttcgctctaaggcagatgtttaccaagacaggcctggctcgtcttccccggatgtaaggctctgctttcaagggtcagaggccagtaagggaaacgcacggtacacaaggaagtaaaagagcagttgagatcatgtcagatctgaacaattgcagctccgtaaatgaggccgggtcgtggaataaaaactgcgaccagtagggtaagcgctagacgcatgtggctctgtaaattaactgaagttaaataagtccagttcccttgcagcactagccccatctcaagggctcggtactacctttggctgtggccgccaggctggacagccggacactgaacatttacaacatgcagtgccttctgtacaccgcagcggagtgtggggggcttcatctttgtggagggggcaatccaggaagacacctaaagaggcgccatttcagcagtgatggatgtgggaaaagctggggaacagttatccattcaacaaacattgattaaatgcctgcttggtgcaccaagccttctgagcaacaaatgatgcaaagttcctgctcacctatcgggggaacagataaagtacatacgaaatatgccaggtgacaggcctcgagcagaaaaactggcagaggccgggcccggtggctcacgccggtaattccagcactgggaagctgaggtgggagaatcgtttgcacccagaagttcaagaatgggaaaaatagtgagaccctgtctctacaaaaaatttaaaaattagccaggcacggtgtcatgagcctgtgatcccagctactcaggaggctgaggtgggaggatggcttgagcccgggaggttgaggctgcagtgagccatgttcactgccactgcactccagcctggacaacagagcaagaccctgtttcaaaaaaaaaaaaggaatcaaaataaaaaaccggtagggtaagaaaataagagccagtggccgggcacagtggttcacacctctaatcccagcacttagggaggccgagacgggtgggtcacaagctcaggagttcgagaccagcctggccaacatggtgaaaccccgtctctcctaaaaaaagaataataataataataatagtaatacaaaaattagttgggcgtggtggcatgtgtctgtgatcccagctacttgggaggctgaggcaggagaattgcttgaacccaggaggcagaggttgcaatgagtggagattgtgccattgaactccagcctgggtgacagagcgagactcctccaaaaaaaaaaaaaaagaaaagagccagagagcagtgggtgctgtcttacgtaaggtgagagctctgaacagaacaccttagagcagagccctgaatgtgttgacagccagggaagagtctcactggcaggaaaacggcaggtgcaaaggcctgaggccgcaactgttgcccgggaggtggagccgagggaggcatatgcaggggtgaggcctggagggagtgaggcagtgggccaggccacagaaggccctcgcagggactaagattttgcttgtgtggcaggcatctcctggagccattgaaggcacgggtccatgctggtgcagttaggagagcagacggtaggggggcgacacggacgaggggactaggtggccattgtgaggatgagcttggggcggaatgggggtgtagagaagcagctgaactcagggcatgtctctgcaggcagagctgatggatgggatatggggcaggcagcatc

SEQ ID NO: 1243423 - DNA, 4001 bp, Homo sapiens
cccaagtagctgggattacaggtgcctgccaccacgcctggttaagttttgtatttttagtagagatggggtttcaccatgttgaccaggctggtctcaaactcctgacctcaggttatcagcctgccttggcctcccaaagtgctgggactgcgcccagcctctaagtgttttttgtgccttatctccttctaaccccacaacaacactttgaggtaggccttgtcaattatcctcattgtactgagcagtaaacagaggctcagacctggccaaagtgtcctgggcagggagcagcagagctgggactggcctctttcatccttgcatctgtctccctctttcctgaaaccatctgccccttccccaaaggggatcctacactggtgtcctaacctttgcggcagtaggtggtggactggcagtgctcatcaggaaggcaggccttgacggtgtccctgtccatgtggcgcagggtgggcagggctgggtggtagagctgctgcttcacgcccgccagctggttgcgctgccgctccatgggaagcaggatggccggggaggcatacacatgtgtggagccatcgtcccagggcaccaggtcaatgatgcgggccatagctggggggcagagggttctaaggggctcaccctgggctcatgctggccagacacccttctctgcatgaaaacaaccttggccagtgccgatgtctacttgccaaacatttatttagcacctactgtgtgccaggccatttttctggagctcagcatgaggtggcaggaacattcagataacagaagataacagagacaaccctcccactccccttccaacacacacatacacacacacacacacacacacacactcacattgtgccatggctgtgagggaggtcagtacagagtgtgtgtttctggggaggctggggttaggacattcaaggaatggtctaaaagaggtggtatttgagtctattcgtttttttttctttctttcttttctttttttttttttttttgagacagtctcactcttctgctcagactgaagtacagtggcgccatcttggctcaatgcaacctctgtctcctgggttcaagtgattctcctgcctcagcctcctgaggaactgggattataggcatccaccaccacatgtgactagtttttgtatttttagtagagacggggtttcactgtgttggccaggctggtctcgaactcctgacctcaagtgatccacccgcctcagcctctcaaagtgctgggattacaggtgtgagccaccttgcctggcgagtctattcttaaataataagcaggaaagtgcagcagcaagcgggttcagaatgtagcttagtatgccgtatacctctgggtgaataattatggacttgccctagctatttacccaaaattctacagattgactcagaaagattttcaggaaggggagcaacatgatatatttaaactagaaaagcattactggatacccagtgcctccctttaaaaagcagatagtcccaggagcctttcagtcatttacactttagtgagaatttgttgagacagcttgctttcttcctgaccctgagttagaggtgagaggtggaggtggaagctagggtggcaggaggagagaggaccttagatcatggaggagcagggagggggcatggtgacaaggcatggggaagctgccttaggggatgtgactgcctggggagggacagggagggggatcacggatatggggaagagagcaagggctccctgcttctgactcaccaatagcagctaccttatctgtagggcccaggcccaggtgcacaggcttataaggactttcagttctttgactgctcaatgggcagaagaggaagggaggtggacgagcccttattatggacagcagcagaataaaggaacattgtgcacagacaatgcccattgcagcctgattctgaggcacccactccttagcaaccctggcaactacaggctctaacaagagcctgtgccagaattcctgtgctctggccactcccttccagccttcctgaaggctgtggtctcccaggccttagcacaggccaggcatcttgggaaatgtcagatggggagctggggttccctggaggtagtcaggccaaggcaggccagaaatggctactgagcccactgcaggctgtgtaatcctgggctaattaccgcctctctctgggactcaaggctctcctctgtgttaggcaaggactctaggatctgccgttaggaggatctggatgctgagagggatctcccctccctggaaccctcagggaagagggcactgcactgtctgccagcccttgagtctccaggagtggagattagctgtggccagtatccagggtaagcgtgaggggatcagggagagtggtggactcagcaggccagggattagcagatgatactccaccctcagcccctgcaggactgcaggctcccagaaaagccaggctgtgagtgcccaaggccagcaccccaaagccctggggcctgcccaccatcctggtcacaaccattagagacagacccccaaggtgaggaaaccccaggagatcctaacttatttgcatatattggcatgtgcttttgcatatacctgcccaggggctgaacctgatgggtcttggagcccctcctgtgaaattcttgtaggatttgtttccccagttgctcctcctccagtgctccatacagcttccagaacagcattcctaactgctaccccttacaaaaaaccttcccagagttgactccactcaccaccccacccccaatttatttcttgactcttttaaagttataaaatagaagaaatacagaaagtgaataaatatctaatgtaactaataatttacaaaatgagaccccgtataactaccacccaccctggtcaagacatggagtactacttttaaaacagtttatcagtttcttaaaaaatgaaacagaaatgtaccatatgattgggtcatctggaagattctaccccaggaggcttcccaagagaaatgaaagtatattgtgaggcacgatggctcacacctgtaatcccagcactttgggaggctgaggtgagcagatcacttgaggttgggagtttgagaccagcctggccaacatggtgaaaacctgtctctactgaaaacacaaaaattagctgggcgtggtggtgcaagcctgtaatcccagctactcaggacgctgaggcaggagaatcgcttgaacctgggaggcggaggttgcagtgagccgagatcgcagcatcgcactccagtctgggcggcaagagcaagacttcgtctcaaaaaaaaaaaagtatatatcttcacaaagacttgcacacaaatgttcatagcaacatgatgtatcgccaaaaagtggaaacaacctgtgtccactgatgagtggataaactgtggtgcgtctataccatgcaatactcttgggcaatgaaaagaaatgaagttctgatacaagctacgaggtggatgaacctcataaaacattacgctacatcaaagaagccagatgtgaaaactcacatattgtatgacccatttatataaaatgtccaggaaagacaaatctatagacgcagaaagcagatgtgtggttgcctgggactggggtgtacgaatgaagagtggttatcatctggtgtgaggggtcttactggggcaacgggaatgttctaaaaccagatgtggcaagagttgcacagttcagtcaatgtgttaaaaatcatgagttaggccggggcggtggctcacgcctgtaattccagccctttgggaaccccgagtgggtggattgcttgagcccgggagttcgagaccagcctgggaaacatggcgaaaccctgtctctacaaaaaatatgaaaattaaatgggcatggtggcatgtgcctgtggtcacagctacttgggaggctgagg

SEQ ID NO: 1243424 - DNA, 4001 bp, Homo sapiens
ccacaacacagtgacaatcccaaattcctagacactccattagcttttttcttgaattcaagaacactgcctgtgccggatttctatcattcttctaccattactattttgctagctggctcattatcccagcacctctgattctaatctatctgttcaaaagggatattctctaagcccctctttctgcagacagaaagaactcaaagtcagtaccacattttccaaggccccagtttatctccttggtttattataaacaagggtgaccaaaccctaggccagagttacttaaggcccttgtagagtgctcccgaatggtgcagtaacctccaaaatgtcagagcttcaatgccaaagccacaaggaagaccacccaaatcacaaaaactgagcaactgccattacttcccaagcctgggtgggaaaggagacacctgaagaaataacgtctgtgtgtgtgctttcttgcttgctcaatctctccccattgctgttttcctctgccccacacagtaaagagtaagtgctgtatcctcaaagacccttgatttttggtcaaagaaaaaagatataaaaatagagccttacagcttccttgaccagttttctactggattcgaccactgcttctgtcagtgtaaattccgttttaatcatctccagcacattgatagctgattccagtggtgtgagctcagcctccatatcaaaggaacagtctaggacaaagcacagttttcatttttaagctcttttctaagggtaaaaaagttatgtccaaaaattatatatatatatttatggaaatggagcatgcaaatatggtaagatttgcatttaattttttgacatatttgctacaggttgacatacacgataagggtccaaattcaaatcaatgaatttaacgtgaccattttttaacacctgtcaagacaggcaaaaaaattatttttaaatacctgcatttgcctctcaaattcagaatatacccatcctcctcagatacgagtggcaagaaactgacaacagctaaatagctttcaagttaaattcagaggggaaaaatgtcagagtacttccactctgaaaaactctctaccatgggggaaaaaagatgtccatatgaacataactcactttagacaggagcaaagttggggtgagcaattaacaggtgggagaagatttaaaaaaaacacagaaaagcagccaagacaaccttaaccggagaaaactagagccagtcgagccagaaaacagacccatcgtagaatgaaaaagaccactctgatggaaactatcgcactttaacctggaatccttcagttctagatataagttttaaaacaaaaccctacgcaagtaagcccagagaagaacacaaaaatagccatacctaaattttccccttcttcaatccgcgacagacactgcataacccgcagcaatcgggacacggtgtgctccttccccaagggcctgacaagcaaagctgggagagaagacatcgttggctgggcgacccccagtcccgactcccggtcccccggacccccttccccggcgctccaacccccctcccccggcccggccctcaccctgcatgatgtcccggatctgtctgaagtccccgtaccggctaccccgaaaggcccgcagcgcctcgtggaagtagaacttgagcacccagcgattgactgcctcttccagccgtgcctcccccgcgccgcgctccgccgggccccccagccccggctcgtggcgcccccgccgggcccgcccgctactgcgggacgcccgcctgccagctgcccgcccgctgccgtcgctactcccgcctcctcccgccatcgtgtccgatcgccgcgcgccctccccgccctcccggccgggccgcttcctcggctgtgacgccgctgggtcacgcacgacgcccgggccggaagcggggcccgccgtcccggctcccgcggccatgatagaaacagcgttccgagccgcccgcgggcttctgggagggaaaggaccggagggcccggcccccttctcagacgccgtagttcccgatgtgccggccgcaatgcctcctggggcttgaagtccacaccgcccaggccggtgaacccggcgggttttgcagtcaacttcgctccgaatttacagaaaacagctactatgctagggacgcggaacagtgtattagagactgaaaaacaggccgggatcggtggctctacgcctgtaatcccagcactttgggaggctgaggcgggtggatcacctgaggtcgggagttcgagaccagcctgaccaacatggagaaaccccatctctactaaaaatacaaaattagccagacgtggtggcgcatgcctgtaatcctagctactcaggaggctgaggcaggagactcgcttgaacccgcgaggcggaggttgcggtgagccgagatcgcgccattgcactccagtctgggcaacaagagcgaaactccgtctcaaaaaaaagaaaagaaaaaaaagaaaaccaaatatgtgcaccttattaaacactttgaaaattgtggaagagagcatacacagaggaaagtctttaaacaaatttgtattttaacaaatactgtaattataaagcaaagaccagtgtgataccaataaatagaatgcacctggcaacccagccgctagacatatactctttgtaatcacaaaaataacacattttgttgtagaacaattagaaaaataagcaaaaggaccacccatagtcccatagagggtctgagtcactttcagatatctctgatactcttggaattcaccaactggcacttgaccaaatggagaacctccagctcagaccttagttcaggatggtggttgtgggtgcctcttcctgagaggcccagtaactggtctagcttcaaagattgtcctaccagccccactagtctggaacctgcaaagatccagtttggggccactcaaagacaactcagaagtgcaggtggccatgtccttgaggatgtgaatcccatgctggacctgtgaattaatatcaggaccttaatatgtatagtatcctggaaagccaaaagttctatgaggtacacgttccgggatgagagaagaggcctctaggtctgactgatctttggtgatcatagctgcttttcttttttttctttgtttttcttgagatggaatctcgttctgtcgcccaagctggagtgcagtggcacgatctcggctcactgcaagctccgcctctgggttcatgccattctcctgcctcagcctcccgagtggctgggactacaggcgcccactaccatgcccagctaattttttgtatttttagtagagacggggtttcactgtgttagccaggatggtctccatctcctgacctcgtgatccgcccgcctcggtctcccaaagtgctgggattacaggcgtgagccactgcgcccggcccatggctgcttttccattccagcctgcttgccttaaccaggaaccaaatcacttgcctttattttagtttttttgagaaagtttcactctgtaatgcaggttggagtgcagtggcacaatcgtgctcactgcagccttgaactcctgggctcaagtgatcctcctgcctcaacctcccaagtagctaagactaccagcgtgtgccaccatgcctgggtaatttgaaattttttttcgtagaattaggggtcttgccgtgttgcccaggctggtctcgaactcctggcctcaagcactcctcccaccctggtctcctaaagtgctggggatttcagggttgagctactatgcctggtgccaaatcacttgcctttcaattctaactttttttttttttttctgagacagagtcttgttctgttgcccaggctggagtgcagtggcacgatcttggctcactgcaacctccgcctcccgggttcaagtgattctcctgcctcagcctcccgagtagctggg

SEQ ID NO: 1243425 - DNA, 4001 bp, Homo sapiens
aagtccataggcattcagttacgccagagcattaaagtaagtctggtacgcctttatactgaatctacctgaacataacagcaatcttttttaaaaaggagtctgtggaatatctcttaaaagaaacacaagaagccagttagcccgtgggtagctggtggacaggaaggacgagataatttttttttttttttgagatggagtcttgctctgtcacccacgctggagagcagtggcgcagtctcggctcactgcaacctccgccccccgggttcaagcaattctcctgcctcagcctcctgagtagctgggactacaggaactctccgccacggccggctaatttttgtatttttagtaggggcggcatttcgccatgttggtcaggctcgtctcgatctccttacctcaggtgatccgcccgcctcggcctcccaaagtgctgggattacaagcttgagccgccgcgcccggccaagagagaattttctatatactttttgtaacttttgaatatagaaccatgtcaatattctagtcaatggtaaagtaaattaaaactagaccaagaagctgggtgtgatggctcacgcctgtaatcccaacactttgggacaccgagacgggaggatcgcttgagcccaagagttcgagacctgtcagggcaacacaacgagacccccatctctacaacaattttttttttaatttagcgggacgtggtggcgcgggagtgtagttccagctacttgggaggctgaagccggagattcgcttgagcccaggaggtccaggatgcagtaggtcgtgatcgcgcggctgcatcacagcctgggcgacggagcgagcccccactcaaaaattaaaaaataaaaacgacgagaggccagacgtggtggctcactcctgtaatcccaacactttgggtggccgaggcaggaggatcgcttgagctcaggagttcagaccagcttaggtaacagagacccatcgcaaaaaaagaacaataataaacaacaagggagcgagaaggcaagaaaatggtgcaaatttacccggatgtcaacagggggcggggccaagcgctgctaccgaagatgccaagatggacgccaggcagccaggagaaagatcccaaccccacccgcgcagatatccgcgaggccccgcgctcagcctcctcacccccgctatccgcggcctccgggtcctcctccgccttccgcttgagcttctgggaggaggggctcaccggcgcgtcccccagcaggtacttatgctcctggccccgcaggtgcttgaggtagcggtccttcagggactgccacgagtgctgcgtgagcgagctcttctccatcgctttccacaaggcgttaccggtgacggagctgggcgagcgggcattttccttcacgtaggtaaggatggctacgtcgtccgcatccgtgaaggcgatccgcccggcgtgccgctgcggctccggctccgcggcgccctcggccagggccccgggctttgcttccgagccggtgtccgccgccgaggcggggcccagccgataggcctccagctccagcctctcgttgcgctccacgcagtccaggatgtactgcgtggagatgaaatcacccgaggcctcggccagcgcctccccgggctgggccagcagcacggccccgggctcctgcactcggcacacggtgccgccgccgtgcaggatgagcgtcgacagccgacgcttggccgggctgggccgcacgtagaaggacatggagctgccgtcgtccctcacgaacagagtcgaggaatgggtgggcccgttggggtctttgcccaaatccatcgcctccgccatgtctgacgccgagcactactagaagagctaccccctcgcgagcgcctggcacacagagctcaactgactgagctgtcaccgcagacgcctctgccgcgaagcgcagcactgggcctgcgcagcagcagccgcggcgcatcgagagtgcccgccccctctcccccggaagaggtggggcttcgcaccttgacctggaaattaacgtactatcctccttacttttgggtcgggccctccgggaagatggcggccgtgcaggcggccgaggtgaaagtggatggcagcgagccgaaactgagcaagaagtgagtgtcgctgcgagtctttaaagcctttgcggtaggagagtctgggctgggaagcgccgcgaggttcccaccaaggctgctgtgccggggccttcttgccggctctcgtgggtacgcacatgctgagacgtggtggctgcgccctgcagaccacgtaccccgggataccccgggcacgccggctccccgttcccagctggcaccggcgggatgctccctatcatactcctagagttaagagactgtggaggaggaactaggacgagaactaagagttatcagaaaagaaaagcgaaacttcctgcttagcttcatcctcctttctgagaaatgcattcttttgttgagccactcagtaaacgtggaagttggagaaatgttaaataccctagcttttcagaaagaccttcaaaattttctgggcctcactaaggtcattctgaacgttatgtattaaaagggatcagttctaaaactgtcatgcatctacccgtatgggttattcagtagatacctgtgagtattaagtgatcaacgtctaacagtagagaccatcttaattcagcctgatatctttgttaaccactcccaaatccctggagtatgtaggttaacatagataagtcaggattagccaccctttaactggctgtcttatattctcattagcgttccccatttgaaccacagaacacaggtaattgagtgttttatcattgctaggaagatggtacatagtaccattccagaggcatacgagagggcttaatccccgtggcgcgcacttgttatcccagctactcgggagactgaggcaggagaatcgctttaacccaggaggcggaggttgcagtgtgctgaagtcgtgccactgcactccagcctgggagacttgaggtagtggtccttcagggactgccagaagtgctgcgtgagcgagcccttctccatcgctttccccaaggagttactgagacggagccagaccctgaatgaaaaagaaaagagaaatgatgtttctttttttttttttttaagatggagtctcgctctgtcgccaggctggagtgcagtggcgcgatctcagctcactgcaaccttcgctgccagggttcaagcgattctcctgcctcagcctcccgagtagctgggattacaggcgtgtgccaccatggctggccaatttttgtatttttagtagagacagggtttcaccatgttgggcaggatggtctcaatctcgttaccttgtgatccgcccaccttggcctcccaaagtgctgggatgacaggcgtgagcctgagccaccacccctggcctgatgtttccttttgtgtccctggctttgtgcttcaaatatcttagaaaaagtataagagaaattgtcgaagtttatagttgggtaggaccttaatatattgtcctttattagagcaatccgatggacttccataaaagtttggaacctggtctttggactgctaccttagagaaaattgacttgactttattaagtcaaatttaattgaatgtggtatatctgtgatatacgatcctaaagtttagttcattctttcaaaccacctatgataatcaattacattgaattgaactttaggactgtatatcacaggtgaaagcacggtttccagttcagagtgtgtttttaggtaaacggaaaaaactggttaattcctctttactgactttttttttttttttttttttttggaggcagagtcgttgttgccccggctggattgcagcggtgcgatttcagcccacggcaacttgcaactcccgggttcaagcaattctggtgcttcagcctcccaag

SEQ ID NO: 1243426 - DNA, 4001 bp, Homo sapiens
tgagaaaattctagcaaagtgagtccccagaacataaaaagagctcaagaattttttttacttattattactgggccctccaggtgggcctcgtgcaagggccagccctcggggcatccctgccagctgccaaacccatcaactggcccaagtctaggtattgactgggaacttcagagtagccttaaggtggggacccccggggcagagggttgggcaggagtgtctacacgtgtgcagcaaccttccctccaggccggattctgcaggcgctagcgtccaccagcctgtgccacaccggcgggctcctcctccctcaatccccgcccagactgcctcgggcggcagagcacgtggctccagccctggggagccatttcgctcctggagcagcgcggcaggaaaggggccacaggtcccaaacttgcgcacgccgtagaacgcccacctcccccacaccacgcccagggggtcgttcaaaatgcagatgtccgggccccagcgatcagagttccaggcatgtgcattttaagaagtgtgcggggtggtttggctgtgtgtggtccttgagtccatcaccctttgggtttagagcaacctaggaccaaagcttgcaaagtggcttctggggaggcctgcggacctcgggccacccacccggctgggggacccgacgctttcggtttacggcaggggggaggggcgttggatgggaaagtttgcagaggaaacccacgtgcggcgggaagctgccctgcgaggctaggggcggcctcaggtgtcccttccccaaatggcctgcccacctggcctgccttgcccatcgtgcccgcgggggccgagctttgtgcagggaaagcgtggcccaggagcgcctacaaatcccacaatgctgcaccagcaggacacggagaactacagctcccgcgaggccgcgcgcagaggtccgcctactccaagagggctgcagagtcacgtccaggcctcgctagtaaacagcgcccgggcgcgggcgggcgagcgagcggcagccaacgtgccccgggccgcggcgcccctaccggccgcgcgggcccctcggggtccgcccacccccaacacccacacgcgagcacgcccccgaccccgctgcagccccgctctgcaaacacgcacagtgcccggctccccgcccccaccccgcgccgggagccgcggcatggctgcattgtagccgccctagctacacccccacgcgcgccccgggcccccagacccccttggatggggacgacctcagatcccgaggaaggaaggagaggaaggaagccgccgcaggagggggaaagaggaagcgcgggggggaaggccaccagcaccaagcatggccgggactgctgcagaaccacgtgggtctgtttgcaatttacaaacgtcgcgactcgcccgcctgcagcggacaaaagtggccggggccgcttggggcccccatgctccaaggaaggagggtcccggggcggcgcggacccggcgtgtggggctgcagccgtcccggcagctaagaaaggctagcggggtcggcggcgcgggccatgcgtgcgcacacgcgcgcccgcccgggcgggctggccgggggctgcagtggtaggaagggggtggggggaggaggagtacacacctacagagccctcctatcacttctttctctgttttcctgaaatgttgcaaagagggcaccttctgagtgggcaccatgaaatactccatagcgatcggcccccctcctctgcacgagccaggtcccgcgatcagccggagaatgcaagatggaaatccgaatcaaagggcagcgccggacggaggtgcagaatcggccggtcccagatgctggcggcggcggcggcggcgaggggagggaggcgggcgggaggggcgggagggaggtctctccggcctgcctccccgggcgtgtgtatgtgtgtgtgtgtgtgtgtgtgtgtgtgtgtgtgtgtgtgtgtgtgtgtttgcagctgatcagatgtctgtttcaaggcgggaaacagctggtgaaaactcagcactcccccggcctccttccgcggagtaaggaattgcatgtaaacaaaggactatttgcagcgccccccgggcggcgcgaggccggggcgagaggggcgcgggcccccggggaccggctgcaaccggggtctgcaggcctctcgcggggcgcagggggccgggggccgcgggcgggcttgcggggcgcggcgtgaatggagcgagctgcggccgagctacatgcgccactatgggtgatgaggtccatcagctgacaggttggcaagcgttgcaaaaaaaaaaaaaaaaaggccagccaccgcgcagggagcccagcccgtgcagcccggagtccagcagcgactggcccagagcagggtccgcgcgctcggccggcccgcagggaggagggggcgcggctgggtcgggcgtgcagcggcagcaaggaaggcggcctggggttcgcgcttggggcttctgctttttcaccattgcagctgcacggagcggagcctctccggtgtgctcccttcgagccgagcccagggccccctggaaacttgcgtcacagccaccgcttcccacatgtaactcggggctgacttcggaggccggccagcttcctccctcccgccttgcttagctggccgcacggccgggactccggatcctgggaatcttggacccggcgacgggacggcaaagggcgcctcggatgctggggccgccctaggaagccgggggccccggcagggaggggagggtggaggcgggcctgaacggcagcggcccccgggcgcaggctgccagcgctgcggggaggtctgctggttgctgccgggtcccctgctattcccccagacccgcactgttccctccgcgggctgaaggctgcagcttcccattcataacaaagcccgtgtgggacttgcccctccgccaggatgcgctccccaagagggggtgacgacttggggcagggacggggaccctggcggcgagcttccgtcctccgctcgcacgccgcaccttccggccccaggccctcccctggctcctggagggttggctcctggctcaggaagcccacgcctgccttggaatgtcctggatcctgcccaccgccttccaggttccgcctaaatcgcgcctcctaatttgacttattcctactagtaacaatagttactgttattattgggaaatattgttattagatgttgccagcacccggtggatgccgagcagttttgcttacacgctctccaatccttgaagcaacctgttaggcagtttctctaaggagagatcccagaccacttgaccaaaaaaaagtctctggaaggcttactatgtttctacttaaaaaaaaaaaaaaaaaaaaaaaactttcggctgggcgcgttggctcacgcctgtaatctcagcactttgggaggctgaggcgggtggatcacctgaggtcgggagttcgagaccagcctgaccaacatggagaaaccccgtctctactaaaaatgcaaaattagccgggggcctggtggcacatgcctgtaatctcagctactcgggaggctgaagcaggagaatcgcttgaacccgggaggtggaggttgcagtgagccaagatcatgtcattgcactccagcctgggcaacaagagtgaaactccgtctcaaaaaaaaaaaaaaaaaaaaacctttttactgtttttcaacaaatagagataggagtctcactgtgttgcccagcctggtcttgaactcctgggactcaaggaatcctacctctacctcccaaattgctgggattacaagcatgagccatggatggccctggtgggaagcctatttttaactgcccttagtgagcaagctattcttttttttgttttgttttgttttgttttttaagacggagtcttgctttgtcacccaggctagagtgcagtggcacgatctcgg

SEQ ID NO: 1243427 - DNA, 4001 bp, Homo sapiens
tcatctggagagaggagaggaggacgctacatatagggccatgctcaacgcaccctcacacttgaggctttaggtccctttaactgctactctgggaagtgtattcctcttagtctctgccccacccttccctcccctgcccctatcgcatcaaggcctctctcagtcaccctggtacctgtgatgttgaactgagtggcattaagttcctgaagcaaccgatctagctcacagagcccggtacccaagacaccgctggaagaggagaatggaggggccgccggggctgcaggctttggggaccgaggcttgcataccgtgctgggaagcagagtgggagcctgggttcaggggtggggaatccaagcctcctcacctgagactcagttggcccccatgccctggtttccaggcccctcacctgtacaggtggtccttgtcccccgaggctcctgaagactccccagaccctgtctacagagcggagacgcacaggtgggatgacaggcctgcactctgccccactgaggctgagatccccatagaccaggccgagcctggccctagtggctgccccagtccccaacatccgatctcacctgtggctggtggccataggatgggggaggggtgagaggctccgcagggcgctctttgggagcccctgaccttggcatgtgcgaggtggtagtctccaggtcagagagcagggcatctgcaggaagaggccatcagggagagagacaagggtcacggttagatcagaagataaggttcccagtgggcagtactggagaaggacagaagccagtattaagagaagaggtcacagggccagagccaggcagagcactgctcgaagggtagcaaggaatatttatgaccagaatatcccagttgctcacgcttggagccaagcacaaacccagcctcctgattattttattctccccatcttctctgatgcagtcaaaatgggctcttcacccaagccaaatttggctcccctccaaattgctccattggcccagtgcctggccctcagctttctgattggacgctctctcttccatgctggttaactcctccctctacctacacaggccccgcccagcctggccactcccaggcccctgagtcccgccctgggctcctcactggcgcttcgctgggacctgccttctgattggctgtttatctgcggtacagcgtcagttacccctaccgagcagcgccctctaccgccaggggccggaagcccctctctcccgtggagcgcacagccttccagccccaggcttcgcagggaggacgagatacctgggtcccccttccggacaagacacctctctccatccctgcatccccagatccgggtcttttgagccctttcacttccagaacccagaagtcctgccctcagtcttcgtctctgagcacccgcgtgaaaccctgaagccttcgcgggcgcctaggcactcctgagttactattctcttccttgcctcaaggacctgaccctcactgtgctcaggagcccttaactcctcctctcccaaaactctggtgcaggcaggcccgctttttttctccaaaacttgatgccagactttcccgtgccctctactttcccggtccccgggccgaggcccctttaacccctccctccccagagccccgcgcccgggcgcccgcgggcgccgcacctcccgttccatctgccgcagcctgggatggaggagcacagcgagggaagaagggagggagcggccggcccaggaaaggcaggaagggagaggcaggaagggggacgtggagttggaaaggaggcgcgggcagaggcgaaaagcagaagtaagaagacagggatggggagatgcgggagagcgacggcggggaggcagctctgggcagcggtgaggggccacggacccggggatccggccccactcacccaggtcctccatggcggggcgcgggccggtggcgcggggcgaacagggcgggggccgtgtccggtgggggcggggggcgggggacgtccgggagctggaagcccggccgtgaccatgtaaggaagccgggacccgctgagatggggatgggggggcgatgaacgggggaacccgaggtgggggcgtggaaaggagggagcgccccggcccacccgagcccagcccgccggcctgccgcggaggcggccacaccccagccttggcctcagctgcagggagccccaggaggccagagccagagagaagtggcttctccagaccaagccccagagccgctccctagggagacttacagacacggactgaggcccccaaacagacaccgctcaaagctagcgcctgagtcctagacaagagcctccctcccacccatgccattcctgggagacttgtcccagacggaatttttggattggtagcaggagtgatattctaaggctcaattagacctcaggttcggagaccctcccatcggagaccctgacagataaatagaggccccaagaggcatacataccagacacaaagaaatctgagggacggggacagacacagtgaacccacccacagactctacactaggaccttccctccaagacttggtcatggacacacgtaaactcgaacccgggcgcaagccccttgcaaattcggggaaaacactcccaggcaaccaacccccagccagcctgcaagacaaagcccttcctcagcactgaggtggcccaggcctgctctgaaacagccctttcccaagttactgatgaactcagagcagaaagcaagacacagtctccagccacaaagtggcaaggccttccctggactgagaccctgagaaacgaggtggaaacgagaggccatagaggtagttatggacagacaactgtgctgcagccactcttctggacagatctgagcactggaatgtgagtatcaacccagcagcaaatcggaacaacctggggagctttttaaaaatgcgagacaggcatggtggctcacacctataatcctagcactttgggaggtcaaggcgggcaggtcacttgaggtcaggagttcgagaccagcctggccaacatgacaaaaccccatctctactaaaaacacaaaattagctgtgcgtggtggtgggagcctgtaattccagctacttgggaggctgagacaggagaattgcttgaaacctggaggcagaggctgcagtgagctgagattgtgccactgaactcctgagcaacagaggagaccctgtgtcaagaataaaaaagaaaaagaagaaaaaatgggcaaacgacctgaatagacagttcaaagaagttatataaatagccaatgattacatgaaaagatcctcaacatcattagtccccagagaaatgcaaatcaaaactacaatgagatgccacatcatacctattaggatggcaataacaaaaaagacaggtaattaggcaaggagcagtggctcacacctgtaatcctaacactttggaaggccgaggtgggtggatcccctgaggtcaggagttcgagaccagcctggctaacatggtgaaaacagtctctactaaaaacacacaaaaaaattagccagacatggtggtgggcacctgtagtcccagctacttgggaggctgaggcggaagaatcccttgaacctggcaggtggaggctgcagtgagctgagatcgtgccactgcactccagcctgagcaacagagcgagactccatctcaaataataatgataatattttaaaggccaggctcagtggttcacgcctgtaatcccaacactctgggaggccgaggcgggcggatcacctgaggtctggagttggagaccagcctggttaacttggcaaaaccccgtctctactaaaaatacaaaaattagctgggtgtggtggcaggcacctgtaatcccagctactcgggaggctgaggcaggagaatcacttgaactcgggaggcagaggtt

SEQ ID NO: 1243428 - DNA, 4001 bp, Homo sapiens
cctccttctgctctcctgaagccaccttgctagatgggaactgagacatgatttcatctggagagaggagaggaggacgctacatatagggccatgctcaacgcaccctcacacttgaggctttaggtccctttaactgctactctgggaagtgtattcctcttagtctctgccccacccttccctcccctgcccctatcgcatcaaggcctctctcagtcaccctggtacctgtgatgttgaactgagtggcattaagttcctgaagcaaccgatctagctcacagagcccggtacccaagacaccgctggaagaggagaatggaggggccgccggggctgcaggctttggggaccgaggcttgcataccgtgctgggaagcagagtgggagcctgggttcaggggtggggaatccaagcctcctcacctgagactcagttggcccccatgccctggtttccaggcccctcacctgtacaggtggtccttgtcccccgaggctcctgaagactccccagaccctgtctacagagcggagacgcacaggtgggatgacaggcctgcactctgccccactgaggctgagatccccatagaccaggccgagcctggccctagtggctgccccagtccccaacatccgatctcacctgtggctggtggccataggatgggggaggggtgagaggctccgcagggcgctctttgggagcccctgaccttggcatgtgcgaggtggtagtctccaggtcagagagcagggcatctgcaggaagaggccatcagggagagagacaagggtcacggttagatcagaagataaggttcccagtgggcagtactggagaaggacagaagccagtattaagagaagaggtcacagggccagagccaggcagagcactgctcgaagggtagcaaggaatatttatgaccagaatatcccagttgctcacgcttggagccaagcacaaacccagcctcctgattattttattctccccatcttctctgatgcagtcaaaatgggctcttcacccaagccaaatttggctcccctccaaattgctccattggcccagtgcctggccctcagctttctgattggacgctctctcttccatgctggttaactcctccctctacctacacaggccccgcccagcctggccactcccaggcccctgagtcccgccctgggctcctcactggcgcttcgctgggacctgccttctgattggctgtttatctgcggtacagcgtcagttacccctaccgagcagcgccctctaccgccaggggccggaagcccctctctcccgtggagcgcacagccttccagccccaggcttcgcagggaggacgagatacctgggtcccccttccggacaagacacctctctccatccctgcatccccagatccgggtcttttgagccctttcacttccagaacccagaagtcctgccctcagtcttcgtctctgagcacccgcgtgaaaccctgaagccttcgcgggcgcctaggcactcctgagttactattctcttccttgcctcaaggacctgaccctcactgtgctcaggagcccttaactcctcctctcccaaaactctggtgcaggcaggcccgctttttttctccaaaacttgatgccagactttcccgtgccctctactttcccggtccccgggccgaggcccctttaacccctccctccccagagccccgcgcccgggcgcccgcgggcgccgcacctcccgttccatctgccgcagcctgggatggaggagcacagcgagggaagaagggagggagcggccggcccaggaaaggcaggaagggagaggcaggaagggggacgtggagttggaaaggaggcgcgggcagaggcgaaaagcagaagtaagaagacagggatggggagatgcgggagagcgacggcggggaggcagctctgggcagcggtgaggggccacggacccggggatccggccccactcacccaggtcctccatggcggggcgcgggccggtggcgcggggcgaacagggcgggggccgtgtccggtgggggcggggggcgggggacgtccgggagctggaagcccggccgtgaccatgtaaggaagccgggacccgctgagatggggatgggggggcgatgaacgggggaacccgaggtgggggcgtggaaaggagggagcgccccggcccacccgagcccagcccgccggcctgccgcggaggcggccacaccccagccttggcctcagctgcagggagccccaggaggccagagccagagagaagtggcttctccagaccaagccccagagccgctccctagggagacttacagacacggactgaggcccccaaacagacaccgctcaaagctagcgcctgagtcctagacaagagcctccctcccacccatgccattcctgggagacttgtcccagacggaatttttggattggtagcaggagtgatattctaaggctcaattagacctcaggttcggagaccctcccatcggagaccctgacagataaatagaggccccaagaggcatacataccagacacaaagaaatctgagggacggggacagacacagtgaacccacccacagactctacactaggaccttccctccaagacttggtcatggacacacgtaaactcgaacccgggcgcaagccccttgcaaattcggggaaaacactcccaggcaaccaacccccagccagcctgcaagacaaagcccttcctcagcactgaggtggcccaggcctgctctgaaacagccctttcccaagttactgatgaactcagagcagaaagcaagacacagtctccagccacaaagtggcaaggccttccctggactgagaccctgagaaacgaggtggaaacgagaggccatagaggtagttatggacagacaactgtgctgcagccactcttctggacagatctgagcactggaatgtgagtatcaacccagcagcaaatcggaacaacctggggagctttttaaaaatgcgagacaggcatggtggctcacacctataatcctagcactttgggaggtcaaggcgggcaggtcacttgaggtcaggagttcgagaccagcctggccaacatgacaaaaccccatctctactaaaaacacaaaattagctgtgcgtggtggtgggagcctgtaattccagctacttgggaggctgagacaggagaattgcttgaaacctggaggcagaggctgcagtgagctgagattgtgccactgaactcctgagcaacagaggagaccctgtgtcaagaataaaaaagaaaaagaagaaaaaatgggcaaacgacctgaatagacagttcaaagaagttatataaatagccaatgattacatgaaaagatcctcaacatcattagtccccagagaaatgcaaatcaaaactacaatgagatgccacatcatacctattaggatggcaataacaaaaaagacaggtaattaggcaaggagcagtggctcacacctgtaatcctaacactttggaaggccgaggtgggtggatcccctgaggtcaggagttcgagaccagcctggctaacatggtgaaaacagtctctactaaaaacacacaaaaaaattagccagacatggtggtgggcacctgtagtcccagctacttgggaggctgaggcggaagaatcccttgaacctggcaggtggaggctgcagtgagctgagatcgtgccactgcactccagcctgagcaacagagcgagactccatctcaaataataatgataatattttaaaggccaggctcagtggttcacgcctgtaatcccaacactctgggaggccgaggcgggcggatcacctgaggtctggagttggagaccagcctggttaacttggcaaaaccccgtctctactaaaaatacaaaaattagctgggtgtggtggcaggcacctgtaatccca

SEQ ID NO: 1243429 - DNA, 4001 bp, Homo sapiens
caggtacttgatctagcagggggcactaggttaacccctaggcacagctgttgtcaatcacatctgctcagtcaataaaacaaggaccagtgaacccagtccagactctgacggaggaagagagagcctttgtagatgcctgagagatattgggtggagccacagagtgttttgtgaagatcagatgagatgagggtttgtaaaggagctggcacagtgcctggcacacagtaggaccacaataaatggtaacatggttggaattttcaccctaccactaacctgctgtgtggttcagagcttcagtttcctcatccataaaacataagtaataatgatacccacttcccagattaacttactaaaagggaacagcataaagcccagctctcactaaagatgggtctgtgacaggtctctgcctcccttctcacaaggctccacttacttgcccagcaataggtttattgcaggagccacagaggcctttggcctgggtgggaacaccccggcggctgaggtcggactgcagcagccccagcatggtgtctaggctgcccttgccagtcggctctggtggggatggggagccctcatttgtggagctcaccaccggtggctgagttggcccagaggctggaagctgcagcggggaggacatgagaattgagtcagcaaagcagcagatgtggaattgtctagaaggggttggggagccacaaatggacactggcccactgcccaactcacatggttttgaacgcggaagtcagagagtgaggccatcagtctatccagctccagagtggctgaggtggcagaagcctttgggaggccaggagacgggctggaagggctgtgaagaacatgcttgtgtcatctcagagcctcccagagcaacgctccctctagtgactcagatatccaggactcatctctcagccctgacaacgacgccaaactcacaggctgggtcttttcttatcttcagactggtcctccttctgctctcctgaagccaccttgctagatgggaactgagacatgatttcatctggagagaggagaggaggacgctacatatagggccatgctcaacgcaccctcacacttgaggctttaggtccctttaactgctactctgggaagtgtattcctcttagtctctgccccacccttccctcccctgcccctatcgcatcaaggcctctctcagtcaccctggtacctgtgatgttgaactgagtggcattaagttcctgaagcaaccgatctagctcacagagcccggtacccaagacaccgctggaagaggagaatggaggggccgccggggctgcaggctttggggaccgaggcttgcataccgtgctgggaagcagagtgggagcctgggttcaggggtggggaatccaagcctcctcacctgagactcagttggcccccatgccctggtttccaggcccctcacctgtacaggtggtccttgtcccccgaggctcctgaagactccccagaccctgtctacagagcggagacgcacaggtgggatgacaggcctgcactctgccccactgaggctgagatccccatagaccaggccgagcctggccctagtggctgccccagtccccaacatccgatctcacctgtggctggtggccataggatgggggaggggtgagaggctccgcagggcgctctttgggagcccctgaccttggcatgtgcgaggtggtagtctccaggtcagagagcagggcatctgcaggaagaggccatcagggagagagacaagggtcacggttagatcagaagataaggttcccagtgggcagtactggagaaggacagaagccagtattaagagaagaggtcacagggccagagccaggcagagcactgctcgaagggtagcaaggaatatttatgaccagaatatcccagttgctcacgcttggagccaagcacaaacccagcctcctgattattttattctccccatcttctctgatgcagtcaaaatgggctcttcacccaagccaaatttggctcccctccaaattgctccattggcccagtgcctggccctcagctttctgattggacgctctctcttccatgctggttaactcctccctctacctacacaggccccgcccagcctggccactcccaggcccctgagtcccgccctgggctcctcactggcgcttcgctgggacctgccttctgattggctgtttatctgcggtacagcgtcagttacccctaccgagcagcgccctctaccgccaggggccggaagcccctctctcccgtggagcgcacagccttccagccccaggcttcgcagggaggacgagatacctgggtcccccttccggacaagacacctctctccatccctgcatccccagatccgggtcttttgagccctttcacttccagaacccagaagtcctgccctcagtcttcgtctctgagcacccgcgtgaaaccctgaagccttcgcgggcgcctaggcactcctgagttactattctcttccttgcctcaaggacctgaccctcactgtgctcaggagcccttaactcctcctctcccaaaactctggtgcaggcaggcccgctttttttctccaaaacttgatgccagactttcccgtgccctctactttcccggtccccgggccgaggcccctttaacccctccctccccagagccccgcgcccgggcgcccgcgggcgccgcacctcccgttccatctgccgcagcctgggatggaggagcacagcgagggaagaagggagggagcggccggcccaggaaaggcaggaagggagaggcaggaagggggacgtggagttggaaaggaggcgcgggcagaggcgaaaagcagaagtaagaagacagggatggggagatgcgggagagcgacggcggggaggcagctctgggcagcggtgaggggccacggacccggggatccggccccactcacccaggtcctccatggcggggcgcgggccggtggcgcggggcgaacagggcgggggccgtgtccggtgggggcggggggcgggggacgtccgggagctggaagcccggccgtgaccatgtaaggaagccgggacccgctgagatggggatgggggggcgatgaacgggggaacccgaggtgggggcgtggaaaggagggagcgccccggcccacccgagcccagcccgccggcctgccgcggaggcggccacaccccagccttggcctcagctgcagggagccccaggaggccagagccagagagaagtggcttctccagaccaagccccagagccgctccctagggagacttacagacacggactgaggcccccaaacagacaccgctcaaagctagcgcctgagtcctagacaagagcctccctcccacccatgccattcctgggagacttgtcccagacggaatttttggattggtagcaggagtgatattctaaggctcaattagacctcaggttcggagaccctcccatcggagaccctgacagataaatagaggccccaagaggcatacataccagacacaaagaaatctgagggacggggacagacacagtgaacccacccacagactctacactaggaccttccctccaagacttggtcatggacacacgtaaactcgaacccgggcgcaagccccttgcaaattcggggaaaacactcccaggcaaccaacccccagccagcctgcaagacaaagcccttcctcagcactgaggtggcccaggcctgctctgaaacagccctttcccaagttactgatgaactcagagcagaaagcaagacacagtctccagccacaaagtggcaaggccttccctggactgagaccctgagaaacgaggtggaaacgagaggccatagaggtagttatggacagacaactgtgctgcagccactcttctggacagatctgagcactggaatgtgagta

SEQ ID NO: 1243430 - DNA, 4001 bp, Homo sapiens
gaagcatctctactttcagggtcagcctggtctttcagaaaggctgaggcctatttccccatgtttcaaggacatttaactatgtttttgtaaaaataaaatggcgagacccaaataaaaaccttactttttgtttaatttgttttgccaaacaaacacagtgaaaactttagtctgactaattgtacagaaaatagaatttgtaaccagtagcaaacaaaacaggataaacctaagtccctggcaagctggatctccatcagcaggtcatccagatccccttgtaaatggcctcctgggaaaataagtcctaggaggcagaggcacagatttaccagtccccatcagaatcacaggctgcacctgggaaggaaaagcatgaaaaggaggagaactgatgttacttgaatctcttatcactacacacattagagttgtctgactgctgaccaaccttaaggtatggttttcccaaacctatagtccctggacatcccacctgcatccctagagggtaagtttcaagttcagtggttctgaagcctctgcttaaccagaatctgcaacaataactggggaggaagggtagacaaagtcataattgctggtgtcaccagggcagagtctaaggccccagcttccacttcaggaggaaacaattgaggatgccaggtcaccagcaagagagtccagctgccttaagcctcagtactgtcaaccagtgcccaggagtatagaggagttcaacaatggcctgcggtcccctggctggatggggtctgggagtccagcaggctgccggggcaccagttcacattccgtgcttcttgcggatgacagccatggcaagcagccgatccttctcacgcagttcttcgcgcagcttggcctcagtgagacgcaggtggcgaatgctgcctttcatctctttcatcttcacttccatcagagccaggatgtcccgctgctcattcagcttgcgcaggagctcctcctccgtggtgcctgacgacaaggagtacgaatggtcggagccagtatcagggaagccctcttcccctaccaccaccaactgggggcccatagggcactcggcagcctccagccctgcggtagcagcctgtaactccgacgcggcggccgcagcggctgcgccctctgcggctgcaaactccacttgcactgtgagatcgatgggcttcacgtcttctccagtgggagtgatgggcgccggctgtacggatcccggagcctgactgctgtctacagtggcctgaagggtgagaagcacggccgcggaagcagataccaggttcggctgcagctgggcagtctgggcagtggaggcagagggtgaggactgctgctgctgctgctgctgctgctgctgttgctgctgctgctgctgttgctgctgttgctgctgctgctgctgttgctgctgctgcctgcggcgggcggccgcggccccagcgggtctgcgcgctactttgcgctcattgacgccgcgcagcgggaagatggtggggacgcgtaccgtgtaggtcttgcggccgccctggaagtgaacgctgcagagacggtggcctgtggtgggctggaaggtggagaagcacccactgacgccggcacgcgacacgttcttgagccagaggcgccgcaactcagcgtcctttggaaacgtgtagaagtgcagcgccttgtcccggtgcgagttgttgtagcagcctggcacgcagcacgtaaagccaggcatggctgcgccgcgcggcccggcccggcccaccggcctcctgcgctcttcgacggcccagtggctacgccgccgcccgcccctcgacgggcggcgccgcgcgaggccttgggtggtatcccaccactgccgctcggcgcagccggcccgcccggcgccccgtgcccagaatacgcttcctgccggcccgcgccgcgccgcccgcctggctgcccgcctgcgctcgggagtgggccccggggacgccgcgaaggaccgcctgagaaagagactacgccccccacaatgccccgcgccagaagcggctcacttccggggcgggtgtgtgcggattcctgccgccttccaaggcactgcgatagcctccgaagagcagattctttccccagcccgtcttgtccccggcgggcgagagaggcgtattaggttggaacgctgtcgcctggactgctcctcacgaggacccgaatcctgataggggcgtggagcggggcggtgcgcgcctcaccggtgcgcaagcgcggtgggtatatgcccacggagactacaaatcccgtgatgcctcgcgctgaactaggcgccttccctccgaagcgccgcctaagggaaagatcgagttactgcggaccaggattcgggcgaggttgtgctgtttgccagaaccagttccccagccccgagcccctttgagtcgacggcattgctgcagcagagggagacgaaacctgggcctcggcgccccgaagggtctcaggagcccctttctttgcgttggggactctctcctgattcagctgctgcctgcgttgactaactgatctaaacaaagtctccagtagacgcctactatgtggctgacacggtgccgggagtttgcgggagtcagaccgactgggctcctctcttggagcctgactacctagacggataagcgtctgtcttttggataatagatctgaatgcacgcgaatggatgtctactcacaaatagtaatcgctccaaaggaattaacaggagagcagagaaatgggggggaggtggtgggggccaggaataaaaaaacgaacgaaagcttgggtagggagaagtagccaattcttgtcccaggaaccagtctgtaaggccacatggcagaaaagagctaggctccgccattaaagagcctggaaaggggtggcccgggtagggccaagcgtaggaaaataccaaactgggacatgttaaggatttggggttttattctgcaggccactgagagctattaaaggattttatgggaaaggatttgcattgtaacaatacacctccccccacctcaacttatttgagggaatcttttttttttttttttttttttttttttgtaaaggagtctcactgtgtcgccagactggagtgcaatggtgagatctcggctcaccgcaacctccgcctcctgggttcaagcaattctcctgcctcagcctccggagtagctgggactacaggcgcatgccaccatgcccggctaatatatatatatatatatatatatatatatatatatgtattttgtatttagtagagacggggtttcgccatgtttctcaggctggtctcgaactcgtgagctcaggcaatctgctcgcctcggcctcccaaagtgctaggattacaggcgtgagctaggatcacggcgcctggctgggggaaaatgttttaaagaacacaaaatgttgtggaaagccagggaggggccaggcagttctccaggtgaattacctgcaaactagccctcctttgccgagttcttccttctcccaattttttttaaacttttactttaggttcgggggtacgtgtgaaggtttactacataggtgaactcgtgtcaccgcgatttgttgtacagattatttcatcacccaggtattaagcccagtacccaatagttatcttttctgttcctctccctcctcccgccccccgcaattagaccccagtgtctgttgttgtcttctttgtgttcatgagttctcatcatttaactcacacttgtgagaatatgtggtatttggttttctgttcctgcattagtttgctaaggataatggcccccagctccatgcatattcccacaaaagacatgatcgtggtcacctcccaatttttcttgtccttttttctctcctgatagcagatcacaggcatgaaatagaaacctaatatatattatttcttttttttctttttttattttgagacgga

SEQ ID NO: 1243431 - DNA, 4001 bp, Homo sapiens
tcccacccaaagtcctgaagccagactccacaggtatacccaccttggaaagtcaccaccggcttcttactttcctctttggcttctgagctcaaagcagaggacaagctgcagggacagcggaggggacccaggagtcagaaacgggggcatccgtcccatgagggccaagtgccagggctaatgggtggacagcggcagagggtacctgaagatggcaatctgcccgtaattgttgccagccgccagaaacttcccacatggtgagacgctctgggagaagatggtcatatggagccgctgcaaggcctggaacacctctgtctgcagggaaagactggatgaggcctgcctgggacgtatgaaacctcccatccacagattcctccctgcttcccccaaaacctgccaggcctcccactgtcctgacttctcagccttcttttgaggcggccccgccccaagccagcacctgcccatgcagtcccatgggtggctccaagaagacactgaagaaggggagagttgaggtgatgcctcagggacctctgagcaagcacccaggcctctcctgccagcttcctcaactgacaaatggagctcacagaagattccatcacaattagatgagctagtgtatagacaagagctttacatggggctgtcactcagtgcttaagccgggtgtggtggttcatgcctgtaatccagcgctctgggaggccaggagtttgagagcagcctgggcaacatagtgagactctgtctcaaaaaaaatttaaaaatgtggggccgggcgcagtggctcacgcctgtaatcccagcactttggcaggccaaggcaggtggaccacctgaggtcaggagttcaagaccagcctgaccaacatggagaaaccctgtctctgctaaaaatgcaaaattagctgggagtggtggcgcatgcctgtaatctcagctactcaggaggctgaggcaggagaattgcttgaatctgggaggcggaggttgcggtgaacccagatggagccactgcactccagcttgggcaacaagagtgaaattccatctcaaaaaaaaaaaaaaaaaaaaaatttggccgggcgtggtggctcacacctgtaatcctagcactttgagaagccaaggcaggcagattacctgaggtcaggagttcgagaccagcctggtcaacatggtgaaaccctgtctctactaaaaacacgaaaattagctgggcatggtggcacacgcctatagtcccagctacttggagggctgaggcaggagaatcgcttgaacctgggaggcggaggttgcagtgagctgagatcgcgccactgcactctagcctaggtgacagagtgagactctgtctcaaaaaaaaaaaaaaagtgctttgcaagaactagaaaattaaaaaaaaaaaaaaagtacctctactaccccaacatagaaaaacgtactgatttataattcctactctctgacttgcgttaagcccctgaagcacttctgggttactatcccgcccccctggtcagagtctgagtcccacaaatagcccaggcaaaacagggctcagggcacgattccctgcccgccccgtcccagccatgcgtgaactacaaaccccagaaggcaacgcgcaccacgtccgtctcacctgacccagaggcaccgcgagcggcacagctcgctccatctccagaactacaagtcccagagtgctccgcgcgcgacgcaacctcacgaggccttacgtgcctagagcggttcctctccgtggcgccctaccgccttcggcgcgaaggtggctggtgcgtaccgtcccgaaccctaggagccgaggtgagcgccgcgaagacccccgacattaagaagtggtgtccaccgcagcccccttaagccggataccctcccccaccccgaggagcaagcctgccttccgccacgcgccgcccgtcttccgcgcccgcgcagaacctcgcggctgtgcccgcctaaagccacgcccatcctctcttggccacgccctcagagactcctcccctgtcgcccagatcccacccgcaggaccccaaaacccaatgatcctgcagcagcccttgcagcgaggcccccagggaggggcccagcgcctcccgcgggccgccttgggggtgacttggggcctggacgccaggtgcgtgtaggggaccagggtgggcctgaccaagggccgcaggagctttggctgggtgctcaggactggtctgcaggatgaatacggggtggggcgaatcggcggggcttaggcgtgagctgagatgggactggggctgcggctgagggtcgagacttccgaggtaccctgctggatggtccaggagagcggggaccggcaccagctgagacaggaatgggcttggggctcctggctgatgctgcaggcttaggcgggcagatccttgggaaggggccaagagggtggggtgcaccaggctctctttttttcccagctcccctctccgaggagctgtgcccatgagcaccaagcggcgcctggaggaggagcagtgagtttgggggcagggagggactcccaacaagatctctgtcacctctggtccccaacaggctgcctcctgtgtcagtatcccagcctgcctctctgccatctctccccagggagcctctgcgcaagcagtttctgtctgaggagaacatggccacccacttctctcaactcagcctgcacaatgaccacccctactgcagcccccccatgaccttctccccagccctgcccccactcaggtaggttcctccactggccaggccttctgcagaatcacaggcggtcctcacagctgacctcaggccctgcctcatcgtgccatttttagctctagctgacctctgggttgtttcccatcttggctctttggaaagtgctgggaacccaggagcccctggggacctggacctggtgggaggtgctcagctaggccagcctcagctccatgccctgacagtcatttcctcttctaggagcccttgctctgagctgcttctctggcgctatcctggcagcctcatccctgaggccctccgtctgctgaggctgggggacacccccagtcccccctaccctgcaaccccagctggggacataatggagctctgagtgctggtggacagtgcccctcccaccttccttcttccccacaacagaagagaccagcgactcccgcaaagggacaaggttcctccctctcctgcagagtaggcatctgggcaccaagaccttccctcaacagaggacactgagcccaacggagttctgggatgggaggggtgggagcatgggaagggaggcatcccacccccaagaagaactgaataaagattgctgagcaaaggaaggcttcagtctggaacctggggcttttggggatggtggagagggcagaggcgcgggatgctggggtttctcctcaagatcttccctggaaaactgttagggccagccaggtccttgccggctgagttccaggcattgagaatgtgtgagtcagagcctcacccccgcccccgcggctggctgactcactccctccctccagctcaggggagtcagtcggggatcactgcctctccaaaccatttaaagttaaagattcttttattaataaattctccctcccctccaaactctccccaaaataaatatctcctccccgctttggggagttgggggggtctgtatcttagggccagccctcctagtgggccagccccctagtgttaaaaataggtccctaaccccccagggtgacccccgtggtggaatttcaggacatctgagtgagtggggcctagtgtcaagtctgccccccaagtcagcctggcccccagggcctctaggaaggagggcacccccctcccctgtgcaaatgctgcagttccttagtcagtgtcagctgttttgtgtgagccagcgtgaggctccctttctg

SEQ ID NO: 1243432 - DNA, 4001 bp, Homo sapiens
gaatgtaaaatttgaaaatgttttcaaaagcatcctgacagtttgaggcagagagaaacgtgctgaccagatcaatcattttagggtggaccttaacacgttgaccaggtatctgtgtgcctcacacgacactgtccttttggtgagattagaccaaatacctgtggaattaaaaacccttactcttgttctattaaggaacaaggcacagaaatacattgttcaataattttggccaagcatggtggctcatgcctgtaatcccagtactttagggggcagaggtgggcggatcccttgagcctaggaatttgacaccagcctggacaacatggcctgagaacccgtctctacaaaaaatacaaaaaattagtcgggcatggtggcacatgcctgcagtccctgctactcggggactgaggcaggaggactgcttcagccccggaggtggaagttgcagtgagcaagagcatgccactgtactccaacctccaccttgggtgacagagcaagaccgcttccaaaaaaagaatttgcttaaagtacaggagtagacaggatatgtgcttgttgcccagctctctgccccctagtgcccaacgaaattgccagtcaggcacaataataattgtatacatttacagaaactttattacataccagtatgtattttatgtacataagcaactcactagccagtcttaaagtattctcttttttatctagctcagcagcatcaaataatgtgcccatgtccgagtccccaagctagtagaggatgagccgtgaatttaaattccctctgtattacccttcttcatttaatccctcagtgtgcgtgtgtgtattggtccagattctaagccagtaatatgatttccaaacactaagactttaggtgatattggtaaaagtttttacgttctaaaatgtattttaagtgcagtaactagcattagtagtaaacctattatttcagaaatattattgcttcaggtaaacacattattactccaacttcacgaggctgtcatgaaaaatgtgtttctgaaagagcttcagcacaccgcctggccctcaatgagcaatccttaagtgggaggtaggccgggctcagtggctcgcgcctgtaatctcagcaccttgagaggcagagacgggaggatcgcttgagtgtagggtttaggactaccctgggccaaacagtgagaccccttatctacaatttacaaaacttagccgagagtggtggcgcgcactcatagtcccagctactctggaggctgagacaggagaagtcgaggcttccctgagctatcatcacgccactgcactccagcctcggcaacagagcgagaccctgtctcacaaaaataaaaataaaagtaatgggagctaccgtggttactgatggcaagaaaaggtgcaagcacttcaagcacaaaaccgatagcaccgaagtctgcgagcgtctcaggactagggacggaaacgccggcgaggccacgcccctacagccgtcacgccgacgacccgaggcgcgcatgcccataccagcagccatccctccacccttccctcctcccgcaaggcctggcagccggcccgcccgcccaccccgggaccggtaccttttctggcccatacatgtcgtcgccgtattcgttgaggaggctgtaggcctcctccacgcacttgcgctcgttcatattgcaggtgatgaggatgccctgtagcccgggctctagctgacggggcccgccagcgtcgcagcgccgagcgcgcttggccagcacatactgagccttgcctttgcgcttcccgccgccaggctgagtagtctgctgggcaggggccgccatggtgtgcgcaaactgagaggaaagagaaacgtttctccgctgctgttggcgtcctcgtctatcgccggcgcgaactggtgacgtcggatatgagcgacggcctcccctagccggcctcgaagcctcattccgtgctgcgccaggtcctaaggccggtctgcaatcgtgaaaggggtggagtgatacccgcccaagccccgcctcctgccccgcctcccgactgcaacctgaatccagtagaggcagcatagcagccattctggaagtggtgtcggtggctcctcaagcccttgaagctggctccagccatatagcttcttccacccaaccttggtacctgttcctccagccttccctataattctgccagctactgtggaggaaaagttaaatattaaatttgaactcaattgaacgtggacacaatggtcaagtcccgtaacaggttgcatgagccccttgaggcattcattcatccagcactgttacagataactctgtacctgtacttgagttattgaaaaacagacaatcacagaaacaagttgacctttatgtgttccttgagcccagtcgagaagggccctcgtgactgggcctcatgccaatcaacgcattacaaaaagagccagggtcggccgggcacggtggctcacgcctgtaatcccagcactttgggaggccaaggcaggcagatcacgaggtcaggagatggagaccatcctgaccaacatctctactaaaatgcaaaaaattagccaggcgtggtggcgcgcacctgtagtcccaactactcgggaggctgaggcaggggaatcactcgaactcgggaagcggcggttgcagtaagccgagatcgtgccattgcactccagcctggcaacaaagcgaggctctgtctcaaaaaaaaaaaaaaaatgagccagggtcccaggccacacggaagcttcttgagacccctcctcctctgtgcacggacaagtggctgactctggagcccaggctgttgcttcccggtctggtgatgaatccaacatagtctggtgcgtgtaaatatatatatatatatatatattttttttttttcccttctccccttcccattgcaatttgcttactatatcatttgcttattatatctgcattgccatttacgtgggataaaggttgtttacccccaaaggtattgtatgtttgtctattttttttttttttttttgagatggagtctcgctctgtcgcccaggctggagtgcagtggtgcgatctgggctcactgcaagctccgcctcccaggttcaccccattctcctgcctccctcccgagtagctgggactacaggcgcccgccaccacgcccggctaatattttttatttttagtagagacggggttttaccgtgtcagtcaggatggtctcaatctcctgacctcgtgatccacccgcctcggcctcccaaagtgctgagattacaggcgtgagccaccgcgcctggccgtattttgtcttgttttttcccctcgcgcatttcccacatagaacagttactcaaaaggcttccagtaaattccatttcagcctcaattttccaggctatgtttctatttcacttaaaaccaaggatgttggctggtgttgtttcatgctgctttcgttgcggccttttatccatagtcttggcaacttatcatgttactgtctttttaaaaatcattgaagatgccacttttgaagaatgtgtttaaaaaacaagtgcttctcatactactcttcaggtacaaacctcttagcagatttgagttcctacaaagccctaaaagatgtaatctgatattttgaaagggacaccgaattcacagtcaataaaccctaggttctaaccccagatctaccactatgtccaaaaattttatcatcttattgtttgcttttacctgtgtattcaatacagcatttaattttcagaatttctttggtggacactgcacagcagagatttctagaagtcctcagttgtttgtgaagagcagtgtcatgacactggcattggccttcccccaaatctctctctcttctgctggctgggtttcagttgcccacactctgccacctgtccttaggatatcaaatattagcat

SEQ ID NO: 1243433 - DNA, 4001 bp, Homo sapiens
tatattcagcattgggccaggtgatgagaatcttaatgctgatggcgctactgtccactggttctgatagactgagaatatttactgctgaagaaatgaagtcccaacctggctgagattttaaggaaatgaacctacttagacacaaattcaagtgacttaggcagatgctcattattaaatctgtttatctttctctctcacttaaaaaggatcaagatctatgcctaagaggagttacataccatcccatccaaaagcaaaaatagcataatggcctggtaatggcctctcatcttcattctcaccttaaacttaccttagatgaactgccatagaaagcagctcagtccaaaacgctcaaatggtgctccaggatttacttttttgtattgttttgttttgttttttgcgacggagtctcgctctgtcgcccaggctggaatgcagtggcgtgaactcggctcactgcaagctccgcctcccgggttcacgccattctcctgcctcagcctcccgagtagctgggactacaggcgcccaccaccacgcccggctaatttttttttgtattttttagtagagacggggtttcaccatgttagccaggatggtctcgatctcctgacctcatgatccgcccgcctcggcctcccaaagtgctgggattacaggcgtaagccaccgcgcccggccaggatttactttcttaaatgcactcttttcattcccattcaaaggactccagtataagtgccacataaactcgttttctaacttttaaaactcttcctctaaatgcagcccaactcagtaaaaacgtacctaagatctcacagtctaatgtttccagcttttaaagcctttactcctacccttccctctgcctggaaagtgtctccattccctgctgtggacaaaatccctcaaggtcttttataatttcccccaaccccaaatcaacttggattttcttggagttctcacagcattcagtttatgtcctattcttacccttgtgttactgatattcacgaaattgctcagtcctttcaagagattgcttaaggacaaagacttcttactcaactctgcaatattggctacacatagctgacttaataaatagtcccttgactggtataagctgacgttacaaaaactggtaattccgaaaccactcatactggacttattaaataatccctcaactggtacagactgacattacaaaaacggattaattcagagatcactgaacacccaaaacactcagattcttataactatgattcagtaaatatgtgtggaatgcctatcttaccaggtgactatgttaggcgctgcatgagatataagatgaaaacaaggttcccattttccagggaagaatactggagtggaaaacgcagaggataccacaacaggagagctatttccgattagcggccgccactgctgagctatgtgaccctgagcaagtcacttcttaggtctccgtttctctgtcaaggagagatagaaaaagaacctatttcacaggttcaaacctacctcaagaaaaaatagttgtggggaatgcgtcacgagacctagaaaacggtacaaaaccctcggggggccgctgtttctgacctagcgagtggcccgacccggacaaaatgcctcttcctcgaggaggcggcgacgagcccagcaacagctcgagcacggccggccgggccgcgggaagcccgagaacgcggcgcgcgcagctgggaggcgacccttacccggcgaggctcccgggaccaaacgccgcccgacagccacgcagaacagacgcggcagtgcgacgcctcccccactggggacacgagacagcgacagccacgcggtgagccggtacaaggccctctaggcttcagcgggtctggatactcggtggcattaacccttccctaccgccggggaagacagcagtttctctggcgaggaagtaggccgggctcaggcgccttagccagagggcgggcctgcgccaccctcggaaagcgtcacttccacttccggccggcgctctggctctgtacctggacagggctgcggtaggccagcggtgggctggcggttgcgctcctcagatcggcggcctttcgggcggtggcttgcgtttgagcctcagaaagcgaggagcggcctccacggaagccaagctggccgaggtaaccgagaagcggcttcccctatggcttcgaccctggagccgctggagcggcggcggccgcagggaggcagccattttccgtaggcggtggccgcggcgcttccgggccgcgcggctggagcctgaggcggggccaccgtcgggcacgagaaaccattctctccccgcttttcgcagctgtatcccagaggcgcggctgaagctcgctgggacactgcccgcttgcccagtgcccacgggcacgcctgtcgcagacacaggctgtggcgaatccgagtgctggcgggcagcagtgcctgcagctgcgcccgcagactctttcccgcctccgccggcatttccgtgtccggccgatgtcatgcggtcggttgagcctcagggctagcagcttctactgatgcaaaaacataggaagtgtctctttgcttctggaaccggggtgggcagcaaggagctggccacttctttgaataccggtggcatcctgggcagaatttcggtgccgtttctgctggctcacttcaggaaaagtgaggctcacggctctcctcagccccccttagaagtctaaatgacctttggagaaatacaaagtcagcagaaagtttcactttcatcgtcaccaactcctgttggagttgatatttcataaacatcagcgacagaaagaaaatacgacttgatattttgtaaataaaatatccttttttacaagttgatattttgtaaacagaggtcagctgtaattttctccagatcaagtaagcacagttaaaaattcatataggcctggcgcggtgtttgacgcctgtaatcccagcactttgggaggccaagatgggtggatcacgaggtcaggagatcgagaccaccctggccaagatggtgaaaccctgtctctactaaaaacacaaaaattagccgggcatggtggcacgcgcctgtaatcccagctagtcgggaggctgaggcaggagaatggcttcaaccggggaggtggaagttgcagtgagctgagatcacgccactgcactccagcctgggtgacagggcgagactccatctcaaaaaaaaaaacaaaattcgtataaatcatctgcatggcaccctttatgtgtgttgcaaagaatgatgagcatcttgttgcttacttgggagacattgtctgaaaataggctacttttttactttctgtagtaccccctccccccactgtatctgggtttcacttacccgctgtcaactgccatccaaaaaatattaaatggaaaactccagaaataaacagttcataagttttaaataacttttttttttttttttggagatggaatctcgttttgctgccctggctggagtgccgtggcacagtctgagctcactgcagccttcacctcccgggttcaaacaattttcctgcctcagcctcctgggtagctgggactacaggcgcgcactaccacacctggctaatttttgtgtttacaataaagaaggtttcaccatgttggccaggctggtcttgaagtcctggtctcaggtgatccacccacgtcaggcctcccaaagtgctgggattacaggcatgagccacggcgcaccgccagttttaaataactcttactacagtgttttattgttaatctcttattgtacctaatttataaattaaggtatcatagctatgtatacatagagaaaatagtataatgcagttagatgctgttgggggttttaggtattcacagaatgtactggaacttaccccccttggagaagggatactactgtattt

SEQ ID NO: 1243434 - DNA, 4001 bp, Homo sapiens
ccagccacggtactcctgccaccacttgccaagccacccccttcccagccactggagctagggactttcagttcttttaaggaattgagccttggtttgtgaccaaaatatcactccctaccccagccagctaaagcacccaatatccccatggacaccaacctgacccttctttgaccttcagcctcacactagtcacagccccagcccagagccagcatctcaaagccaccctgataactgaacccacatctgtggaccctaatggtttctctctgatcccctgcccacccaccagtctcaacactggggggagagggtggtggtggacagagcttccctcacatctgagctgcccaacccaagatgaaactgaccttccccacaacacaatgagcgtttttcaaatcctttcacaatcatcccttaagctttaacagcccaaatctacctgaaggatacaaatacttgtgtgctcctatctgtgcagactctggggaaagatacaagaaattggtaacagaggtggccttctaggagggtgacagacttccttctccctggagatcctcttgtatttttgctttttactatggaatgtatttttgctttttactctgcttttttctctctcctcttcaaaaaaccaaattatcctagagagtacacataaaagagggacttaccactgattttttctctttttcctgttctttatctacaaaagaaaggaaatcagtttttaaactcacttttaaataactctcctctgccctaatttgctacatgaccacaaaaacactaatgtttatgctcactccctggcctaaaaacattttccattttgggcgccctccgagattggaggcgcgcaccaccgtctcgccgatgtgccaccctgggctgcagctgcagcttcgtggacccccagtgtgctcgagttctttcacttagtacattatactttgcattttccacgttatttatttagatcttcacagactggatgttaagcaagtggaaaggcagaacagcctccactcgcggtgcacggggaagagtgggcggcggacgtggttttgggcctgggacccaggtgttcctctaggcccagggcgggcatcgctgcccatccgtcccacaggtggttctgaggcgtctctcaacagccatatggcggacaccagaacccgggtgtaacagtgacccgtttctgtgtgggtccccactcccagggagggcaggagagcgccgggggcgtaacccccctcccccacgctggcaccagagtgtgagcagaatcggcttaaggcagctcccagtccccatcgcccccaaggtcgaaagaatcgggacaggaaatgggtcgggggaccgagtttgggccggaatgttcagagcgtgtccgtcctgctctttaaaggccctctctccatcccagaaccaaagccgagcgcccccagcgctcgctgcggtctcgcgcccgggtaacggccgatggccgcccccgtcccagccgcagccggggaggaaatcccgcgcctcggaagaggcgcttcgggctcgggcgggttccggaagccgaggggccgggagtaggtgggcgcataggggctcctgggaggcgggaccaagacgcgcgttaccgggaggccaggcccggcgctgcaccctccgcggcccggggcctgaggccgggctcccgcgacttcccggcccaaagcagcgcagcgcccgggcggcccagccccgcagcggccacagcagcatagccgggcgagcggatccagaggcccggggttccttcttgtgcgagtcggcgcggacgactgctagtccagccgttgggcgccgcctggatcccggcgcctggcccttaaagagacccggtcgcatttcatctcagcaagaggagaaatactcgaagggagaggttcgccgctggcagccagaagccttaccactgctaggacgctggcagaacgcacccataacttggcaacactcggaggatggatggcaaataataccagcgactgaagggttaattaatgattgcagattaattgaacaccttctgtaatcagacacctggcacacactcatgatgtcacttattcctcccaacaaccctgcaaatagataactgtctctcccattctccgagcttgtcctcagagaattaggtaacttgttcaaaatggtcagaagcaacagatataactccttgctctactctttccccccttctcactactgcacttgactagtctttttaaaacataaattttttggccaggcacggtggctcacgcctgtaatcccagcactttgggaggccaaggaaggcagatcacctgaggccagaagttcgagaccagccttggccaacatggcgaaaccccatcgctactaaaaatgcaaaaattagctgggtgtggtggggggcacccgtattcccagctactcaggaggctgaggcaggaaaatcgcttgaacctgggaggcagagattgcagtgagccgagatcactgcactgcactccagcctgagcaacagagggacacttcgttccccccgccaaaaaaaaaatttttttttaatgatcagaagcggctgggcgcggtggctcgggcctgtaatcccagcactttcggaggccgaggaaggtagatcacttgaggtcatgagttcaagaccagcctgaccaacatggccaaaaactgtctctactaaaaatacaaaaattagccgggcgtggtagcgcacgcctgtaatcccagctactcaggaggctcaggcacgagaatcgcttgagtctgggaggcggaggttgcagtgagctgagatcgtggccactgcaatccagcctgggcgatagagtgagactacgtctcaaaaaaaaaaaaaaaaaaaaaaatcagaagcattcattaaggggtgaagctagaattccagcccatttctcttgctttgcagctggagctctttcctctgaactttgacagttccagcgtctagactctaaacgtactagatccctccagaggaggcaaccaaatattccaactatacagacaagtaggggctagggaggaagcatgtaaattccatcatactcagcaaaaattcagcccagatgtggagtcacagagtattagaattcaacaggcccaagtccagtaaccggagctgttgccactcttgactgtgaaggttccagtgcttgcgtggaggggtttctcacctctcccgggagggcgtgatgctggcagtcaccactaggcagggagaaggaagtcatttgcctctagatctgctgcctcatcttgtgcttcctgtatatctgccacacacctagcaagtgtgctctccgtaaataaacttcaggattaaggccatttttgtgagtgatttgtgatgaagctgttggaggtaactgtcgatcagatttaaaagaatgaaatggactgaagctgagatgggcaggatccaaacagatctgaatgaactacggtgatggccaaattatccaagatagaatgtaaatcacataaaaggagcgacatatacttcccatccctaaaaaggaatgccccaagacggtggagatctggcttcatggcagcacttgagaaaaaacattaagtatctgaagggactcaggctgttccacggaagaactagtaccagtgggaggcaaaagtaaaaatatgcagaacaagtcccgagtgtgatgccctgggggcttggataggacctgaggctgcacactttctgcaccaactatgtgccagaacctgggccctgcagggagagaagcagaccagtccctgcttttgtggaatttgtatttttctgatatatatcagctagcaataaacgctcagaagttatggtggctgctctagacgggatgaccaaaggagatcccctttaaggaggtgatattcacaatgcccaagttgttgggagatggggccgccatttctacagcccc

SEQ ID NO: 1243435 - DNA, 4001 bp, Homo sapiens
cccagccagctaaagcacccaatatccccatggacaccaacctgacccttctttgaccttcagcctcacactagtcacagccccagcccagagccagcatctcaaagccaccctgataactgaacccacatctgtggaccctaatggtttctctctgatcccctgcccacccaccagtctcaacactggggggagagggtggtggtggacagagcttccctcacatctgagctgcccaacccaagatgaaactgaccttccccacaacacaatgagcgtttttcaaatcctttcacaatcatcccttaagctttaacagcccaaatctacctgaaggatacaaatacttgtgtgctcctatctgtgcagactctggggaaagatacaagaaattggtaacagaggtggccttctaggagggtgacagacttccttctccctggagatcctcttgtatttttgctttttactatggaatgtatttttgctttttactctgcttttttctctctcctcttcaaaaaaccaaattatcctagagagtacacataaaagagggacttaccactgattttttctctttttcctgttctttatctacaaaagaaaggaaatcagtttttaaactcacttttaaataactctcctctgccctaatttgctacatgaccacaaaaacactaatgtttatgctcactccctggcctaaaaacattttccattttgggcgccctccgagattggaggcgcgcaccaccgtctcgccgatgtgccaccctgggctgcagctgcagcttcgtggacccccagtgtgctcgagttctttcacttagtacattatactttgcattttccacgttatttatttagatcttcacagactggatgttaagcaagtggaaaggcagaacagcctccactcgcggtgcacggggaagagtgggcggcggacgtggttttgggcctgggacccaggtgttcctctaggcccagggcgggcatcgctgcccatccgtcccacaggtggttctgaggcgtctctcaacagccatatggcggacaccagaacccgggtgtaacagtgacccgtttctgtgtgggtccccactcccagggagggcaggagagcgccgggggcgtaacccccctcccccacgctggcaccagagtgtgagcagaatcggcttaaggcagctcccagtccccatcgcccccaaggtcgaaagaatcgggacaggaaatgggtcgggggaccgagtttgggccggaatgttcagagcgtgtccgtcctgctctttaaaggccctctctccatcccagaaccaaagccgagcgcccccagcgctcgctgcggtctcgcgcccgggtaacggccgatggccgcccccgtcccagccgcagccggggaggaaatcccgcgcctcggaagaggcgcttcgggctcgggcgggttccggaagccgaggggccgggagtaggtgggcgcataggggctcctgggaggcgggaccaagacgcgcgttaccgggaggccaggcccggcgctgcaccctccgcggcccggggcctgaggccgggctcccgcgacttcccggcccaaagcagcgcagcgcccgggcggcccagccccgcagcggccacagcagcatagccgggcgagcggatccagaggcccggggttccttcttgtgcgagtcggcgcggacgactgctagtccagccgttgggcgccgcctggatcccggcgcctggcccttaaagagacccggtcgcatttcatctcagcaagaggagaaatactcgaagggagaggttcgccgctggcagccagaagccttaccactgctaggacgctggcagaacgcacccataacttggcaacactcggaggatggatggcaaataataccagcgactgaagggttaattaatgattgcagattaattgaacaccttctgtaatcagacacctggcacacactcatgatgtcacttattcctcccaacaaccctgcaaatagataactgtctctcccattctccgagcttgtcctcagagaattaggtaacttgttcaaaatggtcagaagcaacagatataactccttgctctactctttccccccttctcactactgcacttgactagtctttttaaaacataaattttttggccaggcacggtggctcacgcctgtaatcccagcactttgggaggccaaggaaggcagatcacctgaggccagaagttcgagaccagccttggccaacatggcgaaaccccatcgctactaaaaatgcaaaaattagctgggtgtggtggggggcacccgtattcccagctactcaggaggctgaggcaggaaaatcgcttgaacctgggaggcagagattgcagtgagccgagatcactgcactgcactccagcctgagcaacagagggacacttcgttccccccgccaaaaaaaaaatttttttttaatgatcagaagcggctgggcgcggtggctcgggcctgtaatcccagcactttcggaggccgaggaaggtagatcacttgaggtcatgagttcaagaccagcctgaccaacatggccaaaaactgtctctactaaaaatacaaaaattagccgggcgtggtagcgcacgcctgtaatcccagctactcaggaggctcaggcacgagaatcgcttgagtctgggaggcggaggttgcagtgagctgagatcgtggccactgcaatccagcctgggcgatagagtgagactacgtctcaaaaaaaaaaaaaaaaaaaaaaatcagaagcattcattaaggggtgaagctagaattccagcccatttctcttgctttgcagctggagctctttcctctgaactttgacagttccagcgtctagactctaaacgtactagatccctccagaggaggcaaccaaatattccaactatacagacaagtaggggctagggaggaagcatgtaaattccatcatactcagcaaaaattcagcccagatgtggagtcacagagtattagaattcaacaggcccaagtccagtaaccggagctgttgccactcttgactgtgaaggttccagtgcttgcgtggaggggtttctcacctctcccgggagggcgtgatgctggcagtcaccactaggcagggagaaggaagtcatttgcctctagatctgctgcctcatcttgtgcttcctgtatatctgccacacacctagcaagtgtgctctccgtaaataaacttcaggattaaggccatttttgtgagtgatttgtgatgaagctgttggaggtaactgtcgatcagatttaaaagaatgaaatggactgaagctgagatgggcaggatccaaacagatctgaatgaactacggtgatggccaaattatccaagatagaatgtaaatcacataaaaggagcgacatatacttcccatccctaaaaaggaatgccccaagacggtggagatctggcttcatggcagcacttgagaaaaaacattaagtatctgaagggactcaggctgttccacggaagaactagtaccagtgggaggcaaaagtaaaaatatgcagaacaagtcccgagtgtgatgccctgggggcttggataggacctgaggctgcacactttctgcaccaactatgtgccagaacctgggccctgcagggagagaagcagaccagtccctgcttttgtggaatttgtatttttctgatatatatcagctagcaataaacgctcagaagttatggtggctgctctagacgggatgaccaaaggagatcccctttaaggaggtgatattcacaatgcccaagttgttgggagatggggccgccatttctacagccccctccctctcctctgctcccaaccctgggaggatttcccgacaggaagactcctcaggagagctggagtgctgccgtcattaacgccaggccagaacacggcgggctaacagggcgctggcc

SEQ ID NO: 1243436 - DNA, 4001 bp, Homo sapiens
aatgcaggctccataccactttctatgaactagctattgtgtgtctgggggcacatcaaaccacacccaaaaagcacaaagaacaggcccagctcacatcaatgctagctcaataactaataaatagccaggcacagtggctcacacttgtcatcacagctactcaggaggctgatgccagaggatcacttgagcccaggagttggaggccagcctgggcaacacagcaagacgccgtctcttaaatgtataaacaaacaaaaatacattaattaccatccagctcaactttgcatttccctccccttctatggcacccgctggcatatccttctcctaatttcaacaaacttccacaaatctcaagcatttcaatcctctctatgtggtttcactacttcccaagagctctccaccaccctgagtacgctgggggcctgcccgcactgtctaccctctgcagatcccagccacggtactcctgccaccacttgccaagccacccccttcccagccactggagctagggactttcagttcttttaaggaattgagccttggtttgtgaccaaaatatcactccctaccccagccagctaaagcacccaatatccccatggacaccaacctgacccttctttgaccttcagcctcacactagtcacagccccagcccagagccagcatctcaaagccaccctgataactgaacccacatctgtggaccctaatggtttctctctgatcccctgcccacccaccagtctcaacactggggggagagggtggtggtggacagagcttccctcacatctgagctgcccaacccaagatgaaactgaccttccccacaacacaatgagcgtttttcaaatcctttcacaatcatcccttaagctttaacagcccaaatctacctgaaggatacaaatacttgtgtgctcctatctgtgcagactctggggaaagatacaagaaattggtaacagaggtggccttctaggagggtgacagacttccttctccctggagatcctcttgtatttttgctttttactatggaatgtatttttgctttttactctgcttttttctctctcctcttcaaaaaaccaaattatcctagagagtacacataaaagagggacttaccactgattttttctctttttcctgttctttatctacaaaagaaaggaaatcagtttttaaactcacttttaaataactctcctctgccctaatttgctacatgaccacaaaaacactaatgtttatgctcactccctggcctaaaaacattttccattttgggcgccctccgagattggaggcgcgcaccaccgtctcgccgatgtgccaccctgggctgcagctgcagcttcgtggacccccagtgtgctcgagttctttcacttagtacattatactttgcattttccacgttatttatttagatcttcacagactggatgttaagcaagtggaaaggcagaacagcctccactcgcggtgcacggggaagagtgggcggcggacgtggttttgggcctgggacccaggtgttcctctaggcccagggcgggcatcgctgcccatccgtcccacaggtggttctgaggcgtctctcaacagccatatggcggacaccagaacccgggtgtaacagtgacccgtttctgtgtgggtccccactcccagggagggcaggagagcgccgggggcgtaacccccctcccccacgctggcaccagagtgtgagcagaatcggcttaaggcagctcccagtccccatcgcccccaaggtcgaaagaatcgggacaggaaatgggtcgggggaccgagtttgggccggaatgttcagagcgtgtccgtcctgctctttaaaggccctctctccatcccagaaccaaagccgagcgcccccagcgctcgctgcggtctcgcgcccgggtaacggccgatggccgcccccgtcccagccgcagccggggaggaaatcccgcgcctcggaagaggcgcttcgggctcgggcgggttccggaagccgaggggccgggagtaggtgggcgcataggggctcctgggaggcgggaccaagacgcgcgttaccgggaggccaggcccggcgctgcaccctccgcggcccggggcctgaggccgggctcccgcgacttcccggcccaaagcagcgcagcgcccgggcggcccagccccgcagcggccacagcagcatagccgggcgagcggatccagaggcccggggttccttcttgtgcgagtcggcgcggacgactgctagtccagccgttgggcgccgcctggatcccggcgcctggcccttaaagagacccggtcgcatttcatctcagcaagaggagaaatactcgaagggagaggttcgccgctggcagccagaagccttaccactgctaggacgctggcagaacgcacccataacttggcaacactcggaggatggatggcaaataataccagcgactgaagggttaattaatgattgcagattaattgaacaccttctgtaatcagacacctggcacacactcatgatgtcacttattcctcccaacaaccctgcaaatagataactgtctctcccattctccgagcttgtcctcagagaattaggtaacttgttcaaaatggtcagaagcaacagatataactccttgctctactctttccccccttctcactactgcacttgactagtctttttaaaacataaattttttggccaggcacggtggctcacgcctgtaatcccagcactttgggaggccaaggaaggcagatcacctgaggccagaagttcgagaccagccttggccaacatggcgaaaccccatcgctactaaaaatgcaaaaattagctgggtgtggtggggggcacccgtattcccagctactcaggaggctgaggcaggaaaatcgcttgaacctgggaggcagagattgcagtgagccgagatcactgcactgcactccagcctgagcaacagagggacacttcgttccccccgccaaaaaaaaaatttttttttaatgatcagaagcggctgggcgcggtggctcgggcctgtaatcccagcactttcggaggccgaggaaggtagatcacttgaggtcatgagttcaagaccagcctgaccaacatggccaaaaactgtctctactaaaaatacaaaaattagccgggcgtggtagcgcacgcctgtaatcccagctactcaggaggctcaggcacgagaatcgcttgagtctgggaggcggaggttgcagtgagctgagatcgtggccactgcaatccagcctgggcgatagagtgagactacgtctcaaaaaaaaaaaaaaaaaaaaaaatcagaagcattcattaaggggtgaagctagaattccagcccatttctcttgctttgcagctggagctctttcctctgaactttgacagttccagcgtctagactctaaacgtactagatccctccagaggaggcaaccaaatattccaactatacagacaagtaggggctagggaggaagcatgtaaattccatcatactcagcaaaaattcagcccagatgtggagtcacagagtattagaattcaacaggcccaagtccagtaaccggagctgttgccactcttgactgtgaaggttccagtgcttgcgtggaggggtttctcacctctcccgggagggcgtgatgctggcagtcaccactaggcagggagaaggaagtcatttgcctctagatctgctgcctcatcttgtgcttcctgtatatctgccacacacctagcaagtgtgctctccgtaaataaacttcaggattaaggccatttttgtgagtgatttgtgatgaagctgttggaggtaactgtcgatcagatttaaaagaatgaaatggactgaagctgagatgggcaggatccaaacagatctgaatgaactacggtgatggccaaattatcc

SEQ ID NO: 1243437 - DNA, 4001 bp, Homo sapiens
caacatagtgagacttcgtctctgccaaaaatacaaacctcagccgggtgtggtggcgtgtgactatagttccagctattcaggaggctgaggtgggaagatcgcttgaaccaggaggcagaggtcgcagtgagccaagatcacaacagtgcactccagcctgggtgacagagcaagactctgtctcataaaaacacaaacaaaagttccagcagcccataataagtgaccaagatgttttgcttgaccagactttagtcaggctcctgggcccatctgtgtacctctttgtaaaatctggttttagcaaaacaaaaaacaaacaaacaaaaaaacccacaaaaccactcatccttgatatttgatcaccattatctgttcacttgctatctaaccaggtttaatgcttaggttagggatatccaatctttcagtttccctgggccacactggaagaactgtcttgggccacacataaaacccactaacaataactgataagtgcatatatctacatatatggtaaaaaaaaaatctcatgttttaagaaagcttatgaatttgtgttggatgtcattcaaagccgccttaggccacatatggcccacgggttggacgagcttgccctaggtgatgtctgatcaccctggcctgccttcagtaacaaactgctaggtaagcttacccagaatccaccctagcgccctgatgtttcctcagtcatcttccatccactgatccccaccctgcttcctggcttcccacttgcccatgctataatcagagttgagcccaatctctctcctttactacaaaatcccattgctgtggtccctatacccattgcaatggtcttcaataattaatgtgcttttaataagcatcattaattaatttctttaacataaggttgagaagattaaataaggtaacccagggcatttgatctgcttactggaggtcagagacagaataatgggcccaagacaacagagaatggctccttgggatcttgtcttagaacaagagaaactgccctgcttggaagaaacggaaggttgctctgcctccgtgatggaggggtggacagggaccgattgtctgcaggatggcccccaaggttcccactagtatcctaggaatggcttagtcacctcctgctcagagcttctccaacaggctgttacatggctgcttcccaccctggctgccaagctccaactctctactccaagggccccgcatccctagagccacacaagggtccctccgtacccccacaagctggggagattccaactgcctcatctggacaggcttcgaagtcctgtctgtgtctcagagcccagaggcccttgtgcgaaggggcagcttgagcctgggcaagaagttcctgtgggccagaaggtgacctgtcctgtgctggccacctacatggcctgggaacagttatcagctcactgtcctggaaaagcccagatgggtgtggtcagaatacaagaaggaaaaccccctccacacacacttcagtgtctaccccagactcgcctcctccgtggaggcacccctccctttccgcgtctacacaggctctgaatcccccttcaacacggctggccttggccctgggggaagcacctcgccaccctcttaccttgaccacataaacagcgggaggtgcaggatgattctgatcccccccaggagaccctccctccatcccgccccgctgtccccacccctcacctccccgcagccttcacctctccctcccccgacccgagggcctgaagaggcgtgggaggccagggaggggcagggcccaggcctactctggacccgtctgctccagtcccccgactcagctgggcctgcgcctctgggtcagctcactgcgaacctcagcccaggtacctaccctgccgggcttcctggtgctgtccggtccggtccagcagcccacgggctcctctcgagagccgccccttccctgttgccaggcaacattgctgaggggcagtcatttggtccaatcgtggaagcggaggtgtggggcggaacccaagagaggagtcagccaatggtgacgcgcctcacagggagtgagccgaacccggtgggtgcggctcggggcggggccgcggtctgcgggaggagcggctgcaggcccgggaatccggcccggctgcgtgcgtaccaaggaggcgcctggagagggcggccaatgactcaggccaggccaggccagcagtggtacctggggagaaggggtgtctgggctgggcgctggagcggagtagccagggtgtgggagatcctgggggagaggctgagcttgggggtgaagacacccgggggaggagagtggcccatgtggagcccatgcagaggcctctgcagtgcagcctcctgggccccaggcaactctcccctgactccccggcctgctggtcctggcctagagcctcgggtccgcctcccctcgggcctccctctgccagctgcccctgcctcgctcttccctggcaccaggtccttcccggcagccatcaggcgccagctccacagcctggctaaacagactccctccaccccacgtgcgcctcttcagccggttcccgttcactccaagacgtctgaacctgtcaccccacttcttcagctcgttccttctcaaacccaccgaaacctggtcccgggggcctgctcactacatccgaggtgcgctttgggtcctcgcaggcagcatttggcgcttggtgatcgtgctctcatcagacctctctcttgggcaccccggcgcccattcctggccctggctcgctcgctgtccctggtggtcttccctgggcccttctggcttctgccctggagtttctcgacttctccctactctctccaccccacgcatcctccctggggtccaccttcctgcagattcagctcccgcatgtccatggtaccagttctctcccctgcacggcctgctggttttccagcctggaaaaccgtgacttcgcccgccaacgtccgcttgagttggtctcgaactcctgacctcaggtgatctgcctgcctcggcctcccacagtgctagaattgtaggggttagccactgcacccggctggtcacctcttattctttaagctggaacaaaaatagaaggctttctgcctgagggcagcaggcctggctggtgacagtgcacaaggtagggcccctcaccaagacattgctctgagatccaaggccaatgtcccaggagaagcagctccacaaactaacgcatctacagccagggtacccccagctgtggatgccaatgacacgagtagccccagctcttcacctcggcttcttagagtaggtgcctgtcacctgcagccagggctcctgatgcccaagacacacgggcctttagacatgaaggactagaccctgtttccagccttcacacccctgtacttcctgcacacatcaaccaggtgtgtctttttcagtgccatccgaggtagtggcatttttgacatagcaacagttttttgtaggctgaggcacaccaagggtggacagcaatggtggcctctcaggtgcaggtactggggggtccgcaggagcaaaccggagccgatgtgtcagcctgggcaacatagtgagactccatctctacaaaaaatgaaaagcttggccgggcgtggtatggcacacccgtagtcccagctactcagggagccgaggcaggaggatcgcttgagcctcagagggcgagactgcagtgagccgtgattgcaccactgcactccagcctgggcaggaaagtgagatcttgttattaaaacggtgaaacaaaatcccccagaaaaccacagaagcaaatgcggagcggcgccgtttgagagctaccgaagtggcgccacctcgtggccataccctccagaaacagcctacactccaatctgcccacctgcctggttggaaagtttctgtttttgatggagtt

SEQ ID NO: 1243438 - DNA, 4001 bp, Homo sapiens
agcacctactaagtgccaggcactgttccgagtgtttcatctttaatccccacaaaagggtgggctcgggctgggtgcggtggctcacgcctgtaatcccagcactttgggaggctgaggcgagtggatcaactgaggtcaggagttcaagaccagcctggccaacatgatgaaagcccatctctactaaaaatacaaaaaaattagccaggcctggtggtgggcacctgtaatctcagctacttgggaggttgaggcaggagaattgcttgaacctgggagacagcggttgcagtgagctgagattgcaccattgcactccagcctgggcaacagaacgagactgtctcaaaaaaaaaaagaaagtcgggcttggtggctcatgcctgtaatcccagcactttaggaggctgaggcaggaggatcttttgagcccagaagttcaaggctggactgggcaacatagtgagacccccatctctacaaaaatttaaaaaattagccaggcatggtggtgcgtgcctttggtcccagctactcgggaggctgaggcaggaggatcgcctgagcctgggaggttgaagctgcataagctacaatcacaacactgcactccagcctgggcaacagagcgagacaacaattcaaaaaaaaaaaatcccacaaaaaccctataggataggtgccattattgtcctcattttacagataaggaaactgaggcacagaagaatcagataactgccacattcactgtgctaggaggtgatggaacctggattgcatgtcaagatcacacagactcctctacagaccacccaggtaacatggggtgacttattcaacctctttgaacctttgtctcctaatctgcagtctggaactagcaggggttattgaaaggataaaaggtaacacatgccccttattcattcaacaagtatttataggacatctactgtgtgccaggcactggggatgtatctgcaagcaaaacaaaaaaaatcctacccttctggaatgcacacattagtagggggacacgtatgtgggttagctcagtagatcttcacaaccccataggcaagctactattattgcacctgtttcacagatagggaaaaggatcccagaagtggcaaacccaagttcacccttctgagaaatggtgggacctggattagataatattcagtctccggagtttgacttcctgagttcaaatcccacagtttccatttaattgctgtggtcaagttacttaactgtctgaaactggatctcccaagggtaaaataggaccaggagaccctatttcgtagattaccccaggagaaataacaacatctaacatttaggaagcaaacaaggctcacagaatctctgtgagggaagtctaattttaacctttctttttccttttgtttttttaaacaggtgtggaaactggagcccagagagcataagtaacctgtccagagatgcacaacacacaaatagtgcgcttccaaagctcatgttcgctctcacccaggccgctgctcagataaaaaacttaccggatcggacatggtgaagtaagcacctgagaaacgggtgcgattattcttttcttcctgcacctgcagggcgggctgcacgaaggcggcggccaggccgtgtgcattccccggaagctttcttaatgcaaagtgacagagcgcggcggtctggggctggagccgctgccccctccacgtgctccccaattccggcgcctggtggttctccccgcactccggcgccgcaccccgctggctccccgctcccagcccgtgctgccacgcttgggcgccccgcattggggacacccctcccagttcttcccagcctctctgggagccggcgagggggctccgccaagacgcccctgctaggctggcagcccgggcgctggccccactcctggcgaacccgcctcacctcctggcgctcctgttgccgctgcttgcgctggccctcgggtcgaccctggcccgaagcagcccgcaggcggcgctccctgcaccggagccggccttcctgcctcggggccgatcgctttcttctgagaattgagccagttcctgctgggttgggacgcctgctggcatccgagacctctattcaccgcccgtagtctgcattcattctttctttccatgacccagccttacctgatggccaccagacgccgcgcaggcctgggtggggcggcgctcggaggacccagcaggctcatgggccagggctgtgctctccaaaactctggccaagagccacatcatctaatcctgagagatgcaagtcctctaatgattatcagtaactacgagataaatgcaaatcaaaaccataatgagatattggaacaggaattaaaagaaattaaagagtgtataagcagaaactcagttgtatgtaagaaaactcaattccccctgagaaagagaaagagctggagtccttttaaaactaactgcctatttttctgtggctagtgagccttctctcccctcctttcccaggcattgtgaagaccctgattccctagctgtgtagctgcaaggtcactagacagataaactcaagtaacaaaacatgtttttccttgaaaagtaagaaatgatgtaatgcatgtctcaattgaataactgcctttgtttctcgcttctgtagtatgcttccccctgcacagatctccctacccctacgaaatgcttaaaagttaacttaactctttgttcagtgctcagtcctttggatgttaatccgactgggccggtgcacctaaataattaataaatatcctcctgaaccccataggtctctgtgattccttaaaaatcccgcaacaggccaggcgcactggctcaagcctgtaatcccagcactttgggaggccgaggccaacgaatcacgaggtcaggagatcgagaccatcctggctaacatggtgaaaccccgtctctactaaaaatacaaaaaaattagccgggcatggtggcaggagcctgtagtcccagctactcgggaggctgaggcaggagaatcgcatgaacccgggaggcggagcttgcagtgagccgagatcgcgccaccgctctccagctctgggcgacagagcaagactccgtctcaaaaaaaaaaaaaaaaaaatcccgcaacatttccagctcacatctactaggctggccactatcaaaaaacaaaaacaaacaaacaaaaaataagtgttgatgaggatgtggagaaattgtgcactgtcggtgggaatgcaaattgggtgccaccgtggaaaacagtatagtggcaaaaaaacaaaaacagaaaggtatatatctaaaaaaattcaaagcaaggtctcaaaatgacatccgggccaggcatcatagctcaggcctgtagttccagcactttgggaggttgaggcaggtggatcacttgagcccaggagtttgagaccagcctgggcagcatggtgaaacccagtttccacaaaaaaatacaaaaattagccaggcatggtggcacatgcctgtagctccaactactcaggaggctgaggtacgaggatggcttgagcctgggaggtggaggctgcagtgaacagtaatcgtgccactgcactctagcccaggcaacaaaggaagaccctgcctcaaaaacaaaacaaaacaaaacaacaacaacaacaaaagatatttgcacacccatgtttattgcagcattattcacaatagtcaagcattaaaagcaaactaaatgtccatcagcagatgaatgggtaaagacaatgtggttacatacatacaatggagtattgtgcagccttaaaaaagaaggaaatcctatcacatactaccacgtggatgaacctcaaggacatcatgctaagcgaaataagccaggcacaggagggcaaatactgtatgatttcaatcattggatgtacctaaagcaatgaaaatcatagaaacaga

SEQ ID NO: 1243439 - DNA, 4001 bp, Homo sapiens
ctcacgcctgtaatcccagcactttgggaggccgaggcggatggatcacgaggtcaggagattcagaccatcctggctaacacggtgaaaccccgtctctcctaaaaatacaaaaaattagccgggcatggtggcaggcgcccgtagtcccagctactccggaggctgaggcaggagaatggcgtgaacctgggaggcggagcttgcaatgcgccgagatcgcaccactgcactccagcctgagcgacagagcaagacactgtctcaaaaaaaaaaaaaaaaaaaaaaaaaaaaccaacacattcatttccactgagcttcttttcccctctctagtgtagaaagaatctagtcaaacaataacaataataataagttaataataataacaacaacagtaataagcatgaagacagcactatttattgagtgctgacatgcatgccaggcacagggctatgcccttcacatgtatcagcaactgaatgctcaaacaactttatggggaggtattattatccccattttatgattacattgagacccagagaggttaagtaactcactcaaggtcacacagctaaacagaggcagaatgggattcaaacccatacctctctgattgcatacgctgggcttggatcatcatcatcaacaacatcattgttggcagtgcatggtggctcatgcctgtaatgccagcactttggcaggctgaggcagaaggatcgcttgagcttaggagtttgagaccatcctaggcaatatagtcagaccttgtctctactaaaaatcataaaaggtaggcgggcatggtggcatgtgcctatagtctcagctactcagaaggctgaagcaggaggattgcttgagcccaggagatcaaggctgcagtgagctatgatttcaccactgtactccagcctgggcaacagagtgagatattgtctcgaaaaaaaaaaaaaaaaacacaaaaatcacttatcagaggaagaagagaaggatgagaaaaatgagaaggatgagaagaatgagaaaaatgagaagttattgtttcttgaacaccataaagaagtaaatagatttttttttaaatctcagaaaatgaaataccattgggagagaccacctgaattcactcatccaacaaagcattcttctagaacatgatgctccaggagacacccccagacatagaggtcacatttattgcgtgtttgtcgtgcaccgtattttattagctctgatatccacctgtggaagtgggagcttttggcatactacccattctacagacaaggaaaccaaggccagaaacatacaataactgacccagaatcccacagttagacctggggaagcccagattccaactcaagcagataaccctagggcttgttctcataatcaacactctcttgcctcccatttcccctggtcattctttcctctaacaaacatctgttgtgcctcaattctgtaccctcgtctggcaataagcaatacgacagcctcagtttccgtcctccttcgctgacacgttcccaagcattccgcattattcccatgacctcccacccctccttcaaagcactttcacttacctgccctcagttctacaggaaaatccagacaaacttcccctccactttgtagttcaaagctagagggacaggcaacaggtcctctttttttcttaactaaccggtaaggcccatctttttctgcctctctgccgtgtcgccttaaagactgctccttgctatcttggtcacacgtctgggcgggaagccacgaagatcacgggaagggggttgtttactgagctcattgccgttttatgccgccctggctatcatctctttcctcatcaaccaatgagtaaccaggtctcacctggtgaaaatgcaaatcagtcttccacctctaccatcacagctgcacctatggcctctgtctactgagtccgcgacgatgaaggcctaactcaggtcccaagttgtgcatttccttcttcctaagccctaactcctccctctcattaatattcttttgttatcagctcaatgaaaatatcaaagtcctttctagaggttattttatttcttggacaccataaggaagtaaatagattcgttttgtgttttttttttaaccctagagtgtgaggtggtgtgggaagagactacctgaattcattaatccaacaaagaatggaacgtgatgctccactagacacccccgggcactggctccttttttttttttttttttttttgagacagcgttgccctctgtcacctcggctggagtgcagtgccacaatctcagctcactgcaacctccgcctcctggactcaagggatcctcctgcctcagcctcccaagcagctgggaccacaggtgcaagccatcatgcctgactaatttttgtattttttgaagagctggggttctgtcgtgttgcccaggctggtcttgaactcctgagctcaagtgatccacccatctcggtctccaaaactgctgagattacaggcgtaagccactgcacctggcctggacacgtttttcttttcttcttttttttttttttttttttgaagactgagtcttgctctgtcgcccaggctggagtgcaatggcgccatctgggctcactgcaacctccgcctcccaggttcaagtgattctcctgcctcagcctcccgagtagctgggattacaggtgtctgccactacacctggctaatttttgtatttttagtagagatggggtttcaccatgttggccaggctggtcttgaactcctgacctcaggtaatccacctgtctcggcctgccaaaatgctgggattacaggcatgagccactgcatctggccgcctggccacatttttctatagatacatcccctttggcaacatgcggaccatacaggtttaactctgtagttatgatcaccaatggcatgtcccttctggaaacaaaggacaggcagtataaaaccagcccacatttcaagacagttgactcgaattcaaatgctgactctggcactctaagactgtaatgtctcaactcctctgagcctcaatttcctccccattaacctacaaagtgggaactatatacactccctcctcctagtgttgataagggctacatcagttaacatttgagaaagtttggactaagattatttctagccacctaagactcacattcccagggataaaccccagcagatgggatgctaatccatcacaaagggttttctctgagaaggagattttatattcatacagaaataaagaaggaggtagacaattgagggctggatcaaatttctgtatttttacaaataccagaacaaacaaaatctgtttcctatggcatttgcatttgggggagtatcatttaaaagaaaaaaagaatgtcctagttctataattcacagaaagtattggggtctatagttaccgttcctcttttttttttttttcctttgagacaggctcttgctttgtcaaccaaggctggaatgcagtggtgcaatcatagctcactgcagcctctgactgttgggctcaagcaatcctcctgcctcactcagcctcccaaggaggtgagactacaggtatgtaccaccacatttggctaacattttaaatttttatagatatggggtctctctacgttgcccaggcttgtctcaaactactgggctcaagtgatcatcccaccttggcttcccaaggtgttgggattacaggcatgagccactgcacccagccccaatctttgatgtattagcactaaatgcaaaacagtggctttccaatggagaaatggaattttctcctgtggaagagacctgagttataaattgtatgatcagaggaaatgagaggaggagggtggtggtttccaagaagacagtttggtttgccccaagagctgtcattactggggtgaaagggcagtacctggcagcatt

SEQ ID NO: 1243440 - DNA, 4001 bp, Homo sapiens
acctgaggtcgggagttcaagaccagcctggccaacatggtgaaaccctgtctctactaaaaatacaaaaaaattagccaggcgtggtgtcaggtgcctgtaatcccagctacttaggaggctgaggcaggataattgcttgaacccaggaggcagaagctgcagtgagctaaaatcatgccattgcacttcagcctgggcaacaagagtgaaactctgtctcaaataaatacattaaattaaattaaattaaaagaaacagcatctccattggcctcaggagcagagaggctggaaggtctcagctaagatctggtttcctgatgatcttgccaacaagagacatcctatctgttgcctgaccagggtgaggaggaattagcccaaagtgagacagtgtagcgattaaggatgcaggcttgaggctggatgtggtggcttacacccgtaatccatcccagcactttgggaagtcaaggtgggcagatcacctgaggccaggagttcgagacaaggttggccaacatggtaaaaccccatctctactaaaaatacaaaaattagatgggtgtggtgacatgcacctgtaatcccagctactcagcaggctgaggcatgagaatcacttaaacctgggaagcagaggttgcagtgagccaagattgtgcctctacactccagcctgggtgacagcaagactttgtctcaaaaaaaaaaaaaaaaaaaaaaaaaaaaaaaaaagaatgtagtcttgggaatcagatagacctgtatttgggccccagatcttccaggtcactaaatttatctgagcttcagtttcctcatcaagcaaacggaaatgccacctcaaaggtgtggagtgcagggagtacataaaaattcgatggataacaaaaagcaggtgctctgcagagcacaaggcatacaaaataagcttgataaaaataagctcttgttagggatgtcttaaattgatcccttcctttgtccttggcttccttagttcaaccacaaaaccttccgcccttccatattactcaatgtccttcttttagagacaggatcttactctgtcacccaggctgggttgcagtggtgccatcagagcttgctgcagcctccaactcctaggctcaagtgatcttcccaccttagcctcctgagtagctgggaccacaggtgtgcaccatcatgcctggttattattttttaaatttttttgtagcaatgaggtctccctttgttgcccaggctagtctcgaacacctgggctcaagtgttcctcttatcttggcctcccaaagccgtaggattataggtgtgagccaccacgcctggccccacttgatatctaaaaagtaaaatatgctgtggacaacgaggaagccttttttcctactcccctacttctcttccccagcatttcactaccttgaacagtttcatgtgaagaaccaggagtgtctatgcccatgcattctaggctatgaagggtctgagacatcgactcattcaaagatgttgaaaaccgcagcacctggttacccttttggtcattccttttgctgactgtctgagagtctatcacatcaatgtcagatattgacaaaaccatgttgatgcttgagtctagcagcaccttttcttgaaaaatctgatttgaggatgggtggctttggaccccagaggaaacattctcaacctgtatgatgatttcattcacgtggtcatcggacagcatctcctgcctcctgcaagccttcttctccactggggtgggcttcctgagacttcatacagcagtcacacccgcattgattgggactcgcagggaaaaagtgatgatgatcacaaagggatacaccattcacattatttttaaaatgccaggatgagctcaccaaagccacccctacacaaatcacaacataactccctgcatctaacccctgaggagttttctcaggagaaggagtgttttcctgcagagaattctgtcttggtagctaggcaagaaatcgaaaacagaatctttcatttaagacaatgggattctagaaacagaaggaagatatttttctaaatgactcatagtcaaagggcaagatttttttttataatttagtgcctctggcctagaacttatatatatacatatatatatgttctaaatatacatatatatgttctaaatatacatatatatattctaaatgtgtgtatatatatatttttttttttgagatggagtctcgctatgtcacccaggctggagtgcagtggcgcgatctcagctcactgtaacctccacctcccaggttcacgccattctcctgcctcagcctcccaagtagctgggattacaggcgcccgccaccatgcccggctaattttttgtatttttagtagagacggggtttcaccacgttagccaggatggtctcgatctcctgacctcgtgatcctcctgcctcggcctcccaaagtgctgggattacaggcgtgagacacagcacctggctgaacttatattttatatctgtagttttatctgcctgtagaaatccacatgggtttacagtgatacaattattatctcctgatgccttaggtagtggactctgctatttgtctggctctcagtctctaatcttcttctttctcacaccagcaaaagctccatttcctgtgcagacatagtgctcaaagtttcccagtgttctttgcggctaagggtgggcctgtgactcagttttagccaatgagacttgtggcttccaggaatgctctttctaaggggacagtttgcctgggttcacaatttgcccttcaccagtcttcctccagacattttgaaaagaagagaacgaacgttcacctgctaaggatggtagagaaaaaggctgcagaaggggcttcagtccttgagggcatcatgggtggagctgctgtacaaactttgcacttcctccctccatgcttcttgtttttttgctttttaaaaatttttatttatttatttatttagagacagagtctctctctgttgcccaggctggagtacagtggcatgatcttggctcactgcagcctttgcctcctgggttcaggcaattctcctgcctcagcctcctgagtagcctggcaaatttttgtattttttgtagagacgaggtttcaccatgttggccaggctggccttgaactcctgacctcaagtgattcgcctgcctcagcctcccaaagtgctgagattacaggcatgagccaccgcatgtaaaaaaaagtacaaatttttaaacttttttttttagagatgaggtcttgctctgtttcccaggctggagtgcagtagtgtgatcataactcactgcagccttgacctcctgggatcaagtaatcctcctgcttcagcctcctgagtatctgggaccacaggggcaccaccatgcccagctatttgtttttttttaaagacatagggtctcactttgttgtccaggctggtctcgaacccctggtttcaagcaattctcccaccttggcttcccagagtgctgggattacaggtgtgaaccattgcacctaacccacacttctcagtacatgagaaaaataaacccctttattgctaagccacatttctgttccagtgccaggcacataaacacaattcctatccaatagatctaatttcaaatcacctaggcctagttgtttatttaatagttgtagaaattgaggtgcagagagctgaacggacactgttcctcctcatcacactttcattaaatgtcaaaattgaactagaacccatgtattccttctcccaacagtgataattaacagtaatgatacctgccattactgcaggccaagtactttaaatagagcacaacatttacgctatgaagtagatattaaaatcaaccccattttatagctaagaaaactgatgcttcatgaaataatttgtcacaaaaccagcaagcagtaga

SEQ ID NO: 1243441 - DNA, 4001 bp, Homo sapiens
gagtagctgggactacaggtgcatgccaccacacctggctaattttttgtgtttttagtagagacaggatttcaccacgttagccaggatggtctcgatttcctgacctcgtgatctgcccaccacggcctcccaaagtgctgggattacaggtgtgagccactgtgcctggccagccaccggaaagttttatgtaagcaggggagtgatctgttttatcatttagaaggatacatacctcttcttttttttttagagacagggtctagttctgtcacccaggctggagcccagtgtcataatcatagcttactgtaacctcaaactcctgggctcaagtgatcctcctgcctcagcatcccaaagtgctggattacaggcatgagtcaccatgcctggtcacacttctcattctttaaaccagacctcatttgtcgcctcccccatcccccgccccaccccacggactgtcctataatgcccatacaacaggtcactgtttagaaagtgctacaaagttacaaacacagtcccttctgagcctcccaccaatgttggtgggtacaagatcaaaaaaaaaaaaaaaaaactcatctatctaaggggcatagaagactttttagttagagggcccaattatagtcctcctgaaaagatgccaaaagtcccctcatacacttagcaaagatgcaagaaagatgaatctcacattctttgtatgggaaatgaggaacttgacatcttcaatataatggattccactaaaataagatgactattaataggaaccaactaaaaaaatacttgactagctgttattgaaaggctgaaattcagctgacataagcagtattaatattgagctagaaaataattcgcattgaatccaccccaacttttgttttctgatttgggtctcttctaaattttttttttcttctggacattgggaacaatccaatttgaaggcctcaatgaccaaatctacactcatgttttattctatatccttggtttctttttttttttttgaaacagtcttggtctgtcgcccaggctggagtgcagtggcgcaatctcggctcactgcaacctccgcctcccgggttcaagctattctctgcctcagcctcccaagtagctgggattacaagcacccaccaccactcctggctaatttttgtatcttcagtagagatggggtttcaccatcttggccaggctggtcttgaactcctgacctcgtgatccacccgcctcagcctcccaaagtgctgggattacaggcgtgagccaccacgcccggccctacatccttggtttcagtaaatctctattctaaaactgaaaaagagaaaacattgcagataaaactttacagcagggtcttgtgttttgttcaggacaagattcgtaagctccaaatgctacaaggaaccctgcctgagtgctggcaacttttttatcctgactgggcagccgttgtacatatttctgtagaaattcatggagctgtatactttactgtaattctacccgatacaaaagattataatacttggctggctaccatttattgtgactgtctagccacaatgccaggcactgtgctagacacatcacacgattctcagctaatccccgccccattctattcccattttactgctgaaggatctgaggctcagagaaggcaagccacttaccaaaggtcccacagcaataaacagacaaggcagaattcggtttcaagttggtctaactgtatgtgaaggctgaaatgtccgggaggcaggcacctcataccagaatgttaggcgtggagggggtgctcaaatcctttcatttaacagcagatgaggctattgaaagactgtctcggtcaacagctggaagacaaacccaccacggtccagactgcagttctcgtgtccttttggcccggctgggttccactggattggatgaggacgcgtttgtggagggagcaggaataaggaagatctccttcccacctgctgttccccagagccgggagcacccggcgtcgggggtgggagggaacagcggccaggccgagcctccagcacccggctccctccgtgcgccctcggaccccaggggcaccgtccccgcgcgcgctccctgccgccctacctggatggaccgccggctgccggctgggcctgccgggctggagcgcactgccgctggactcgctcatggccgcgccccgcgctcctcagaggctgccgaggaccctctccagccgccgccgccgccgccgcctccccggccttccctcgcggagccgggattccaggttccggcgctgacatcacagaagccggagtggggcgcccccgcgaggagccgagcatcagggaccgcagaggggctgcagagcccgggagatccggcaaggctccatccagcggtggcgacaagcagcgacctccctgatgtctcactgagcttaaaaaataacaatagattgggcgcactgggagcccagtctccaccaggacccggtacacccatgtaacaaacatgcacatggaccccctgcatctaaaatcaaacctgatctaataaagaaataaataacaaaaataactggttgggagtggtggctcacgtctgtaatcctcgcattttgggagtccgaggctggaggaccgcacgaactcacaagtttgagaccaacctggccaacacagtgagacccccatctttaaaattaaaaaataaaaagtccacacgcaaaaaaccccaagactccaaatcagtgcatctagtaagttaccatttgggaacaaaaaggaaaccaaaaaatatatttgtacatgcttgtaaatgcctaagctatctccctagagggtgcaaaaaactggctacctgtggtagctctgggtggggagctagagggccgagtgaagagaaaaccacgtgcagtgtttgtcttttacgttttgcactatatcctcgtttcatctctacctctgttcgtgtgcaggttaaaaacataaaattgccaggcgcagtggctcacacctgtaatctcaccactttgagaggccgaggcgggaggatcacctgaggtcaggagttcgagactatcctggccaacacggtgaaaccctgtctctactaaaaatacaaaattagcctggcatggtagtgcatgcctgtagtcccagctaccagggaggctgaggcaggagaatcgctggaacccaggaggcagaggttgcagtgagccgagatcacgccactgcactccagcctgggcgacagaaggagactccatctcagaaaaaaaaagaaaaagaaaagtaattgctaaatataaataaatggggaaaatggagagaaatctcctgtgcagattttgaaatcatttacgtagatactttaaggatggggagcttagctccctactccttaagtgtgagttgcccatagcgacatccttccaaaagagtgcagtatggaagtggtggtggaagagggtgagggtgggttttatattagataatacctgacaaacactgtctcagacagatgatcaaagttaacatcatccgggatcagtggctcacacctgtaatcccagcactttgggaggccgaggcaggtggatcacttgaggtcaggagttcgagaccagcctggccaacatggcgaaaccctgtctctaccaaaaatacaaaaaaattagctgggcatggtggcgggcgcctgtaatcccagctactagggaggctgaggcaggagaatctcttgaacccaggaggcggaggttgcagtgagtcgagattgcactactgcactccagcctgggcaacagagtaagactccatctcaaaaaaaaaaagtaaataagtaaataagttaacatcaacattaagccatgaggatggtgtgcacccttcctacgatgggatgagaagggcactttacctctgtggtcataagaaaaatatcagacaaattcaact

SEQ ID NO: 1243442 - DNA, 4001 bp, Homo sapiens
cagcatcccaaagtgctggattacaggcatgagtcaccatgcctggtcacacttctcattctttaaaccagacctcatttgtcgcctcccccatcccccgccccaccccacggactgtcctataatgcccatacaacaggtcactgtttagaaagtgctacaaagttacaaacacagtcccttctgagcctcccaccaatgttggtgggtacaagatcaaaaaaaaaaaaaaaaaactcatctatctaaggggcatagaagactttttagttagagggcccaattatagtcctcctgaaaagatgccaaaagtcccctcatacacttagcaaagatgcaagaaagatgaatctcacattctttgtatgggaaatgaggaacttgacatcttcaatataatggattccactaaaataagatgactattaataggaaccaactaaaaaaatacttgactagctgttattgaaaggctgaaattcagctgacataagcagtattaatattgagctagaaaataattcgcattgaatccaccccaacttttgttttctgatttgggtctcttctaaattttttttttcttctggacattgggaacaatccaatttgaaggcctcaatgaccaaatctacactcatgttttattctatatccttggtttctttttttttttttgaaacagtcttggtctgtcgcccaggctggagtgcagtggcgcaatctcggctcactgcaacctccgcctcccgggttcaagctattctctgcctcagcctcccaagtagctgggattacaagcacccaccaccactcctggctaatttttgtatcttcagtagagatggggtttcaccatcttggccaggctggtcttgaactcctgacctcgtgatccacccgcctcagcctcccaaagtgctgggattacaggcgtgagccaccacgcccggccctacatccttggtttcagtaaatctctattctaaaactgaaaaagagaaaacattgcagataaaactttacagcagggtcttgtgttttgttcaggacaagattcgtaagctccaaatgctacaaggaaccctgcctgagtgctggcaacttttttatcctgactgggcagccgttgtacatatttctgtagaaattcatggagctgtatactttactgtaattctacccgatacaaaagattataatacttggctggctaccatttattgtgactgtctagccacaatgccaggcactgtgctagacacatcacacgattctcagctaatccccgccccattctattcccattttactgctgaaggatctgaggctcagagaaggcaagccacttaccaaaggtcccacagcaataaacagacaaggcagaattcggtttcaagttggtctaactgtatgtgaaggctgaaatgtccgggaggcaggcacctcataccagaatgttaggcgtggagggggtgctcaaatcctttcatttaacagcagatgaggctattgaaagactgtctcggtcaacagctggaagacaaacccaccacggtccagactgcagttctcgtgtccttttggcccggctgggttccactggattggatgaggacgcgtttgtggagggagcaggaataaggaagatctccttcccacctgctgttccccagagccgggagcacccggcgtcgggggtgggagggaacagcggccaggccgagcctccagcacccggctccctccgtgcgccctcggaccccaggggcaccgtccccgcgcgcgctccctgccgccctacctggatggaccgccggctgccggctgggcctgccgggctggagcgcactgccgctggactcgctcatggccgcgccccgcgctcctcagaggctgccgaggaccctctccagccgccgccgccgccgccgcctccccggccttccctcgcggagccgggattccaggttccggcgctgacatcacagaagccggagtggggcgcccccgcgaggagccgagcatcagggaccgcagaggggctgcagagcccgggagatccggcaaggctccatccagcggtggcgacaagcagcgacctccctgatgtctcactgagcttaaaaaataacaatagattgggcgcactgggagcccagtctccaccaggacccggtacacccatgtaacaaacatgcacatggaccccctgcatctaaaatcaaacctgatctaataaagaaataaataacaaaaataactggttgggagtggtggctcacgtctgtaatcctcgcattttgggagtccgaggctggaggaccgcacgaactcacaagtttgagaccaacctggccaacacagtgagacccccatctttaaaattaaaaaataaaaagtccacacgcaaaaaaccccaagactccaaatcagtgcatctagtaagttaccatttgggaacaaaaaggaaaccaaaaaatatatttgtacatgcttgtaaatgcctaagctatctccctagagggtgcaaaaaactggctacctgtggtagctctgggtggggagctagagggccgagtgaagagaaaaccacgtgcagtgtttgtcttttacgttttgcactatatcctcgtttcatctctacctctgttcgtgtgcaggttaaaaacataaaattgccaggcgcagtggctcacacctgtaatctcaccactttgagaggccgaggcgggaggatcacctgaggtcaggagttcgagactatcctggccaacacggtgaaaccctgtctctactaaaaatacaaaattagcctggcatggtagtgcatgcctgtagtcccagctaccagggaggctgaggcaggagaatcgctggaacccaggaggcagaggttgcagtgagccgagatcacgccactgcactccagcctgggcgacagaaggagactccatctcagaaaaaaaaagaaaaagaaaagtaattgctaaatataaataaatggggaaaatggagagaaatctcctgtgcagattttgaaatcatttacgtagatactttaaggatggggagcttagctccctactccttaagtgtgagttgcccatagcgacatccttccaaaagagtgcagtatggaagtggtggtggaagagggtgagggtgggttttatattagataatacctgacaaacactgtctcagacagatgatcaaagttaacatcatccgggatcagtggctcacacctgtaatcccagcactttgggaggccgaggcaggtggatcacttgaggtcaggagttcgagaccagcctggccaacatggcgaaaccctgtctctaccaaaaatacaaaaaaattagctgggcatggtggcgggcgcctgtaatcccagctactagggaggctgaggcaggagaatctcttgaacccaggaggcggaggttgcagtgagtcgagattgcactactgcactccagcctgggcaacagagtaagactccatctcaaaaaaaaaaagtaaataagtaaataagttaacatcaacattaagccatgaggatggtgtgcacccttcctacgatgggatgagaagggcactttacctctgtggtcataagaaaaatatcagacaaattcaactgaggggcattctacagaatacctgattagtattcctcaaaactgtcaaggtcatttaaaaaaaaaaaaaaaggaggctggagactgggtgtggtggctcatgcctgtaatcccagcactttgggaggccaaggcaggtggatcgcaaggtcaggagttcgagaccagcctggccaagatggtgaaaccctgtctctactaaaaaaaatacaaaaaattagctgtgtatggtggtgggcacctgtaaccccagctactcaggaggctgaggcagagaattgcttgaacccaggaagcggagcttgcagtgagccgagattgtgccactgcactccagcctgagcaacagagtga

SEQ ID NO: 1243443 - DNA, 4001 bp, Homo sapiens
ctgaggtatcacagtgatggtgttaaggggaggcagcacagcattgctgaacgtctgcaatgtaagaaacagtacagcaggacaaagaactgcccagaatgccaacagcacccgtgtgaagaagacatgccttgctcggaacacacagctagtgtggatccactaaaatgtatgattctgggccgggcgcggtggctcacgcctgtaatcccagcactttgggaggccgaggtgggcagattacaaggtcaggagttcgagaccagcctggctaacatggtgaaaccctgtctctacttaaaaaatacaaaaattagcctggcatggtggcgtgcgcctataatcccagctactttggaggctgaggcaggagaattgcttgaacccgggaggcagggattgcagtgactcgagatcatgccactgcactccagcctgagcgacagagcaacactctgtcaaaaaaaaaaaaaaaaaagtacgattctggctgtagaattttttattttttttgagacggagtcttgctctgtcacccaggctggagtgcagtgatcttggctcactgcaacctccacctcccaggttcaagcgattctcctgcctcagccacccaagtagctgggattacaggcacatgccaccaagcccggctaatttttgtatttttagtagagatgcgttttcaccatattggccaaggtggtctcgaactcctgacctcaggtgatccgcctgcctcagcctcccaaagtgctgggatgacagatgtgagccaccgcacccggcctggctgtagagttcttgaatgaacttgcttggtggttgagctccccaatgatgtcccagatttgggcatttgctgcttggcagtgcacacctacaacaagcactccatggacacttgctcccaagctagatcttgattaggccaggccacagtgagcttagtagtggctgctgttctaatagaaattcagaggtaagaaaagtctctgataagtttatttaaaataaatgttgttacagtggagtaagatcaacaaagtctattactatgtaaacaaaaattagaaagttaaccgatttctaagataaagaacaaaggaaatgaacagcctctaactttcatactgagttcaccatccttggacagcatgatataagaccatagtatgggtaaaagtacttgacctttgaataagtaacttgaaaacacttaccgtcctaaaaaaaaaaaataggattaactggccgaatacaaaaaacttgacctagtgaatctctgacttgccagaattgctcctaaaggcagcagaacctttactcccccaccccataagctgaagcagccttctttgaaatctctggatcagtctccaaagcaccattatccaattttgttttaatatattaaaaatgtattctctcccctctcatccccaaatccgagtacatgtaatgattacctcttcagggagaggcaccccgtctgccccatggctttgagcatggcccctgatgtaagaagccaaaccatatgttttagctcctgttggtgattattcacccagctggagtttccctctaactgcaggtccatttcattaacaggtggggaatcacagcataataaagacaaccagaccttgttttggcctaaaacctgacccactttatgagtaaaggagaaaaaaaaaagccccccagtatggccagtcacccacatacctcgtaactgaaatagaagtatccagtctggtgggcaaattgccaaaagcattccgtgcctcctggaggtatcatgatggcaaagtcatatcgatcagctccacggaagagtggctggtccccagagccacttagaggttctgtcttctggctcctggcagacgtcactagattcagaacgaccagcccagccccaaagagcaaaggggacatgccgctttctggagcctcctctgcaggtgaactgctcgcagcccagggaaatcaagtcgttcagacaaccgctgggctaatgattaactccacaagtcacattacggcccatttcagggccacacatagatattcatcatagaactgccatgatactcccatgtttggctcgcaggaggaaattttgctttcacctcaaaaactcagtggcttaccaaacctacttcatgggtgctacatagaatctaccacctcagaagaggtctttccacccttcattagggctgtcattttttagttcctgcttcttggggatataatagtgggtaagtttacaacttctgaatacactgacaaaaagttggctggggggattgttctcttacatcaaattgctcctataaacacatggggcaacacttctctctccccaatgctgcagctcagagcaaatcacagcatgtgtgtgcaaagatgtaaatggatgaatacagtgccagaggatggtgcttagacccctccactgacagtcctcgtcctgatgcctttcacctaacggtcacctaaagctatccaaacccactgaaagacaattatattatccaaagcctcaatctttttttttttttttttttttttttctgagatggagcgtagctttgtcacccaggctggagtgcagtggcacgatctctgctcgctgcaacctccacctccccggttcaagcgattctcctgcctcagcctcctgagtagctggaattacaggtgcctgccaccatgcccggctaatttttgaatttttagtagagacagggttttactatgttggccaggctggtctcgaactcctgacctcaagtaatccacccgcctcggcctcccagaatgctgggattacaggcatgagccaccacgcccagccttgatctttcttttattcaggacttcttcagcacccatgggggaaaaaactatccagaacccacttaaagacaattatattattcacatccttaatctttattcttttattcatgatttcaacacccacctccttcatggcaggcactgagctaagatttacctgcatcttattttattctcacaatagccctgcaagggaggtattgtgagctctggcattagagatgaggacacagacattcagagattccagtggtggctcacgctcccacaagcacacctggcagagctgggtccccggtgggggctcatgctcttaaccaccaggcaggacagtgtttctcattctcaagctgtcagtctctgagttctgacactgcctaaccatttttcagtcctaatcttttttttttttttttttttttgcttccttgagatggtatcactctgtcttccaggctggagtgcagtggcacaaacatagctcactgcagcctcacccccttgggctcaaacgatcctcccacctcagcctcccaagtagctggacccacaggagtgcaccaccacacctggctgatttttgtattgtttgtagagatgaggttttgccatgttgcctaggctggtctcaaactcctgggctcaagtgatccccatgctttggcctcctgaagtgctaggattacaggtgtgagccaccgtgcctagccttagtcataatcttaaaaaacaaaaaacaaaacagcattaacaccttccagcaattatttgcattgactcaaagtgtcacaagctaagtaggcagaaaacagactctatacatggggttcagttctagcaaaggccaaatgacagcacagcactctgggagcacagtggctctatggcagtcttgctcaagtgacagaagagtctgggaacttctatcagcacacgtggcacaggcatcccccacccgagtcccaccaccgtcgcagtcctagcactggtcatgccataagcagtgacttggtttcggcgaaacaatcgtcagttcatagtaagttttatagttctacagaagctgtaagcatagttttatctttgcacacatttcaataactataataaaaacaacactgaattat

SEQ ID NO: 1243444 - DNA, 4001 bp, Homo sapiens
tctctgggtagggttgagtggagggagaaggccaggcacagtggctcacacctgaaatcccaagactttgggaggccaaggcaggaacatcacttgacccaggagttcaagaccagcctgggaaacatagtaactatgtttcctatcactattaaaaaaaaactgataccaatgcagtggctcacacctgtaatcccagcactttggaaggctgagatgggcagatcacttgaggtcaggagttcgagaccagcctggctaacattgtgaaactccatttgtactagaaatatgaaaaattagcccgacgtggaggcaggcacctgtagtttcagctactcaggaggctgagacaggagaatcgcttgaacctgggaggaggaggttgcagtgagccaagattatgccactgtactccagcctgggcaacagagcaagaccctgtctcaaaaaaaaaaaaaaaacctgcccacattttcaaagtctatgaaactcagtcttcatttcctcatcagatcctcctacagaacctctctgggcctcctcattggaaaaatgaaggcagaaatgacgatactaataacttcatagggtgtggctgtgggaatcaaatgaagacatagatgaaaagcagttcgctccacgtctggcttatctcaagcctcaatgaattgaactgttaggtttatttccctccctccacaaatgctcattcatcccatttcctttcttgctttcagtcctcacaacttttactgagttccaggcactgagctgggtactaagaaccaaccaggaataagagggacgcagtggacctgagaggaggggctgttcccacctcctaattgcctggctccaatcatatatttatatgcaaatttctatcgcaccccactactgcaaagcccttgttctaggcaatgtgaatacaaacaacgctggcatggaatctgtggaatgagacctctctttcaccattcacctcccgaggctaatttaggtccctgcaggggcttcccaccttcccttcctcacgctgctggactctaactgcgcgtctccacatttgtcccagcaccactgtgagccccttgaggggatggcctgtgtcttaaccatccatcaaaacggtgcaaagaaagccattagtcaacgtgagctgaatgaaccctaaaccacaaaacgttacaggtggatcaggagagaccctgccccccggtcttaagcccactccattctcaggctgggctgtcagaggccaccccagccgccctctccgcaggccccgaagcccggctgttttgggaaaggctccagaactcacggctaggaccggggcgctccctccatcctcaccctccccggactcactgagaagttgccggctcgattcgctgactgtcacgttctccagcctgaaggggttcatcagcggtgtgcacgggctctgcactggataggacggaggaatccatgggtgcaggaccccggagttctgtgcagcaccctcgtctgcggctttgcccccatgctcaccctaagtgccccacccggggagggcgcggggagagctagagcagttgggatcgcagccgggtgcctctcggaagggttttcgcagtcccggccttctgctcaccttccccccgagtccctagacattgtattttagggacttgggggaggagtgcgcgccaagcaacaggtcccaagggagcagggcaccgcgcagggggcgttcgcagccacagctcccagccacggggtgcacccttaccccggcaggtccgccagaggccggagtgggagctcagaggctcgggctggctgcgattgatggaccccagcaggtcctgcgcccccgggccagtcctctccagccgctcggtgtcaatgatataccagaagtccgtgccgatggcggccgccaggagcacaaagctgagcgccccggtcagcgcagccgcgccggccagcccgcccaggtgcacccgcatcgccgagcccaggaccagcagccgcgggttccagtggccgcggcgcgacccctctgctcctgcccccgtccccagccggccaccgcgggctcccagctccaccgccgccagagccgcggagctcagatctgaaagcctttcctttggaccccgggccctagcttagaccctggctcctcacctgccggctccgacctgcacgcgccccccgctcagccgccgtccacgttcccacccctccaatgccagctctacctgcagaccccctcactctcacttgtgctgtccgacctccacctccgccttcagaccctcctggaagctctagtccttccccaccagcaccttaacccacctcgtccctcagccccactccaccctcggccctccacgcccagcccaagcggactctctcacttcaaaatcctcactttccccagactcctactccctccattcccctgcctcactctccacgaaccctccccacgatcccagatgctcccctctctgcctctgtctctggatttccgccccagccctttttcttggccccacactgccagatccccactcccagccctgctctccagggtcttcccgcagctcctgctctggccggggcgcagctgaccctctgagccctcctcctcgccgaggaaaagctcggagtgcgcacgcagcatggacgggggcggtccccagccctggagcgctggaggctgccggtgtggaagggcaggcggccttgggaccacctggggcagaaagaaggaggggtgtggcgggcctcacagtcccgccaggatttgcaaatcatctccaagagcccctccagctccaagtacccttcctccaaaatccaccttcgagtgtagtctgggctgactagaatgtgaaaaggcacattaatttttcataaaagttctctaaagcactgaggtagtccaggtcctcagaatctatcatttctacccccaaagtctttcttcattatcatagccaccagcattgccaccatcatcaccaccaccaccatcaccatcatcaacatcaccaccaacaacaacacaatcatcactaccatcaccatcatcatcaccaccatcaccagcagcagcatcaccaacagcaccaccatcaccatcatcatcatcaccaacaacaacaccgtcatcactaccatcaccatcatcatcatcaccaccatcatcaccagcagcagcatcaccaacaccaccaccatcaccatcatcatcatcaccaccaccaccatcaccatcaccacggacaacaccaccatcaccaccatcaccatcatcaccaccaacaccgccatcatcactaccatcaccacatcatcttcaccaccatcaccaccaccaccaccaccatcaccaccatcaccaccaccaccatcatcgctatcaccaccattgccatcgtcatcaccatcatcatcaccaccaccatcaccaccaccaccaccatcaccatcaccatggacaacaccaccatcaccaccatcaccatcaccaccaccatcaccaccaccatcaccatcaccacagacaacaccaccatcaccaccatcaccaccaccaccaccatcaccaccatcaccaccatcaccaccaccaccatcatcactatcaccaccattgccatcgtcatcaccatcatcatcaccaccaccatcaccaccaaccaccaccatcaccaccaaccattaccaccaccatcatcaccaccatcaccatcatcatcaccaccatcatcaccaccattaccactatcaccaccatcatcatcaccaccatcatcaccaccattaccactatcaccaccacggtcattaccatcaccaccaccatgaccatcaccatcatcatcactaccaccaccagcaccagcaccactctcctctttatcatcaccatcactcttatcaattccaccatcttcttcaccaccataaaaccttttactccttcaagaaat

SEQ ID NO: 1243445 - DNA, 4001 bp, Homo sapiens
ggagaatcgcttgaacctgggaggaggaggttgcagtgagccaagattatgccactgtactccagcctgggcaacagagcaagaccctgtctcaaaaaaaaaaaaaaaacctgcccacattttcaaagtctatgaaactcagtcttcatttcctcatcagatcctcctacagaacctctctgggcctcctcattggaaaaatgaaggcagaaatgacgatactaataacttcatagggtgtggctgtgggaatcaaatgaagacatagatgaaaagcagttcgctccacgtctggcttatctcaagcctcaatgaattgaactgttaggtttatttccctccctccacaaatgctcattcatcccatttcctttcttgctttcagtcctcacaacttttactgagttccaggcactgagctgggtactaagaaccaaccaggaataagagggacgcagtggacctgagaggaggggctgttcccacctcctaattgcctggctccaatcatatatttatatgcaaatttctatcgcaccccactactgcaaagcccttgttctaggcaatgtgaatacaaacaacgctggcatggaatctgtggaatgagacctctctttcaccattcacctcccgaggctaatttaggtccctgcaggggcttcccaccttcccttcctcacgctgctggactctaactgcgcgtctccacatttgtcccagcaccactgtgagccccttgaggggatggcctgtgtcttaaccatccatcaaaacggtgcaaagaaagccattagtcaacgtgagctgaatgaaccctaaaccacaaaacgttacaggtggatcaggagagaccctgccccccggtcttaagcccactccattctcaggctgggctgtcagaggccaccccagccgccctctccgcaggccccgaagcccggctgttttgggaaaggctccagaactcacggctaggaccggggcgctccctccatcctcaccctccccggactcactgagaagttgccggctcgattcgctgactgtcacgttctccagcctgaaggggttcatcagcggtgtgcacgggctctgcactggataggacggaggaatccatgggtgcaggaccccggagttctgtgcagcaccctcgtctgcggctttgcccccatgctcaccctaagtgccccacccggggagggcgcggggagagctagagcagttgggatcgcagccgggtgcctctcggaagggttttcgcagtcccggccttctgctcaccttccccccgagtccctagacattgtattttagggacttgggggaggagtgcgcgccaagcaacaggtcccaagggagcagggcaccgcgcagggggcgttcgcagccacagctcccagccacggggtgcacccttaccccggcaggtccgccagaggccggagtgggagctcagaggctcgggctggctgcgattgatggaccccagcaggtcctgcgcccccgggccagtcctctccagccgctcggtgtcaatgatataccagaagtccgtgccgatggcggccgccaggagcacaaagctgagcgccccggtcagcgcagccgcgccggccagcccgcccaggtgcacccgcatcgccgagcccaggaccagcagccgcgggttccagtggccgcggcgcgacccctctgctcctgcccccgtccccagccggccaccgcgggctcccagctccaccgccgccagagccgcggagctcagatctgaaagcctttcctttggaccccgggccctagcttagaccctggctcctcacctgccggctccgacctgcacgcgccccccgctcagccgccgtccacgttcccacccctccaatgccagctctacctgcagaccccctcactctcacttgtgctgtccgacctccacctccgccttcagaccctcctggaagctctagtccttccccaccagcaccttaacccacctcgtccctcagccccactccaccctcggccctccacgcccagcccaagcggactctctcacttcaaaatcctcactttccccagactcctactccctccattcccctgcctcactctccacgaaccctccccacgatcccagatgctcccctctctgcctctgtctctggatttccgccccagccctttttcttggccccacactgccagatccccactcccagccctgctctccagggtcttcccgcagctcctgctctggccggggcgcagctgaccctctgagccctcctcctcgccgaggaaaagctcggagtgcgcacgcagcatggacgggggcggtccccagccctggagcgctggaggctgccggtgtggaagggcaggcggccttgggaccacctggggcagaaagaaggaggggtgtggcgggcctcacagtcccgccaggatttgcaaatcatctccaagagcccctccagctccaagtacccttcctccaaaatccaccttcgagtgtagtctgggctgactagaatgtgaaaaggcacattaatttttcataaaagttctctaaagcactgaggtagtccaggtcctcagaatctatcatttctacccccaaagtctttcttcattatcatagccaccagcattgccaccatcatcaccaccaccaccatcaccatcatcaacatcaccaccaacaacaacacaatcatcactaccatcaccatcatcatcaccaccatcaccagcagcagcatcaccaacagcaccaccatcaccatcatcatcatcaccaacaacaacaccgtcatcactaccatcaccatcatcatcatcaccaccatcatcaccagcagcagcatcaccaacaccaccaccatcaccatcatcatcatcaccaccaccaccatcaccatcaccacggacaacaccaccatcaccaccatcaccatcatcaccaccaacaccgccatcatcactaccatcaccacatcatcttcaccaccatcaccaccaccaccaccaccatcaccaccatcaccaccaccaccatcatcgctatcaccaccattgccatcgtcatcaccatcatcatcaccaccaccatcaccaccaccaccaccatcaccatcaccatggacaacaccaccatcaccaccatcaccatcaccaccaccatcaccaccaccatcaccatcaccacagacaacaccaccatcaccaccatcaccaccaccaccaccatcaccaccatcaccaccatcaccaccaccaccatcatcactatcaccaccattgccatcgtcatcaccatcatcatcaccaccaccatcaccaccaaccaccaccatcaccaccaaccattaccaccaccatcatcaccaccatcaccatcatcatcaccaccatcatcaccaccattaccactatcaccaccatcatcatcaccaccatcatcaccaccattaccactatcaccaccacggtcattaccatcaccaccaccatgaccatcaccatcatcatcactaccaccaccagcaccagcaccactctcctctttatcatcaccatcactcttatcaattccaccatcttcttcaccaccataaaaccttttactccttcaagaaatacttccggtaccttctatgtgtctgatgctatagtctatgttaagaatataggcatgaacaatccaaaaacaagtcctgcccttaagaaatataggattcaggcttcccagacttttacaaagtaggggacacagagaaaatacctatatttgcatggctcattaacagaagaggcttccagatactggggatgaccaatcctcaggagttacagctactaaagacccctcaatgctgaccttatggctgaggaatcaaaatcttggcactcctgtgatccattcgtaagggaccattgtatcaaggtccaaaagttggtaagtgctggtcaggttggaagagaatcatcaaagc

SEQ ID NO: 1243446 - DNA, 4001 bp, Homo sapiens
tggaattttgaggggtgtcccaatctcatacaatttttacttatttttaataaaggcaattggttaaattagatatattttttaacccttgttgagttttcaaatataaaaaaaaaatcattcttattttatatttcccagaactggctggacacagagatatcttttccatttctccctttaaactgacctgacctacagtacaaatgcttaaaagattgtgtccacgtggccaaaattaattgagagatcctcacatttatttatcatatagggggtaattttatctactactaagctgtacagggtctagtatgcaaattaaagcacattttaatcatcccagctagacatcctctgctacttcccttttgtaaaacaagaaaccctttggaggggaaagttgaggaggggactaatcccaccaccccacattctctctttgaagctgcctctggcgtaggtcttgaacttgggatgttcccagcactcagttcccataatctcatctctgcagcaagcagaaacaagcggagttccccttacaggtctcctttggcctgggagcctcaagtgccacccagaccggtttggggagtccgatgagagagtgcgtggggcgaatgccatcggccacagccttcaaatgcgtctacctggccaccaattcccagaccccctggtcactcactcctcggaggggcctccccaggcacggagctgtctcccgagaagggaaagcgagaacccggcgcggccaaggagtgccccgccttcttcacgcctgggggactgggccaggccaacaccagctaaccctttccccttccaaggctccaaataaatctcctggccctcccacccccgaacctccaggggaaaacggctacctcgaaagttcaagctgggaggaggggtcacatctctggttgggggatgggagctacagggcgcctcgagctcacactggccgcccctccccatccgggcccagcctttcagcgttcaaaagccagggagacccaaggagaggaggaagggagtgaaatgcaggtggagagggggtccgcgtcccagaaggcacagagactgaataatgggaactcagaggggagtcgagtacttagttattaatttgggggtaaagaagccccctttgatacttgcagatctctctgcagcgatggggaaggggacctcggtggagaagaggggctgggtggtgaggaaggcgcccgttttcaataatcctagggaggtttgcctcgacgtcttccccaggttccccagaaaggggcacagtctcggggtgtggtggtgctagctaccattttacctaatctagtggtagtgtgtgtgtgtatgtgtgtgtgtgttggggggtggcggggtgagtgtgcatttaggggtggggaggaatcgtgtctcctcgtgcgctcccagccccgtcccggcgactcataagcaggagacgccccttacactaaccccggggcagaaagctacgggcgtgggaccccgatagcgcgctcacgccgtcgcccccgcgctcctcctctgtccccgcccggcgagaggggtctagccacccggggcacccggacccccacccccaagctccgagctctcacctgctcctgaccgccgagcagcccccaccgcgtttgcaggcgaagcgaagagaggcaggaggaggaacaagaggaagaaggaaagagcgtcccgagagggagccagagccgcctgcctccgccccctggcccgggcaccgcccctcggctcttctcctctgggctcgccccgcccgtggccggaaggatccggcaaaggcgcgccaaggcccggcgcccaaggctttgcaaagcgcgctcgctcccactggctttcggagccactagaacaagccctgagaggttgacagctgaggaaactgaggctcagagagtgtcccttcccacacgactggcttggagtgagaaagctcagaccaccttcaagacaggcagactggcagccgagaatgagttttccaagggtgtcagggtttcccctcctgtatgcctaaaaccagctgctctggaacgtctctggcgctcaagacacacacgtgatgaagtatcaccctggctggaagtttttaaccatgactgctcaaatgcgaatgtcataagccagtgagatcctttcagatggattggatgtccattttacacatgaaaaagtccaggctgagagagacaagataaatcaatccaaattcctcggtttgcatggatccaagtcggagcaggagcccctgtttcccctggccccaaatctgccctatagagtaaggtttctgaatagtatgctattgacatttggggcggaataattctgtttctgagctgtggattgtagaatgtttagcaatatcctagcctctacccattagatgccagttacaagaaccgcccccccccacctccagttgtgtctcaaaatattgccaaatgtcccctggaaggccccatcgtcccgaggtgagaaccactgctatagagcatgatggcaacttactgtgtgactaagtaacctctctgaaccatggcttcaaccataaattagagagagggataagcccaaccattggtctgctgttgcacagttctcagccactttccagacagggacctgtgttgaccgacctctcctctttgcctgtggccatagcaacctggaaaataagtctttagataacaaaaagctggcagggtgcggtggctcacacctataatcccagcactttgggaggctgaggtgggcagatcacttgaggccaggagttccagaccagcctggccaacatggtgaaaccccatctctactaaaaatataaaaactagccaggcatggtggtgcgcacctgtaatcccagctactcgggaggctgaggcagaagtatcgcttgaacctgggaagtagaagttgcagtgaagacactgcactccagcctgggcaacagagtgagaccctgtctcaaaaaaaaaaaaaaaaaaaaagaagcaatcacagggttgtagtgaggactggtgcaatagtgtggctgtggctgtcgagaacttagcacctattgaggcacagagtaggggctcaaaaatatttgcttgggatgatgatttatgatgatgatcacgacaatgatatgataaaccacagaatcctgctgtaattccacaatagcagaaagaagagctaatggtggggataggacagacaagaatccctaaattcttaagttttagccaatcttgtctggcgtcatgcactttgttcagctgcaaaatgctgggttccccacccaggaaaagattgtgtgtgtgtgtgtgtgtgtgtgtgtgtttccttagattacagccttccaatcatcattccctaaatggaagttgctttggaaagctgagttagggtttccactgggatttttgtttaagagtgccatctaggggcgtctctgtgaatcttcaaattccttccacctctggcatttttggctgggccagcagagttttgcttgtctttgtgtgatagatgcttcctccatcacatcatgtgttcctccagggctgggatcctagcatctctccatagcatcaggacttggccctcaaggaacatgcagtggttgggttaaaaaaatccacgcgcagcctctcctatgctttcccaattacttgctgcaatggactgaatgtctgttcctctaaaatcctaacccccaatgtgatgggattaggcatggggtttttgggaggtgattaggtcatgaaggtgaagccctcctaaatgggattagtgcccttataaaagagatcccagtggctcacacctataatcccaccactttgggaggccaaggtgggtggattgcttgagtctaggagttcgagaccagcctgggcaacatggcgaaacctcttctctactaaaaatacaaaagttagccgggcatagtggcacat

SEQ ID NO: 1243447 - DNA, 4001 bp, Homo sapiens
ttcaaacaaggaagtaactgttttagctaaatgaaactaaagagacggacaacttaatgcaatgtgtgaaccttagatcatggaatatatatatttttttaaggaaaaaaatctatgtggacaattggggaaatgtaaacaaggcccacacattaggtaacattattctatgatgttcagtttcttggatgtgatatggtttcatggatagaaaatggtttttagaagatacatgttaagattatcaggcatcaagcaagtgttatgacttctgcaacttcctattgaatgactcgagttgaaatgggacatgtgacctacatctaagtgtgatacgtatgtaatacatgtggttatatatatagagagagagaaagagagcagagagagagaaagagaaacagaaagccaaagaatcaaaatattactgagtctaagtaaagggtacatgggtatttgttatactgttctctcaactgtttggcaggcttgacatttttcaggaaaggggaaaattaaggaaacaaagattaatctggtcccagtagtgcctccagattgcacgaacatttcatgtatcacacagggtcaccagaataccatcaattttttgatatcactgtcaaaagtgatcctagcaccttctgaaataacgtgagctgccagattctcatttcaggaatgaccacaagcgaacatctgcatctgaccccaacctgcctgatgaccttacccgctacttcacaatcccgtccgggaaaatccctgggcacataacactgcaagtcccaggtgtccgctgaacggcgcctggcagtcgctgcccaggggatgagaaatcacaggtgccttgtttggaactagagtctggaatctcgtcctccttccctctgctctggtccctcattgtttatgaagacctcagtcccctctgctgggagccccacctccccttccagggccacgggctctagtcttcttgcctttcaaggaccacacaaataactgtgcctcccctcaaagcttttctcctccttcccaagtgaagtcctctctcctccctccagctttcagggcacggagcgctcttcctggcattagaattctgagcaaccctcctagcaggcccagctcaagccgcagcggggaggaagagttcaaaggaagctgtgccaaagatctcgaaggcttagtgggagacccagcaacaggtggcaccaggtctgggaaagattcctagaaagcggagcgggtctcggagggggaggatttagccccaggcgcccgcgatcagcgaacgagcgcctgcgcggaggggccgggctgcagccccggggcaaggggagcgcgagctctgactcctcagcgcggccgggccgctccgagacccctcgaaggaggccgggcgccgtggggcaacccaggcagggcggggaccacagcctcccgggctcgtggggtgcagctctgaacctgaggcgctcggaagctcaaggccaagacccgctcgggtggcggccgagcgccctccagccccgggcccacctgcggccgctctctgcatctcacgcccagcgggactccggggctccgcctcagggaccgccgaagaagtgatggggaaaggggctccgggcgagcagcacggcccccctcccggaggacagcgcccacgccgccagcaggctgcgcacccgggaccccgcccagactcggggcgcccacagcacggcagcggcgacggcggggcgcgcagtgcgcaggcgcggggcgggccgtacctgggaaggagcagagggaagtagagttggggcacagggtcccgttgcccacccgcggcacaaccttcaggctcaggatctgctgcaggagcccggccgacccgccgctgccgccgctcccctcgcgctccatcccgtcgccattcaccacagagaaatgagggacgagcgcccgaagtgcggtagcggccggcgccgactcaccctcgccgcctcagcgtcacctccagccggggtcctcttcccccaatcccaacggcgctgccaagtgaccgttgcctcctccaatcacaaggcgccgcagcgctcgggcgcagggccagggttgttcccgcccccaacgttgcgcagggctcgcagagacacagccccacggacgcgccccctcctggacggcgcgctctgggaccgcgcgctctgctctgcccttctctgcagcgccccctgtgagaaagtagggaattgcatgcgccccaacagagccgcgctatggagttaccagggatctggaaaaatacagtgatggaacggatatgtaaagttctagttatgactggactccagcatttatgaaaccttcatgaacagaacaagaacgttctctatttaaagctgatagtagaaagagcccatgcaaagtctggtgtgggaccagaatgggagggaggctatgtagcctctatagagctcgacttagttttaaataaaataaaatgtacagagattcggttcagagcaataaaattagatcacacttttttcttttttttgagacggagtctccctctgtgacccaggctggagtgcggccgcgcgatctctgctcactgcaagctctgcctcccgggttcacaccattctcctgcctcagcctcccgagtagctgggactacaggcgcccgccaccacgcccggctaattttttgtatttttagtagaggcgggatttcatcgtgttagccaggatggtctcgatttcctgtcctcgtggatcacacatttttgtctcacctcccttcagaaagcctgttaaaatgaaggcagagaaatcgtaaaaaggaataagctaatgttcagtttgtttgcactgctgtaacaaagtacctgagagtgggcaatttattaagaacagaaatttattttctcacagttctggaagctgggaggtccaagatcaaggtcgcagcaggttccatgtctaaggacggcccgttcctcactgatagcaccgcccgggcgtcctcacacggtaacaaagggagcccactctccaaatcccttttataagggtcctaatcccataacgggggctccactcttctgacttaatcgtctcctaaaggcccctcctctcagtactatcgcattcccacgaagtttcaggacatgaatttgggggaacacgttcagaccatagcagccattaacaatagtgttctggaagggaagttaccaaggataagtaatgtccacaaggttccaggtgatgaagaggcttgtgacgaataataatgtttttgtttggttggttggtttgttttgagacagagtctcactttgttgcccaggctggagtgcagtggcgaaatctcagctcaccgcaacctccgcctccctggttcaagcgattctcctgcctcagcctccccagtagctgggattccaggcgcgtgccaccaggcccagctaatttttgtattttgagtagagatagggttttgccatgttatccatgttggtctcgttcctgacctcaagcgatccacctgccttggcctcccaaagtgctgggattacaggcgtgagccactgcacctgactggtaaattttttttttttttttttttttttttttttttttttgagacgcagtctttttctgtcgtccaggctggagtggagtggagtgtagtggcgcaatctcggctcactgcaaccttcgcctcccgggttcaagcaattctcctgcctcagcctcccaagtagctgggattatagctccgtgccaccatgcccaggtaatttttgtatttttagcagagatggaatttcaccatattggtcaggtttgtctcaaactcctgacgtcaggtgatccatctaccttggcctcccaaagtgctgggattacaggcgtgagccaccgtgcccagcctgaaaacttctttaaaaatcattgaattgtacagttaaaataaatgaattttatgctacataaat

SEQ ID NO: 1243448 - DNA, 4001 bp, Homo sapiens
caatggactctatgggtgaccttggcataggttcttctaagaactggctcttaacaaaaacttctggccattatctgactgaatgtcacaaacaagtgctgtaagaacttgcttagagcctttttcctaaacctgtacaccagctcttgccttgtgaatttattcaccacaaaacacatgttcccaggggcccaggcaaagtctccaagtacccagtcccctttcttcagccttgcccacaccctcagccttcctgttaatccaggcgacccagggttacccagaggtccaggtcccagttgttcacttgagcatctgatgtaccccaaacacctgtgtgaaacgctctctgtccaggatgcgtccatagcgcagggtgacgtagaaggtctgtttcccactgtaccgctggatacgcacaaacatctcctgaggccggtccttggtttctgtcaggggaatcacatctgccatgggacagtatgtgtcctgccgccagccccagaagttcagatgggccacccgcagcatggtgccagactcattcagatacaggataccaaccagtctccgtaagaaatagctcatccagcacagcatggtcagggcaaagcccgatatcccactcatgaggcacacggtgttgagagtgaggaggccctgggagtacaagtaatagcctggtggcaaagctaccactgtcagggcagtctgtgccaacttcagtcgtgacaggaacccgaaggttctgatggcatcaaaacggtaaaacatccagaatttctcagtctctgcgtttggtagtttctccttcgagatgggtgaactgctgcccacccacctcttaggatcctcctgcccactgcagcaccacagcccatggagaggcctttcccacacagcttttccccgaaacctacgcacagctcggagaagggcagcctgaaagggagacagtagaccatttctctcatggaactcaaccacattaatcacacggtgaacatctgcaaagcaccatactctaaggcttctgccaatcctgcaaggtaaccgttattgccagacgagggaagggtaaagccagatgctatctcatgtgggcatcacaacagctatctaagatagttatcactatttccactttaccactagggaaactaagcccagagagggtaagatatttaccaaagatcacacagtcagtgagtgcagcagagtcctccttccaccaggcaattccaaataaatacaggaaaggaggtgcggccgtcattaattcaaaacatatccagggaggacaaactctgggctggacaatgtatccacaagggggtgtgaacatttccccaagcaggaaactaaataatcagtgtcttagtggggaactcgagcaacaaatctgtgagatatttattccaataaactttctaattctctgtttgattcatatgctatcttgggtgctggagggaactgctgctttctcttagcctagtctggggaaggggaaacagcggagaaggagaaggagcgaggcagggaggccccaacacgtagcacaagggtattactaggtgggtagtgaagcagtaaaagctcttattccaattctggctccaacagtaatttgtgagcaaattactccacacccctgagattcggtttcttcgcctttcaaaatggggactcagaacacagtgaaccagaggatggtttcagagtcctcaacttagtacctaatgcactgtgagagctcggcgagttttagctactactactgtgcgcatgtgacccaaggagggcaagagaaagcccgggaaaagcgaactgtaacacacgccagagcttcctcccacggatcctcggagtccgaaacccgagcgtcgggcctgcccgccccagccctgaccccgaccccaaagagcatcaccccctcaaggctcgccacccgcctccttaccatggccccaccacctgctgccggaagtaaatcccaccggcccccggaacccctaagagcgcatgctcgaatgtacaaggcgggcgtgatctgcgttgcaccctgggagttgcggtccaggaatcgtggctgccgctactcccaggcgttatgggaacggagtcccctcctcttcccgacgtgccctgcgactcagcggccgaacccggaagttccgggccgagttcctcgtgccaacgtgtcttgtaaggtgcggctagaaactggggacatggcagcgcctggcccagcgctctgcctcttcgacgtggatgggaccctcaccgccccgcggcaggtaagtggcggccggcgggctgctggcagccgacgcggagcccgtgctgttcccagttggggctatcgaccacccagggtaggcgccaaggggtggctaaggaccgcctacgtcctcacggcgctgaaccctattctgggtgcactggaggaatgagagggaggccctaaccagctcttgaagagctctggtgcttggaaagatgagacggggctgaagaactcttaagagcaggaaacttgtgctaggttggaaaatgtaatctggactcaccgctagtgctcgggactgatagaccaggatttcaacccaagatcaggcccccttatcagctatgtgtcggccccaatcctgtaaccaatgggctgtgccgtgagtcatgatattaaaaacaggtttccaggtcaaaccgacctagtggagtctcatcttcacctcttgacatctgtgtgaccttcagcgagtcattaacctctctgagcctcaacatctacagctttaaatggggatgttacctgttccatatggtgtctgtgaggatcaaatgagattgtgtaagttcttgaaagtatgttggacacaacacactaggcctcagtaaatagtagccacctccaccacacccatctccagcccctgcaatggactagggagatggaggagccctaggttattacaggctgcccgctgagagcctctttgggcccttggaaacttgctttccactttcagattttgctgctacaggcacagataagtttcagttacgatcagccttgaggtgaggctctcctggccccttttcagaaattggccactgaacactggccatttcaacttgagactggaccccaatggtctcactatcctcagcttctaccctcacccctcatagttttcgcttggtggtaacaatggtgtgctccagaagtccaggtcaaatgcgtgtgaccttagacgtatcattttgcccttctcagccacaggtttgatttacctagtgatgacgctcaactcccaagttcttcaaaggctttttctgattctgaaattcagtgatcacacacttgggtttgttaaaagcccatagtggtctaaaactccggtccccaattcattttttgtaaagggccatatagcaaatacttctctgtctttgctgactatgtggtctatagtaaccactcaactttagtgcaaaaccagccataaaccctatataaataagagtggctgtgtaccaataaaattttatttatttattacaaaaacaaacagctgcccaatgtggtctgtgggccatagtggtctagggtttacattgccaccctttttcatatcactgaaccctctcaaccttcctccatctttcttcccaggtaggatagttgttattaccgttttaaacataaggaaacacactcagtgaagaactaacctcctcagtttcacacagccaacctggtacaagtctctgggcctcaggatattggttcctgtcaagtttgccatttcctatctgtgctaaggtggaagctgttctagtcactgggtatgccattcaggaaagtgcttctgattttctgattttcacagttctgactctttttttttttttaagacagagtctcactctgtcaccagactggagtgtagtggcccaatctcagttcactgcaacctccacctcccaggttcaag

SEQ ID NO: 1243449 - DNA, 4001 bp, Homo sapiens
gctctctcccgctccccacgggcgggctctctcccgctccccacgggtggcctccgcgtgggagagacggggcgttcagagcacaggggagcccgtctgggacccaagtcagctgccacattcctgtgcttgtttgtgattttccaccgcaattggatgtggacggaaggaaccagttgttttcaggacaagggagaggaaaggagccacgcggggcaggtagaggcaggtcccagccctgtccagccccacacctgggcctcgggagagggtgtgcacaatcgggagattttttaaagattccagttgtgggccgggcgcagtggctcacacctgtaatccaagcactttgggagaccgaggcgagcagatcacaaggtcaagagatcgagaccatcctggccaacatgatgaaaccccatctctactacaaatacaaaaattagctgggtgtggtggcgcatgcctgtagtcccaactactcgggaggctgaggcaggagaatcactcgggaggcagaggttgcagtgagccaagatcgtgccaccacactccagcctggtgacagagtgagactctgtctcaaaaaaaaaaaaaaaaaaaaaaaagattcccgtcgtgaagtcttttgggacaggagagtaaaaaagactgcatgtcttacaacgtggtgtttacgaagcggccatcacgcctcacgcactgaggccccagtgctgccaccacccagatgttagagaagtgagacgtctgtgaggagccgtggcatcccttccatccgatctgtagaactgactggaagctgtgcagtgaggacacagtgtttcttttgagattcagatgtgacccctgcactgcactccacgtgcatcatttgctgacggatgaggcccagcagcgttctggggagccctggacccccagtcttgaggcgtgtctcagcacggggcagctgtgtctgagccgtttataaactagttttacacgcatgggtccttccacgtggatttttacccaggacctcagcataaaggagaaagacaagccttggttttctgctgttagaaagaagtttcattgtaaagatgtgacttcctgcctggagctctagaggaccgagggcagcacagcctgaggggctggtgggccgggtgctcaggcctctccctgtgctgagttggtggcaagagttccgaacccaaaagactgaggagcgcgaatcggagatcaggacgctgcgcctggggcacctccctggggtcccatgcacccggtgtcaccttcaccgcagcgccgactgagcgtccaggaagctgccagtgggtgcacccaggtgctgtgaggagccccatgtgaggccatcagaggacacgcatgcaatggcagtggcagggaggcaggctcacttcccggccccccagacgcttggcacccccacgagggcctggcccgtgggtttggacacaccctctcctggctccaggcatgactgtgccacatggcaggggctgccaggttggttgctgctaagacacatgcacctgcccgccctgcgtccctgggtggtggaatgcgtccgtggaattcacccgagtacatgtaaaaccaggcacaaagtacctgctggctttcgggagcgggcacctgggtatgccgcgttgcagccacagacaccaccgcagggcccatcccaggaacctgcgtccagcccctagactcagacacaagtgcaccgagcctgcccggggctaccatctcggagccattgccctgtgattctgtgggagccagggaagctgagatgtgggcagcccacacctcccggagatggaggtaccaccgtgggactgggctccctggctgtcctcccgagcccctccttctcacaggggcagggccgttaggaaaacgcccagctgcacgcagcacagctccgctcactcaccgggaccacgggctcggggctctgtgggcggctggtccctccagtcctcagagcggcctgtgaccgtgccagcggggaggctgcagggctgctgccctgctaagactgtgggctggactgaggcttatctgcagggagcagcctggaatgcgagggtggccctgggtggggatgctccgaggccacttgcagggtgtgctgcctgtgcttgtgggagtacgtgcgtgcatgtgtgtgcgtgtgtgtgcatgtgcgtgcatgtgcttgtgtgtgcctgtgtgtgtgcctgcatgtgtgtgtatgtgagtgcatgtgcttgtgtgtgcatccatgtgtgtgtgcatgcatgtgaatgtgtgtgtgcatctgtgtgtgcatgtgcgtccatgtgtgtgcatccgtgtgtgtgcacacgtgcgtgcatgcgtgtgtgtgcacacgtgcgtgcatgcgtgtgtgtgcacacgtgcgtgcatgcgtgcgtgtgtgtgtggctttggtggggcttgtaggggaggcgcgtgtggcagaggagagagattcaggaagtgaccagtgcgtcctctgcctgtccctgctcggtgaccacactgagctgtgtcttggaacagggcctttgtctgaagccctgagcccacgtcagggctgaagccgcaggccagcccggccccaaggcccttggggcgggatctccctggatggccttggacccacctcccgcccagccccaccaggaggcctggctgagtgcccccacacacatgcggacacacggttctcatgcagcgtcatgtccctagagtggctgtcagcagcctttgcctaccctggagctgacacaaaccaagtcctcagtcatttctggtcctgcctggatcagcgccagcaggggaagaatgcaggaaacctcatggagaggcggggggctgggcgcggtggcccatgcctgtcatcccagcagtgtgggaggccaaggcaggtggatcacttgagctcagaagttcgagaccagcctgggtaacatggcgaaaccctgtctctacaaaaaatacaaaaacttagctgggtgtggtagcacacacctgtggtcccagctatttgggaggctgaggtgggaggatcacttgaactcaggaggtcgaggctggaatgagctgtgattgtgccactgcactccagcctaggcaacagagggagaccctgtcttacacaacaaaaaaaccctaagaggcagggtgacttccaccgtccctgcacctgtgccctgacgcagctctgcccacttggcaccctgttccttcacacacacaaaattcactgcccgagagtggggcacagggctggggtggaaggtgctgtcccccgtgacccactggtcagcccgtctgcaggcctgcctccagggccctctgctcggcagacctccagggctctgcagaaccctgcgtgggctgggtcaccgtctcctggggagacaggcctgtctccaggttccagggctgggtcagggtctgggccctgtaccccgtcccccaggctccaccctttggctgccagactgtcgggtgagggtccctgctgtgcagggctggtttaccaggggccctgcaatctcaggctcaggtgagagcaggaggctttgtctcagagcaggtcctgtgtgtgcaagcaacacaggaagcccacatttcctgatcagacagccgcttagagcagggaaaaaggaggaggagcctggtgatctgcataagagatccttctgtcttttaatgggacccggcccctgcctcttggggttaggaaggccgtgggactcgtgacgggcacctctctgcatggcctgcagtcttgcccaggggcggagccgatgggtgaaggcccctcctcatgcccgtttggcagctgtgcctgatgactacttgccccaggagaaggggccgtagggccagggggccctgaggtgctgggcaggagcctcacagacccccgtctgcccacagtgaggccgtctgggagaacatggcgcgcatgtgcgtgaagacccagcggctggacg

SEQ ID NO: 1243450 - DNA, 4001 bp, Homo sapiens
ggatgacattccccgctgagggttctgagcgcggcaggttggggatggagctgtgtggttgaggcacacgtgatgtgtgttaccccagtactccgggactccctcggaagcctggagcagaggcactgcctcagagaccagcattatcttcagagcagaaggagcgtccaaccccgagtctgtgaggctctgcagcagagacttggggtgtctgcgagtcaaaaccttgctgacagtttcagagagtcggcctttgggagaccttgtgtccctgtgccgtgactgttgagatgaccccatgggctgtaagcgccttcctatttatgcagcctcacacctgccactcaaaccccacggtgcggtggcatcattctgagccccttcctctcctctgcaaccactgagcatccctgtccccttccgagcgtcctggcctccctgtctcctttccagcgtcccatctgaagctcatccctggggatcctgctgctgctctctgcctcaaagaccccaacaaccgtgagaacaaagccagaactcacccgtgtatttttaaacttcttgtttattttactcatgagtaaagaaagagcattttcattttttttttatgttcagagacagggtctctcgctatgtaggctaggttcgtcttgaactcttggcctcaagcagtcctcccgcctcagcctcccaaagcgctaggattacagacgtgaaccactgcgcccagccgtaataattattttcaaccaaggaaaaatgcctttccttgatttgattaatgtacccatctcttaactatgtgtaacggcagagaggccccccaaatgcctgagatgaattcctgtgtaaaagagctggaggcagattctgtgctgagcaggaggagtgtgtggggccaccactcaccagggagagggggccttggggcctggttccctgggagacacagtgccccctcctgcctgcccagaggccacgctcagggcagagcaggggccaggcctccccacccgctcaccaggtccgcgcctaacatctcccatgtgccctcgagcctcggccacgctgaaggcatcaggaaaacaattggacttacgtttgacggtgcctcgggactcctggaagccggctgcctcggagccccagcccagcgcctcacagtcatgtgcgtccacctggccggctctggccccagggctcggccctccccgggtcctgtccaccagccagcaggacctccacagccccacgctgcgcctgcgcccatcctccagcgtctggcacacccagttggaggtgaaggccgccacgttgttgaggatgagtgagaccagggccaccagcacggccgcggccacgagtctctgcacggtcatcgctgacgccggtgccgccgcttatccggagaaagccaagtcccagtccgcggccgcacgtccagggagagccgacgctgctaggggtggctagaggacatcaccactcatcctcggggcggcgcgggcggaggcccatgggatggtccaggtgtgccgcctctcggcccggccttatcctccttcctgcacctggagcagggccaggcctgtgctgaagctgctcgcctcggggcccatcccagggagcagagggtgggcagcagcaagaacccagggccaggagtgcgccgtcttcccgggaagcggaggccggcctgtgccgcgcgtgcctcttctcgcctgcagcagtggaaaacagagtcactcgggaggccggcagcagtgggagtcgagcccgcgccacactccttagcaccggcctgctgtgagtgccaggctccgggcagggtggccggtgtggagcgggttcacagctcctctgtgctgcctgggcccctgtgtggatgcctccagggcagttggccggtcctggaaagcagagtggctgctgcagggacgcccgtgtgcgcagagctcgccttccctggctctcagcagagaggaaatggttgtttttgagactgtttttggtgagctggaaggcgtagccaaccgcaacaaatagcggccctgccgcggcagccagacaccaacaggatgtgcttcctgatgggaaaggccaggagacttctgaggccctgctccaggcccacctcctgccgcccctccccatcttcctgtcccagaggagaggccagggatgccgggtgcgggacagatccctcgtctcgcctgttgcttttaagcctggtggcccccggggcctggaggctggtactgagcgactattgcctgccctggggacttcacaccccccagccatccagttgcccccaggaccataggtacccccaggaccataggaaccacaagcctccccccgcccgtgtgttccaggcctgcccccgccacgggaatgctgccctcaaaaggggggcagatatcacaggattgctgggaaggggagagacccgtgtgcctggagggagcaagttcacccagacctgcagggccagggacctgtacttggaggacctcggggccagggacctgtacttggagggccttggggccagggacctgtacttggaggacctcggggccagggacctgtacttggaggacctcgaggccaggtcattcttaggtggcaagaagggtaagattctggatgtgctgggtggggctctcagcggggcctgggacagagcgaatgtcacgtggggcctgggccacctctgctattgatgggaacggtcaccccccacagctggggacaggactaggcaggtcaccttgtgagtggtcaggctctcgggcagagcttatgctgccagggagctcagaagcatcttcgtctattctgctcagaattattctgcccagctgggcagacaccacgagagggtctcctactctgtcccatctccagagacccgaaacccagcatgggattcccagcctacccaggctccaaagcttcgtgaatgcaggtgtcccacatccgtgcaaactgttcatgggcacacgcccaagacagtgctgggacagagagtcctgttcccagcctgtggtaacagcagagctttgaccgtttcctgtccttgcactgcccgtgcttgggccctggctcagggcggtcccgagagctgccacttcctgggaccagtctccattcacacgttggcatgtggctctgtatatccacaggtgaagcaaggttccccacacacgccctgtgtctgttccagaaaggcagcagctccgtcctcaccagcccgtggtgcgtgctgggtcctgagaagcgtttctccactggcttcctgagggacgtgcctgggggggattttccccggggatttgtcgcagacgtgtccgtcaggtttctcctttcccctcttccttggcttgtgcccagggaaaagctgctgtttctatttctgttctcagcccccggaacctgacggggcgtgcggggcacagtggtgctgccggcccccactctcccgggtggctcggaaggccctggggggatgtccccagcccttcctgcctgtgccctgctcctcggaggtggacgggggtgcagtgtctcaaacactcagtgttcctaagcacacggtgcagaagggggccttgaaagggaagtctcccaaaagtttccatgggggaagaatttatttcctccttaattaactaaaccattaatctttcgggagtcttcaaatggctaacttccaacaaaaagccaatgctgggtttcagagcccagaggacacgtttgattgtctcagcggcccgctctggtcctttcctcaggttgagtggggaggaggccacggccagactcctacacagcggcagcacccccagaagtcctggttcgcagaggccagcatcggcctccactctcctggcacttctggggtgctccaggtccctgtgccctcagctgtcacgccgcttctaaccctgcgcgctatggcaggctgggcgcgggagggcggaaggcctggg

SEQ ID NO: 1243451 - DNA, 4001 bp, Homo sapiens
ctataaccgcttcatctgccgccgctcctgtcggcgctgccgtttctcattgtgctctggtgctggggtgccactgtctgcagtgaaccaggggcccagcacattcacccacaggaggtaaagggcccggcctggagcctacaagagaaacggtaacttgaagcaagatgcagggaataaaagatggggagggttagatgccccttcttgggagcgcccccagcccacataccagaagccagaaggaccagacatagagagagaagcagctgagcacctgcacgatggctgtcagtaggatcacatccttaaggtgcctgtggatagaaataaagctggaaagacagcatatgggcccttccacccttttcaagttgcaactcccttccacccttttcaagttacaagtagctgtgcttcttgggctatctgggccccagccctggggccgctcacctgggctggcggtgggggacactcactctgccatgccctgctccatgttgaggtccatgccaccatccatcagggccccatcctcagagaacgctgctcgtgccatcgagctcatagagtggtagctggccccatacactgccagactaaagcccagggccaactgcagagcaagaatgagggtatcaaaggccagccactgaccctacgcactcatccacctcccaggatggagatacttacccaggcccaaaatgaggcagatgagtaaaagaagaccaacgtcacaaggcagtaaatggcctgcaagcaatcacaggatcaggttggggtcagaagttacctccaaaccatgggtctccctcaactctgaccaagaattaggccaggctgtgggaggagcaaggttgttcttacagggttgaagaaagggccctgctccctgaatcccaaatacccactctcctctgacacccaactcagcccaggaaagaagcctttgtgtacttggaggtaggaagagctctcaaattcagctacgactcacgccttcattttctttgtgttttactagttagcactttctctgtgcccagatctctcatttctttttgactggagctctcttctagagctttttcgggtaccactcctcgtcaccaagcagggctgaggactagggaactgactataagtgggcatagaagcaaggaggtaggcacttacattggcccccagtatgatccgcaggtagaacttcagagtctctctgttctcttcaaatatctgcttcttccctctcgtgcccactttgcccttgggctgcagaggaatgatgagatgccgtcaggaggccacggtcctcctcattctccccaccagcctggtgagctatagagctccatccgcaactcagccaggtccccgtagtgcagaaacctagcaaaatccctgggatgtccacccatcctccagtccattctgcctagggctgacgccatctctccagcacccgcagctaggatcaatcgcctcttgctcgccctggaacaattcaatcctaagctaataccgcctctggatcccgtggtagtctggctttaggctaacgactcttccaagggtactcctgagcggagttgaatggtgcctctctcaggcctccgctggcgtagtcccgatctgggttaacccccacctcaggtcacttagatctctggcctgccctggtactgatgcccaccccgctctggcactagtcctggtatggtcctgcgccgccatccccccagcccagctctagcacggtctggccagggatggcgccccgctctggcccaccccatatcccttaatgttctttctcagttttcactctcacagcccctggagagctttgctggtgcggaccccgccctatccatcctccttaccgccatggtgcgaggcaaatacccagcccgggaaacacgggagagcgaccgaaaccgcaatcactaagcaccacatcggcagctcatgcacttccggcgcagaccgaagtcgtcagcttttgcgacggaaataggtctcacttccttcccaagccccgccccaaagaggcgagactacatttcccagaaagccttgcgcagtgggggcggaggcggcagggatgcgatggcggagtcgctgcccctggaggtgagaggaagccgccctcaggcctagctctggacaggccccgccctcgcggtcctgagctttggggaggggctgtcagatagctagcccggcccctccagcctggcggaaacgacccgccctcccgatcccgggaccttctagctctgggtaacggttcctcctttgggccactctgtccctttagcttgggggaccgtcctccccttccctatcggccccagaagatagctgccctgtcatctccgcgagaacaggccctctgcccatccccttcccttgaagtggctgtctcctccccgctcagttctggaagatgtccgctccatctcatcgtcccgaagggtaactgatcttatccccattggtcccttgggatgatctctccatttcctacagagacggccgccccttctccctggcagtgggaaacagactgctccctccccatcaactgcaatgatctctgagttcctttaacaaggataggcctgttccccattcctaggcccctagtgatggccgcccttacctctttcactccgtgggatgtttgctccttccccttagccaggggcaagaccactctgccccatctgccagggagataacaggttttgtcttcagtggcctgttggaatggcttctccatctcttttgtcctgagggttggcagccccctctctctgcccatgggaaacaggccaccctttcccatcggtcctggaatgatgctcctgtccttagcaaaaataggcctgttcccacccctattgagcttgcagtgctatccctttcccccttagctttaggggctatctatttccatccccatagaccccatgagtgaccaatcattatctccagtagcccccttgagatgggactcatgggatggtcactccatcctcatcactgcctcctcttgtccctctagaaaggccaccctcttcttaggtcaatgaattgtgtcccttcccgactcaccccaagggatgacaggtttgttcccctctccctttgctcttgggctggctgcttagccccagaagacaggatggccactgtcttaactcagctcaaacaggcttccgtgcctccctggagggattgggacttggtcagtcccagtccccatcaatactgtcttccctatgcctcccttcctggcccagaagtctattctgccagtcattgtcctctcagtaatgactgctttatttccccgaccccttccctgagcatactcttggtgaaaatagaggtagaggactggactgtccaaccttaatttaatccagtaagcactggctgagcactgtgcctgcgtgcttggcatctgagaaaggaaggagagatcacaatgggttggtgaagttaagcttcaagaaggggatcccagggaaaaggcccgcataggcaaaaggaaatagacatgctgtgtgcgtagggcaatggggagactggactggggaagtttggggaccagcgagtccaatcaggcacagaggcctggcagtgctgatccaggagtggagactgtcctgagagtactgtgaaccctgaagttttacagcaggggtgagctgaaactgaaaactgttttataggaaaaattaaccttgtgacagtgtgcataatgtattagcaaggatgaacttggaggcaaagagttcaggtgggagattgtggaaggaatccaggtttggggtggtagaaatctgagctactgaggtggggaagttgcagaggtagaaattttagtaacagcaatccagcaaccatttatggaacatctagttgtcacacacacactatatatatgtaaaatttaatccccatgaggctatgatctagatttt

SEQ ID NO: 1243452 - DNA, 4001 bp, Homo sapiens
ttttgtatttctagtagagacggggtttcaccatgttggccaggctggtctcgaactcctaacctcgtgatctgcccttctcggactcccaaagtgctgggattacaggcatgagccaccgcacctgattttttttttttttttttttgagacagagtcttgctctgtcacccaggctggagtgcaatggtgcgatctcggttcactgcaacctccatctcctgggttcaagcgattctccttcctcagcctcccgagtagttgggattagaggcgcctgccaccatgcctggctaatttttgtatttttagtagagatggtgtttcatcatgttggccaggctggtcttgaactcctgacctcaaatgatccacctaccttagcctcccaaagtgttgggattacaggcgtgagccaccacacccagcctctgatctcacctttcaatcccatctgacttcccaggactgtggcctggaatgtccgggtcttgttcctgtctggaccgtctccgaagttcaaggtggtcagcaagcccacgacgtgagaccctcgccacttccctgtgactgtcccattcctgggacacagggtcagctggccaaaagatctcaaaaaagagacccagtcctgtgagcaaaagaagacgggtgagatgagattagcagcaaaagcctgtctaggttggaaggaagagcgggtacgggggtggggaacttacctgggggatgtcagggctgcgcaggccagtcctgtgggtgaggaggaagctgccaaggcccaggccagagaggccaaggagcagcaggatcaaagtggcacagaccagaggtgggtggtgggccagacacaggtgcaggttgtgccctgcctggcagttgcccatggggagcagagggggctgagcctccggggagagcctgctggaagacagggagggagaatgggacaagagcaccgcttttacgcaaagagaaaagaaagctcagagaagacaaaggacttcccaaggccacacagtaagtggcagagccagaacaagaatccaaggttcccgactccaaaagttcaactccctgcactgctggataaatatttgctgcatttcatttctgaagtaatctaagtggaggcagagcagtgtactccgtgctggaagaaggaaactgaaagggagacttctcagctggagaaacaggaagcactgttctggggcgaggatttggctgaggaatagttccagccagagcccagacaagggaagactctggagaagaactccactgtgcagctaaacggctagatctgaatccctttctgttattcactgactctgtgagcttaagaatccatgaaatgggagttctgagaacaccaagtaataaggattaaacgtggcggatgaagcagtctgcgtggtatttggccatgcaggaattcaacaaatgtccacttcctttctctttctcgtacagatcctcaaaaccgggtaaggcgaggcaaaaaatactgtgagggaaactgaggctcgcggactttaacacaggaggggtagggccaagatctgaaccccgcctcctgcttccaagtggggtgctccttcccacgcaaggtgcgacggcctgatggaaaagaacttctggaaggcgaagagataaacaggggtcgggggaaaagaagggagccacggaaatgtaggtgtcacaaatgctcagccctgccccgcctcccgtccggctggaagggggttaaagggaggggagggcagagtctgagggtccgccgccgctggtgcacctgagcaccccctccccggaaagcccccgccccgaacgattgcaacgccctcgtcccctcccggtctcgcgcgtcggatccgccagccgctcgctcttacccctcggggccgggcggaggccggcgccccccgcgacgtcacgagcggggccgcgagggggcggggtccgtgctctgcgcttccgtccccgaccctcctcctcgcgcggccccgccccgcggccgggtccgcatgcgcagtggccacgcgggcgccagcctcgcagctcaccgccagggtgggggcgtaccaaagggacacccaaggaaggagccaccagaaaggaaaacctccgtgggaggggtggaaacgggagcgaggccagggagcaagtgcgagaaacgtcgcagaacccgtaggctccctccagagagactggcgagaactgccccagaagcttgtcgcgggcatttttgggctgtgcgtcccctacccgcgccaatagcacagaccagccgcgcccgggttcccggtgaggactcggcatccgctcagagttgcagggctgccacttgaggactctgtccactggggctgggagtggtgttttggactccgctcttctgtgcaccccgatctgcacctttctcgtggaccctgacttttagtgactccttaatgtataggatgctggagctgaagagttgctcagtagagagcatctcagttcacttctgcccaagttttggaggtgagaacatctgactggaggtagcatgacacatggagccaggaactttgggttcaaatcctgactgtccgtaccctcgcataagccatagccgcgctctcaggggactaagcttacccctctactaaagaggatcatcctatctatctcaccggttggatcagaagcttaaagggtaaaatgtgggaaaacatgggcccagtgcccactaagcacacaggacagatgctacttgaaacggaatctatttaattcgactgtggcttccttaaggcagaggccatgtcgtttgtatcaacagccacaaaagtttgtggcacaaaaccttcgcatatacaaatgattttttttttttttgagacggggtctcagtctgtcgccaggctggagtgtagtggcgcgatctcgactcactgcaacctccgcctcccggattcaagctattcttctgcctcagccttccgagtagctgggactacaggcgcacgccaccacgcccagctaatttttgtatttttagtagagacgaggtttcaccatgttggccgggatggtcttgatctcttgacttcgtggtctgcccgcatcggccccccaaagtgctgggattacaagcgtgaaccaccacacccggccgatttttttttttttttttttttttttttgacagagccttgctctgtcatcgcccaggctggagttcagtggcacaatcaaagctcgctgcagtctggacgtcttgggctcaagagatcctcccgccttagcctcctgggtagttgagacagccggtagtcacacgccacccaccatgcccagctaacttttgcattgtgtgtagagacggggttttgccatttgccatgttgcccaggcatgtctcgaactcctgacctcaagcagtcctctcgcctcggcctcccaaagtgctgggattacaggcgtgagccactgtgccctgactagtcaaatgatttttgacaagggtgctgtgggcgttcagtagagaaaagagtcttttctgtgcatcgaaggacacaacaggctgggcacggtggctcaagcctgtaatcctagcactttgggaggccgaggcgggtggatcacctgaggtcaggagtttgagaccagcctggccaacatggtgaaaccccatctctactaaaagtacaaaattagccaggcatggtgccgggcgcctataatcccagctactccggaggctaaggctggagaatcgcttgaacctggggagtggaggttgcagtgagctgagattgcaccacttcactccagcctgggcaaaagatcaaaactctgccccacaaaaaacaaaaacaaaaaaaggaaaggacagtgaaaaggcaaccaacagaatgagaggaaatatcaaatcatatatcttataaggggttaatatctataatatataaagaactcctacaactcaacaacagcccaatctcagctca

SEQ ID NO: 1243453 - DNA, 4001 bp, Homo sapiens
gggcacagtggctgacacctatgatcccagcagtttgggagaccaaggcgggtggatcacctgaggtcaggagttcgagaccagcctggccaacatagtgaaaccccttctctactaaaaatccaaaaattagcctgtaatcccagctactcgggaggctaaggcacgagaattgcttgaacccaggaggcagagttgcagtgagcagagaattgcagcactgcactccagcctgggcaacagaacaagactgtgtctcaaaaaaaaaaaaaaaaaagaaaagaaaagaaaaaagaaaagaaaaaaagaaatgttgtccctaatagtgaaaaagtcaaagcaaacctcaaaaagaatacagctgattaataagtattgatacatatacaaaactgagccttcaatttctgtcattatatctacctgtaactctatcatattttagaatgagcatgcacttttgtaatcagaatataagaacatttataaagtaataggagaaaagtaacctgaatcatattaggttggtgcaaaagtaattccggttttttgtcattacttttaatggcaaaagccgcaatgacttttgcatcaacctattactattttttttgcagttatttatacgaccaatcggatttttaaaaacaattttatttagttgctgggaacaagtctgattttcttttctcctcagctatacaaggttggcttgtagggcaatcatcttagatatgtctgaagagattcgaatttgaaagaaggaaaaccagaagtttcatacttctaaaggaaaacgttttcagaaaatgagtgaaaaggagtgactacaaaggaagcattcgcttatctcaaagcaaatactaaattacagattcctctcagcgctctactggtgaaaaaatttaaaaataaataaataaattacagacagtaacatgcttccatttcatcccgacagcttcaggatggcgcagtctccaatgggacaaacccagggaggcgtgactcggccacagcgcgttctgggaaggccgcttaaccaatcagcgccttggtttccaggggtcaggtctgcataaaaatgctgccctttccgttcctatagtggtgtgatgcagaaacgccgcgacagaatggggttatctacattaacagcgcgcggccttccaggctcctaaatggactttcacaaacaccctccatcaggccaggcccgcgggtgtgacccgggcagacacaggctgcccccacacttctggactctgtgtcagggcgcacacgctgacagcatggctaactttctgggggccggggacatctgggagaagcagaatgaaacagaagatcgattccctaggtcctaggagatgaaacgccacctttgcgggttcgcgagtccttaggatcaaagctgggctccccagggccggggccgctcgccccacatcctcattccagtccccatccccaccctatccccgactctgccccaggcccaggcgggaaccacgcaccgaaacgagcgggacgcgcaggcgatccccttgcagccggttgaaggcggggaacgtgctccaggcgaggaacccgtcgctttcgggtccgagcagggccacgagcagcacctggtgttggaagcgcacggtcggctgctcctcgtagctgctccgcttcagccaaaaccctgagttaaagagggcggtagggaggcggttagggaggccggccctggccgagcgcgcccggggagcctcgtggcacagcggccggggcaggctcaccgtggctccggaaggccaccagcagcggcgggatgtacgtgagcgcagcggccagcagcaggaacagcgcggctttggagcagagccccgcgcggtaactgcgctcgaccgggtgagagaagagctcatagagcgccatgagcaccgctcgcaggcactccgcgagccgggggaccaagtttggcttctcctggttgccatcgcctcggtctccacggcaaccgacggctcacagaaaggagccaatagcaaggccgcaccgaaaggagccagtggcgggggcggggttagcgggcgtggcgctgccggggacggtcggcctagcttttcgagctgtgtacgtttgcgtaaaggctgggcggcgatagaacgtttccgtggaccagagtcgtggctgttgtctgtgttaacatttgtgtaaaataagatgcccataaaagttgacttgaacactgaggaggaagaactaaatatttaaatttcaactgacatggacacaaacaatggtcaccaagtccctaaacaggttgtgggagccccttgaggcgttcatccagcgctgtttcggagaaatctctatttcagtctactcctatacgtcagttattgaaaaacaacaatcgcaaaaacaagttgacctttttgtgttccttgagcccagtcgcaaagggccctcgtgactgggcctcatgctagacaacatgttacaaaaagatctagggtcccagaccacgccaaaaagcttcatgagacctctcctcgtctgtgcactgacgagtggccggctctggagcccaggtcgttgcttcccagtctggaggtgaatcctccatagtctggtgagtgtaaatatatatatatatatgtctttttccttctcctcttcccattgcaatttgcttattatatcaatctgcttattatattaatttgcttattataatatctgcattgccatttacgtgggataaagcttgcttacccttaaaggtactgtgtgtgtgccttttcttctcccctagcgcgtctcccgcacagaacgaacacctgcttttgtgtcatctgttaacccccagtgtggttcctactgaagtccagtcagtcacaagcctggccgtggtcctggacctggtcctgggctgagatcaaagccaggtgcttttgcccccagattttctgttgcttccactatgctcccatgcaagacagacacggaaacacaaatcccctggctcttccacggatagagtggaattactacaaagctctgatgcacttcgttaaccctgtgttgggtacagctcagccgcgagttttacaggaatatatggtcctccccaaagatcactggcttattgcttaattgaatgcctacacccccccgccaccacccccaaccaatatttctaacatggtagaaggactttttaaaaaaatctatggtccacagccaatttcttcatcaaatggccctgaatggctgggcacggtggctcacgcctgtaatcccaacactttgggaggccaaggtgggcggatcacctgaggtcaggggttcaagaccagcctggccaacatggtgaaccctcatctctactaaaaatacaaaaattagccaggcatggtgatgggcacctgtaatcccagctactctggaggctgaggcaggagaatcgcttgaacccgggaggcacagattacagtgagcggagatcacacattggactccagcctgggtggcagcgagactccatctcaaacaacaacaacaacaacaaaaaggtcctgagtggctgagcacagtggctcatgcctgtaggtccagctactcgggaggcctgggcaggaggaaggcttgagcccaggaggctgcagtgagccatgaatgcactactgcactccaggctgggagacagaaggagaccttgtctctaaaaaaataaatacaaaatatttaaatataagtaaatttgttaaagggtcagtaaaatgacatttaagtggaaagacatgataagctttgtgatttggaaaagtcactctaatgacagcatgtcagtagtgtaaaccaaaatgtatctgagacaagtctcaatcaacgtagaaatttattttgccaaggttaaggacatgcctgtgacacagcctcaggaggtcctgatgacatacgcccaaggtggatagggtataacttgagtttatacatttagggagaca

SEQ ID NO: 1243454 - DNA, 4001 bp, Homo sapiens
tggtaatgcaagtccctggccctgtcctgggaacctgagtgaagaccccagacccacgtcctccaaaccgggacaggcacccatgggagaccctgaccacccacaacgccacagagcacttactcctcggcaggctgggaggagtgaggggctgagccagcacaccaggcctctccactgtccacacacaggggttccatctcccaggaacccctcaccaggcctgagttctgggacaggagaatttcctttgccagtttccaacggagtaaggttttggtatttctgagggtctcactctgtcacccaggctagagtgcagtgccatgaacacggctcaccgcagcctcagcttcctatgtaactggaaccgcaggcttacattaccacacccaggttatttttttttctttctgtctttcttttttttttttgagatggagtctcgctctgttgtccaggctggagtgcaatggagcgacttcggctcaccgcaacctctgcctcccgggttcaagcgattctcctgcctcagcctcccgagtggctgggattacaggcatgcgccaccactgccggctaattttgtattcttagtagagaagggggtttctccatgttggtcaggctggtctcgaactcctgacctcaggtgatccacccgcctcagcctcccaaagtgcgggattgcaggcgtgagcttcgcgcctggccatggagcaatttaatccggggcacggtcctcggggaaaactgcctttcatctctacctgtgccaagctcagaaagcaggaggcacagcccccgaaagaaacaggagctcaaaggagcattatttcaggggcaggggaggggaggggctgggggccgggaagtcggggaacagcaccgcatcagctgccgggcacctgggcacccgcgtggctggggacgtgtgggaacttccagccggccagaaaggacacggcccctccagagtcccaggccacagaggccggggcaagtcctcaccatctcagggtggccaaggcctgacggtctccacacccacgtccctaccccgtggaagggctacgccttctccctggtccagccgcctccttggacctcagtcagggacggggaccctcagggaacagaaatgcaaagggagcccggcgagtttcccaacaagaggggagaggggcgccctttcctcagcccctcttccgccagctgggagtccctcctcccagaagccgggccggcggcaggaagcggccgtaccagggctgggggtcactgcggaagggctggagccatgacgcccacgggcccccgctacagggtctaacaactttctcccggctctgcccctctctcaggccggacccggccggtgagctcacggcccagccactcctcccagctggagtcccgggcagagtcccctgggcccctccacttccccgcgccgggcgcgccggacctgggcgctctgggaggaggagggaggggagggggcgctccaggggccgatgtggcccaaccccgatcgggggaccgaggaggaagcgcggggtcccgtccgcctcgacccctaggacacgaagcgccccaaagggccactgtgcacccccaacccgcggcggggacccccaaccccgcgccggcgccagatgagcgcacaggtgcgcccggggtgtcacaatcccgccccgcccgcagccccggccccacgcccccgatggcgcccgcgcctcccgctcaccgctcttcccgctgtagccggcggaggcaggcgggggccgggcaagcagcagcagcagcagcggccccgccaccaccgcggccaccgcctcgcccccggtcccggtgccagcccggcccatggctccgcgctcggcccggcgctacccggcccgcgtcccgcgccgccggcccccgccgccgcccgggcagcctctgccgcctccgcctctgccgcctccgcctctgcccccggcgcccatggcccggccggtccccgccgccgtcgccccgggcacttccgcccgcaggccccgccccgcaggccgagccgggaaggcgagggcggggtcggggggcgggaccggggggggcgcggacgccggggggaggggtcacgtggggcgccggtaggggggaggggtcacgtggggcgcgcgggggacggaccggggcgcgcgcggtccggggggacgctggagggagggcgcgggatggagggatcgcgggggtcccaggacggagaggtcgcgccgggcgcgctcggaacacgcaggaaattctccccgaggcgtgggctccgcggggcttccccgccggttcgctgagtcccagctccgctcggccgggacctccgtggcaggctcggggagcccgcggggggcagaggcgccgacctccgcctgggaccgagaggaacccgcgccctgccctgccccgcccggcgcgcgtgggcctgagtcaggcgcctcagcacggggacccccgggccggccttcacgccgcagagccgctgcaggtgcgtgtcagatccacgcttttatgcacagacgagaaggctgcttgtgtttagggactgtagtacccgatcggggtggcggttcacacgggtgcgtggcatcaactcccggcgctttgcacctggatggattcccaccatgtaagatttgagccgaaaaaaggaagcgataaagcctagaaaactcggggaagctttttccgtcttagggccaagtcggcttttccaagcgtggcacagagtccagaagttccgccgcgtcgtgggtgggaggggggtgggggcgtctgcaaagccaaactgcataagcgaagtccaaaagacgagcccccgactgggaggtgggggacacagcttgcagctcacaccgcagagctcaccttaataagactagtaacagtgcagtaataaacagctctaaatcaatcacagaaacgctcccctagaaaatactgaaggacagctgccagggatacgctgatcctcctccctcagcgcagaaatgcaaattaaaaactactccagctactccggaggctgaggccagagaatcgcctgaacccgggaagcggaggttgcagtgagccgagatcgcgccaccgcactccagcctgggcgacagagcgagactccgtctcaaaaaacaaaaacacaaaaacaaaaacaaaaacaaaaaacaaaacactaaagtgtccttcccaggatgtgagggtaaaaagtttaaaaaaaaaaaaaattaaaggaaaaccccattaaagtgacttctttttcctttcacctaacacattggcaaataaaaactgtactaacaggtgagactgtggcccacagacactgcttgcagcaggcagaggatgtgggagcctcgtgggaacccccccgacttgtccactgaagtaacagcagcaatgaccttccctcgggaattccacctctgcgtttttccctccaggtacgttcacggaagtggcacactgcatgcgtccagtgagtcaatgtggcaccgcctacatgcgtgtcactggccggtgggacattcaaatcattcatacggggtctaaacgagacagagcgtggccgagacaggaaagacaggaagcgctgtgctgcttggaaatggtccaccaggtgcagcagtagctgcaagaaaggaacaggaagaacggtgtgttcaaagctctaccatttgtgtagaaaagggagaaaaacacgtttcctttgtgtgtgtcaaaggcatcgaatgtctggaatgatccagcaccggctacactggttgaccttggaggaggagaggcggggtggggatggggatggccgcagggaccatacctgtttgtaccttttgaacgccgcagcgggtggtgagggtttacggagcgggggaggggaagctgactccacgagcccagacccctgaaggccagagcagcggaggtggagggtgttggccggggaggaaggaagccccggctga

SEQ ID NO: 1243455 - DNA, 4001 bp, Homo sapiens
tccccgctttggggagttgggggggtctgtatcttagggccagccctcctagtgggccagccccctagtgttaaaaataggtccctaaccccccagggtgacccccgtggtggaatttcaggacatctgagtgagtggggcctagtgtcaagtctgccccccaagtcagcctggcccccagggcctctaggaaggagggcacccccctcccctgtgcaaatgctgcagttccttagtcagtgtcagctgttttgtgtgagccagcgtgaggctccctttctgttctggagccagaggcagggcaaccagacaccttggaaggttcccctgaaccctgggcccaggcctcagaggtgattcaccgccccccaccccccttgtggttggaggagcttggctcccgccgcgtctgggaggcagagactggctctagaatggatgaatgaatgatgagtgggcgagccccggctggcagggggcacattgtcactggatcagcgccacagctgggcagccctctccgccggtctcctctatgggggctgcaagataagaggtggggtcgtcagcagcagagaaaaggtcgagtgctgacagggctgggcaggccagggcacacttactggtgaacttctctctcctgcggcatcgtctccagaccaaaaagccagaaagcagccccagcacgaaggtcaggctcagagcgcccccaaggatgggccaaagcagccggaagggggcaggaggtgctgcagcgcctgggggcgggactcggagtcagacctcgcccctctccaggccagccccgccccctaagactgagccttctgccttctcccaaacgtggcctcctccctgaccggagccccctcccagctcccacctcctcccgaatgatttcccagatgcaaagctctcggccccgctctgcgcaccagccaccctccctcccagtctggggtccgctggccactggccctgccccccactcacagcccaggcagaagtcgctgtgcggtcgcgccctgcaagacgcgcagtccatgcacttgtccaggtccgcgctccaggagctgccgcgggagcagggggcggtgcctggggagggggcctcgggtcagaggctgggggcgggactcggctattctggggtctgaggtcagggtcggccggctcgaataacgtgagtcaccggcgccctccccgcgcattcctcacaggtgaccgcacggcccgaccgggacacggcagctccgggagggagggcgtagcgcgggacgctgggggtggggggggtcaggtccccacaacccccctgccgccggcgggtgactcactcctgggcaccgggcccgaccccagtccctccccccgcatagctgggcactgaagtcaccggatggaagggggcaccccacatggtatagagggcacagaccctagtgcctctcgacggcctccccaactcgtcgatcactggggctagttagaccctgtacggaccaggctgggggcgtgccccttcctagactaaacatcccgccctcactcactttctctctccattcgaagtacttcggacttgtggaactgaagaccccccccaaccccaattggacggtgggagaaactgaggcccggattgtgaatgaagcttggagagtgatggaacttcccacagccgggagcgagctgtttgaaggccacctgaccccagatccccacatccgcctgttcccccagttcggcgctgttctccagacacccagtccggctcccgagccccggcccggggttccccgaccccggagtcccgcgtacctggcgcttgctccccggccacggagcgcagcaacgccagccagagccccagcacgaggagccgcagcaaccggcgcagcgagccccgagccatagtgcacgtcctgcgcccgccgctgtctgcgcccgccgccggccggcagggacccacggccgccgccccgcccccgcccccgccttccggggcggagctctcgcctccgcccgccttgaggtccgcttcgggacgccccgccccgcggcgcccgctcagttcagtcattcattcaacaaagtcctggcgcgggagctgccaggaccccgcagggacgcagacccccttccttgcccagccggtgatctagtccagcgtgcgtggtgtggggaaatcaaaaattagacacgagtgctcgcttcggcagcacatatagaaatcagacacgaacggccggacgcggtggctcacgcctttaatcccatcagtttgggagtctgaggcaggcggattacgaggtcaggagttcgagagcagcctgaccaacgtggtgaaacgccgtctctactcgaaatacaaaaattagccgggcgtggtggcgcgcgcctgcaatccgagctactcaggaggctgaggcaggagaatctcttgaacccgggaggcagaagttgcagtgagccgagatcgcgccactacactccagcctgggcgacagagtgagagtccgtctcaaataaataaataaataaataaataaataaataaacaaacaaacaaacaataaaaagaaatcagacacacgaccaatccatgcagagatcactgcagcttccttccccccacctccccttgagattgcgtctcactcttgctcagcctggagtgcagtggtacgatcacggctctctgggctcaggtgagcctcccacctcagcctcccaagtagctgggaccacaggccctgccccaccacgtccggctaatttttgtattttttgtagagaccagggtcttactatgttgcccaggttagcctggccactacagctttgttaagggcccggggggtataacaattaaacctgaggtcaggagctcgagaccagcctggccaacttggtgaacccccgtctttactaaaaataaaaaaaagaaagaagttagccgggcgtggtagtgggcgcctgtaatctcagctactcgggagactgaggcaggagaatttctggaacctgggagacggaggttgcagtcagtcgagatagcgccattgcactccagactgggcgacagagagggcctccatctcaaaaaacaaaacaggccgggcgcggtggctcacgcctgtaatcccagcacattgggaggccgaggcgggcagatcacgaggtcaggaaatcgaggccatcctggctaacacggtgaaaccccgtctctactaaaaatacaaaaaaattagtcgggggtggtggcgggcacctgtagtagtcccagctactctggaggctgaggcaggtgaatggcgtgaacccggaaggcagagcttgcagtgagccaagatcgcgccaccacactccagccttggcgagagagcgagactccatctcaaaaacaaacaacaacaacaacaaaaaaccagcaacataaaaataatattatctggccgggcgcggtggcttaagccggtaatcccagcgcagtgcgaggccaaggcgggcggatcgcttgagtccgggagttcgagacgcctgggcaatataacaagaccctgtctatacaaaacaaaacataaattagctgggcacggtggcgtgtgctgcctgtagtcccagctactcaggaggctgaggcgggaggatcgcttgagcccagaaggtcgagactgcagtgagccgtgatcgcaccactgcactccagcctgggtgacacagtgaaaatatttctctaaaataataccaatagtatgccctttaatttgtaccttaggacgtagttacataataaaatgcagacttgttatctccattttgcagagtaggaaacgaaggctcgggaaggttaggtgagttccccatgtcaccgcgctgcttaagtggtgaagcggagtctcaagctctgttctaccctaagcctggcgccctcaccctgggtgagtctggacgtctgccagcccgaggcgggcccagcgaccccagcctccagcgcc

SEQ ID NO: 1243456 - DNA, 4001 bp, Homo sapiens
aattgtttgaacccaagaggcagaggctgcagtgagttgagatcacgccactgcactccagcctgggccacagagcgagactccatctctaaataaataaataaataaataaataaataaataaataaatgcatacagaaatagggcagtggctgtacatgcttgggaatccaatcatgagcaaaggtgctgcagaagtatttttatcttaagaggcacttaagtagaacattcatttttctgggactggttctctattgcttaaaaataattattttttagatgattcctcaaataattcaggagcaactggttattcatttctaacatttttcagtagtaaaatgttcactcaagcaaagaacacctatatttgtataaaaacatgaccatagatcttgacaaatatgcttttcctgacagtagcagacctggctaggagtttctgataatgtggcatttaatcgatgtgctaactttagtcaaagagactgatgtttcccaagaaagccttagtactttcaatagagtaattaacagtggaagaatcctggagaagactgacattgtagaaaatctgccaaggtgtcaaaatcagaatgaagatggctcacctctaccaagttcatttaatgtaacaatgttctaacacattcgaaagggctgtaacgaagtgaaatagtcaacgctaaaaaaagaaaaggaactgaaactcacaatagccatcccctggaaatagatttcaaagattcaccatcaaaccaacctgtgtttttaaactcgtcctttaatggttcagagtttatcttccttagcaaaaacattagcacgaaaactgccaaagaaattattaagctcagtcccaaacaggtccagagaatcgcattcgttcctttcactgaattggtcacacctttatgaaaagaacatcagacagataatgagctgataacataatattcacatactttattgttattatttatttatttattttgagacaaagtcttgctctgttgcccaggctagagtgcagtggcgcgatctcggctcactgcaacctccacctcccaagttcaaacaattctcctgcctcagcctcccgagtagctgggattacagacctgtgccaccatgcccagctaattttttgtatttttagtagagacagggtttcaccaggttggccaggctggcctcaaactgccgacctcaggtgattcacccacctcggcctcccaaagtgctgggattacaggtgtgagccatccaccgcacccggctgtcatacttgattattttgctaaaataatgaattatggattgttttgatagcaaaataatcaagtatggattatttccattcaatcaccttaattaatgaacattgacttttaaattctaaatatcacttaattagaagagctgatttttaaaaaaaatctatgttgctaatagtgctgaatcatatcaagttcagttccaaataattactttgtttccataaacattaaaatcactgccttgcttcctttctctttttgattcaagaaaactcaccatcatgcccattatgttgattctctgaataagcagtccatatagacagaatagttcacaccaatgaataatcgttcaagcaatattacttacttgcattacaataacgctgacatgttagaggaggagtattagaagaacatcgaagttgacaaggtatgcaagcatgcaacaaactgtcaaaatattcattttgggagcactgcccagccatctgcaacatgatcacaaaaagaaaacaagggagctacagaaagaacagcctggaaggacaagtaatatctctacaagaattccagagcaaatgcagcaagagcagctagaatgttgagaacaatgaacttcgcctgcttcgtgggttcttacgggggctgtctgtgtcttcgcggcagctaaggatttgaataccacatctaattcaagtttctaagtttgagtcttggatggggtaagagacagggtgtaaatatcagggcatatcacatctgaaacagaaactgcttatttatagaagaaatttctcagccaggtgacagttgcaagatgcagacaagcccacagcatcaagccgaatgttcagtaacagtttctggaacatctgttaataagctgtactctgtgagaggtgccagggagatagacaagacaaggtctgtgctgtgccccttaagatcttaacattgaggccagctgcaggggttcacacctgtaatcccaggactttgggagtcaaaaggcaaaaggattgcttgagcccaggagttcaaaatcagcctgggcaacatggcgaaaccctgactttacaaaaacattttaaaaagtagtctggtgtaagctgggcgccgtggcgctctcctgtaatcccagcactttgggaggccgaggcaggtggatcacttgaggtcaggagttccagaacagcctggccaacatggtgaaaccccgtctctactaaaaatacaaaaattagtcaggcatggtggcaggcacctatgatcccagctactcaggaggctgaggcagggagacgtgcttgaacccaggaggcggagtttgcagtaagccaagatcaggccactgcgctccagcctgggtgacaaagcaagactctatctcaaaaaaaaaaaaaattctacaggaagatcagaggtgatgcactaaggaagacgcacaatgccactgacagaaaaagagacatttagggtaagagctcgtggaaagagggctgagaggaagataggtttggggtattataataataatacaataatctatgttccattgttgaaaatttagaaatacagatgagcagataaaaccattttaaaaatccacagtccaagcatccagaagtcatcaccgctaacacctggtgtatcccagaagttgcaaacagacctgccgatgcgatgtcttttgtttcaccgatccctgaattctagatagatacatttatatagtgcatttttctgtttacataaatggatcacttgaatttgcctttttttttttttttgacagagtctcactctgtctcccaggctgagtgcagtgacacaatcacagctcactgcagcctccacctcctgggttcaggtgatctgcccacctcagccttccaagtagctgggactacagacatgcgccagcacgcctggtaagttttgtattttttgtagagatgggtttttgccgtgttgcccaggttgctctcaaacacttggggtcaagtgatccacccacctcggcctcccaaagcgctgggattacaggtgtgagccactaagcccagcttgaatttgcttttaaccatactgagtgaaatacccatatagagacgtccagatgtttgtcaaaaatgcaggactcaattaaaatttgaggaaatggcaaactcctaattcagtatagtgattatctctgaggtaagtggtggggaagaaggggagcacaaaaaaggcttcacctgtgtttattatattttctttattaagctgagtggtggatacattgatatttgttgttttccttttgttgtatttttcttattctttacactttcttaaggcccaaggagtgtgccaaggaaacctgccatcccttctactttatttcatcctccaagcaccccaacctttaaaaacttattctttttttttttttttttgagctggagtttcactgttattgcccaggctggagtgcaatggcgcgatctcggctcactgcaacctccacctcccaggttcaagcgattctctggcctcagcctcctgagtagctgggatgacaggtgcatgccaccacgcctggctagtttttgtatttttggtagagacggggtttcaccgtgttggtcaggctggtttcgaactcctgacctcaggtgacccaccggccttggcctctcaaactgctgggattacaggcatgagccacct

SEQ ID NO: 1243457 - DNA, 4001 bp, Homo sapiens
gctcattctgacaagtcttgtgtgtttggactgtaagttccatgagggcagggccttgtgtgttctctagttctgttcccagagcccagcacagtccctgaacagactttggtcccttagtaaaagtttgttgaaatggctgctttgaggaacgttgaggttggtactatgttacagaatcaacaagtgagactcagaggttggtcacagtccagggtcacacagcgagtacgaaagatgagccaggattcaaactcaggatgctctggattgcaaaaggcacattctgaacccctcttcctgtctcctgtcgtgttcttgggctacatacatgtggatcacgtgaataggttgtggacatgtgtgcatcttgtgtgtccacatgtgtacacacccatgtgggagcatacagggcaaaagattgttatccaagcagagtggactctgcaggcttcttggcatcctacccccattcatttctgcccctgtgcaggcccccaaaacacataacacctttattagtgaaatcaaaatgactatgactactcagggatagtcttccaggtacaagctttaattagtgttgcgtagaaatcaccatagtaacatgttcctgcaagaagattgacttcatcctagcattttctcctttgggtgaaacacgcaggaacaagccaaggagtgcggtctcattagttggatttccatcctaagggataagagtgggaaaggaacctttaatagctgagcacttcatgaagtcagtgacctccttgacctcctgtaaggtcttacaactactcatttgtgattgaatatgggacatagatagagtttagactaccgtcagtgtccttttgacctatgtgaatccaggtatccatccatttatcccttccatttgtcatccacccattcattagttcactcattccattcatttattcaacatttctttcccattctatcccattagtctagatatctattcttctctctgtttattcaattactctatattactctattaagataatatttaaccaatcaaaccaacccatcaaaacttctacaactatttaactctatttctaaccaattcatccaccaaccacaatcttcaaactgatcatctacctaaccaaccaaataactagccagccagtgcattcatccatttatccatccatccagctaatcgtatccaaacttcctatcattcagccaatgcattcttccaactatcctttctataacctatttattgtttacccacccagtcatccacccaacctctcaactccattcatgctttcatctagcttatctgctatctgtccatctttccatcctcctaatcaacccatccaatttcaaagagactttccgtcaatgtatcatacattcagctagccaactgccattgtttctcttctccctcttccttcttgcctgtggttcctttgtgacctggctgcagccttcctctcactgcccccaaggtctgctctccatcatctgtgggctcggtggcccttccccacctccttaaagggtacctgagctccgcgtcttggttttgtacacctgctggatcctcttggccatttttttctttttcagcttgccttccaagttctttctgttcttggggcagcggcagtgcaggatggtgggccgcatgggagagtggtgggagttcatagtctttttgtggcgctttggtggtggactagtgttgggactctggctctggtggccggatgagctgtgggctccagttgggttgcggtggctggccgggctctggctggagctctggctccggctgccacgatggctctgtctgcaactctggctgaaggtttggcaatggcgggtgcaggtgcggctttggggctgagagttgctatggagctgagtgtgggtgataggaaggctgtgagtctgggtgtccataggaggccacgtttggaggggcagggcctcctcctcatcctctcccagcaggcctagctttacagaggccctggcagcccacctggttatatagttggggctgattatgatggcccaggccacaggggtgtgagagatgtggctcagccaagacaaagccccctaccccttaccctcacccccaggctggggcagctctcaggggtaccctggggatagtcccagctactggttcagggtaggagcccttgggtcagattaagctgagtctgcatcccagatctgctttttccacatggtcagccctgggaattcgcctgaacaagtcccagtttccccatctctgcagaatagggataataattgtactgacctcattcggacattagaagaattattaataaaggagagaatttatatcaagcagttagctcaggcccagcccacaataagagctcagtaaacatcactgaccagcatcatcaggtgtttttcttaacgccctgggcaacttgggtaccaggagtgcagccctgaccctggtgatggcagctgaatggtgggcagttgttaagacagatgattagtgcccagatgatggggaggtgatgaattggtcagatggcttggtggatggatgaaagatgagtaaccacatggaccaaggggtggtcctggggctcgcttggcaagcctacctccccagccagatctaaagtcgggaaattcagagccgggttcaaatcccagtttgcactgatgtccagtcttgggtaggccattgtggtttctgaggcttaattgccgtatgtgacaaaggggtgtctttccttctttcctggtattctcgtgagcctgagatgcctgtcaagctacaggaggcccttggaaacccgtctctctccttcagtttctgcctcttgattctcctccccttcctgctaacgaagcctcgccataccgtttgaatcacgccgtccctgctcagataccccagtacctctagaagaaagcccagacttatgtttgaacactaagccatttgatcttctagtctttgggtttccatccagagccctccacccctccctgtcttggccgatgcctttgggcttagcccttggccctgtactttcccacttctctctgcatggaacttcctctgtctctgtctgtcctccccgagcaggcctccggcccaagccaacctctcactctgcccatgtgcaactttgcctcttgctatgaggatttgcaatcgtctgcttttatggaagtttttttctttttctttttcttttgagaaagggttttgctgtgttgcctaggctagagtgcagtggcacaattacagctcactgcagcctccacctcctggactcaaacgatcctcccacctcagcctcccaagtagctgtgactacaggtgcatgccaccacacctgtctaatttttttatttttatttttgtagagatggggtctcactttgttgcttaggtgggtcttgaactcatgagctcaaggttttctcctgctttggcctcccaaagtgctggcactacaggcatgagccaatatgcccagcctttgcagtttatttcttaataaacatttcaaatttcttacagtgagaactgctttcatttactgaatgctttctatgtggctgggctctggaccttaccctctccaggcagctttgccctcaaacctcacagtgaccctttgtagtggaatgaatggcaacccccaaaaatctatgtccacgttataactcctagaacttgtcaatgtgatatttggaaaaggggtctttgcagatgtaattaagctaagaatcttgagataagcatgttggcttagctggtgggccctaaatccaatgataaatgtctttatgagagacagaagaggtgtcacccagggagaagaggaaaccatgggaagatggagacgagcttggagttgtatgagctagaggaggcaaggaaggattctctgctaaggcctccggagggagatcagcccagctggcacctc

SEQ ID NO: 1243458 - DNA, 4001 bp, Homo sapiens
attaagtactagagcaccttcataggaattatactgatatagttacctgataaaacaaaaatggaaggagaaacagacctctaagctctgttctgctgatattacaccttaatggctcaacctgttttctttaatggtttcatatcttaacatttccttactagattttgacaaaatttatgtaaatataccacaaatagtcagtgatgtcagacttaatttcctttaaatgatcccataattattttgagtaacagagaatcccttactgggtaaaccaatgatgcctatccttcaccatctgaacacattctttaacgatcacctgaacagattagtatcttatgaaactcaataggccagcaatttggaacaattctacgcggtgcaaaatattcagacgatttgaaatgtgagtgttaaaaaccccaatgtaaacctaaaacccgcaatcatcaagagcaaactacattaaaacctgagataggagaaatttcattttattttcaacaagtgaaaaaaaagaaaaaaagaaagctattcacggatttggttaattggctaagtttccctgagtgtcccaatatgatgcaaaagaaaaaggggaataagaaaggaaaagacggtaggaaagaaaatgaatgtgaaaaggagttaaatacagtacaattccttgatgcttaagcaattacagctcaatgaagctaaatatttccattccataaagacatcgtttaaaaaaaaaaaaaaattctcccttcacggtgatgcaaaagcagcagggcccaacaggaacgataacctcttctggagaaaagatttttaattattttaccagctgataaaaagagcacacaccgaacatggacagaaatggagtttcgaaggaaaacaaaacgcagcttatgcttggtaaagttcaaggacaaaactgtgtccaatgcaacagaatccgcctgactacaatgtatggggggggggggggggcgggggggaatgcgaacacatagtatctttttataaaagcaacaatttgagctacaaagtaataacggggaagccaaaacagtttgacagcccgccataagggccgcctcaatcatgagtcacacaatgcctgcaaccatttacaatagtaattaatgcacaagtcccctaattaaattctaaaagggtgagaatgctttaactaagtttacaagaattgctttgcgctttttttttttttttttaaagaaagaaacacacgcgtaattacgcatctccccgcaatccctccagtattcccccaggccgcttctcccgaatgtctgctctccgggtgcggaagaaaatgtcacgggggaacttctcaacccagaaaaggcgaatcggagtagaaatatacgattatcgtggggcgggagacggaaagctcgcccatcttacctgctaagatttctttctacgtctttggtagctttagcttccaattctctgaaacaaaaaaacaaaaacaaaaacaaaacaaaaacacacacacaaaaacgagatgcgcgtgaaaacggagctgctgcggcagaggctcgcgccggggccggatgggggaggggagaggacggggggagggggactcacaaagctgcggggctgcagcccggactgcggtcccgcggcgcgggcgaggcgcaaccccggcctggcccccgcggcgcggcgcagcgaggctcccccgggccgcccgctcggcctccgcagcaacgcagcctgcgccctcccgccgaggcccgaagtctcggggacgcccggcgccgccgcctctgctgccgccgccgcgggttgcgggccctgcggcagcgcccgcggctcctcccgcccggagggaggcccttgttccgctcacctcatgtgtgtaaagtgcacgagcaagtggggcgcggcgaaggaggctcgcgagcctcaagccctccgcagcgccgcggggagaggcccgagccgctgcaccagcgccattttctacaccgacccgctgccgccgccgccgccgccgccgccgccgccgccgacaccgccgccgccgcaggccccagaccggaagtgaatgccccactcggcaaccccttccgggggcgccacggccactggcccccaagatggaggccctagcaactggacccgcagattgggcaggtccttggcaaccgccccggcgtgtcacgctgcacccagccggacctccctggaggtcacagcctccgaggcgccccgcggagtggctgggggggcctgcggagtcccgagtccaacctttttcggtgcggccggctccggtctgaccgaggaggggagtccctcccctcctcctccttctttgctgcgacacaagtttcctacccgccgcccggcccctcccccactgacacacgccaaaaaaaaaaaaaaaaaaaattgcctaaaacgcaaattttaccccaactgcagcctgatgagcccgcgcggcttttgaattcagccacttctaattatttttgaccttgggccagttatttaacctctctgcttctctgttcctcctcaggtaaagaatgcatacctgaggcgggttgtgaggcttaaaagcgatttttatccaccgacctttgactcagcagttccgcctgcacggattttctgctcaggaaataattctgggtatctgcaaatatttcaccttcgagatactaagctgtggtattgatgatggtgaaaaattgcaaacagccaaaatgtccagcgctactagatggcttcaaaaacagctactggcatgtattaggacactgtaaaaatgatgtggaggaataatcccggcatggaggaaatggttgcaatagaataaatgaaaaagcaggttccaacgtagctcacacagtaagaaacatcttagtgtagacacagtaagatacatacatgtagatagactaagatatgtatatatgtagacacagatgcatatgtgtacattaaaagtatacatacatacctacatgtagatacaataagacatacatatctgcaggtagatacaacaatacacatacatgtagatacagtaagatacatattttcacttgcgtgtgttctttccaacctctcatcaagctttttcttctaatttaaagataattcctcctctgtgcttaaaatctataacctttactttctcagaaaccccactctgtggatcatcccattctcctttttctaacctaagttcttcaactggcttttttttttatttttttattatattatcattttttttaggcggagtctcgctctgtctcccaggctggagtgcagtggcgcgatctccgttcaccgcaacctccgcctcccgagttcaagcaattctcctgccttagcctcccaagtagctgggattacagacacgcaccactgcgcctagctatttttgtatttttagtaatgacggggtttcgtcatgttggccaggctggtcttgaactcctgacctcaggtgatcgcccccctcggcctcccaaggtgttgggattacaggcgtgagccaccgcgcccagcttcaactggctttacaacatgcttgaatctctcccgttaaaaacaaacaaaacttccctagacatgttgggttcctgtcctctccgataggttaagctagtgaatgaatgcacagaaagtcatgaaacatatgcaccaaaacgttaactgattatgactttttttcattttcttcttttagtgtatctgtttttttcttttttgcgatgagcatataaaaaacacttttttgaaaaaaaaaatcaggtttacaaaatataaaatgtagtgggcaccgaataaatgctagtgactttccttttcctgctatcatccctgaggttcatttacctacacacatatttgtttttctttcataatcctttctacttaaaatgtttaaaagttactatggtgtttcattaggagtttaaaaatatgaacatatacgtaatggcaca

SEQ ID NO: 1243459 - DNA, 4001 bp, Homo sapiens
gagtgttgcagatcttaaatcagagaaagaaggagttacattaggcaaggtaatggcttccaaaaataagagcatgcccagtttatacaaggcttgcatccacatgctaagttgtaaggagataaataataccccactggaacaattaggtagattctcagaaacactacatacttaattaggctgcctaagtcccttactgagcatacatgggggactttttaaagcatttaataacctgagtaaatccaaaatcagaggacacaaactaatccttaactctggctccagcgatcggccttttcttgcctctctataaatgcttagcgtagcccttagaattcggagagcaggaacgctccaaccaccaaagggttaaagcacacggaataaagtcccctcgatctatattttttgggaggcccctctgtgccagacgctgagctgggcgatgatgacacgcgagggcgagcaagagagaccctaatggtcttttacaaacttcagcactagagttgggaacgcagtataaacaaatagaaaggaacacgagcctccatcagccacggggcacagcaaactgttcctcactctagatgcaattcctcctcttcctgttatttattcattagttttgtttagcacctttctttcagcaggctccttatttcctcctgttatccaagcaatcacaaacaaactacgatttgaaagaaaaagagagggaggagggaggagcaggaggaaggggaaagaaaaccacattcaaaaggcacaggccattcagagcccggctgtttctctgaatctcgccctcagggtgatgttttcgacaaattcggcgctgggggcttcagggaggacagaggacaccggatggtgggggggaattccgcgcggcccgggtaccagggctgcgactctcgcccgcctcgctgctccgagcgacgcccgctgcccttctgaggtccacctcgccacctggaacgctcggtcctcgaagttggcgcagggggaggtggagaaggtggagtgaccccagggtgtggtgtggaggtctccaatcccgatctccccgaaatgcaaaacttagcccccccaaaaaaatgagaggaaagaagccacttactctaagcggggaggggcgggcaccccggttccgaggtccaaagtgccctaacgaaagggcagcaaaggccacctgcggggtcccaccacttccccccactcccctgtccaggcatactcaaaagtttgttcctttccgtccgtaagcggccccgaggccggctctggagtaggtgggggaggtaagaaggactgggggtgggggagggcaagatcatcggaccaggagatcagggacccctgcgtagcccccactcagtccaggggggctgcgatcgtgtttactaataacagcaacaaacaatcacacgccagcccttctttcagtcctcgggctctcttcgctttttgggggcagcaaaggagagtctggcggggaggtgggagggagcggaggggctgaggagagcgccggctgggggacaaaaagcggcgtgggatggggcagaaagagaagcggggagagctggacagagacgaaggctcaaaggtagaagagacatgggaggaaagaggccaaagaaaagtgcagcaggcggtgagcccgagcgcggggcgcgcccaggatggggaggtggcccccgccccccggcccaccggcccagcccggtcaccttgctgtagccgtagtaccccaggcactgcgcgaagtccaggctggcagggtccccggccgccgcggggtagaacctcacatccatgccgaagctgggcccggggccgggggccgggactggggttcgccggggccgggacccgcctcctcgccgccgctagatccaccgtcgagggcgcccgggggtggcgcgtgggactcgcggccggaggggcgccgggacccagagcccgaggagctcgggagccgcggccgccgcacacaaaggcgcggccacgcgagccgcgggagagcgggaggcggccggggggacgcgccccgccggggcaccgaggcagcgctgcgcgcgggccgggcgccgggggcgcggggcgcggcgctggggcccgggtcggcgaggcgagttcaggtgcgctgggcgaggctgggacggcggcggcggcggcggctggccccgctcctcctcctcctccccgggcggactgaggagacgagccgcggagacaaggggcccggcccctcccctccttctccccctcctgcctcagccgccggtcccctccccgcgccgccgccgctccgcccctcccaccgcgggcagctggcgcgccgcccgccccgccggtgcgctcctcggcccggaccgcctccgggagcgcccaccccgccccgccggccccatcacccccgccgcggccgccccctctccggggcccctcttctccctacctcgccccccttcccgctccggtcctctttgtccccactgcctcggagcgctcctctctcccctcctttcctcggccgaagcggacgccagccctgcgtcccgtgtgtcccaccctcctcctgcgcgaccacagcttccccgggccccagcatccccaagccgtctgctcccttcctgtcgctttcctccccatgacccccttccttcttcatgggtgcctgtccccgggcccctctcctcgaccccgccttgcctttcgaatgtcccctgcgtggacacacctaacccagacgccaacctgcacgagtgtctcccggtagccgggagccgggaccccaagttcacctgtaggatttcccagaaggggtgttggggcctgacctttcacaggtaggcagacttgaagcttcccaggtgaagcctcgtgtcggttctcttcgtattctctttgctcttgtttgtattcgaaaggcatttgagtaactggatctaggcagatcattcactgctctgggagagaaaatgtccctattttcctaaaaggtcctagctgattaacttccccactctacactcacccacccctctttatttctttatctttcttaagctccatctttttatttaattttttttctcatcggctttattgctttgagttaatctgagagtttggccttcagccttggcgaagggaaggggctttatactaaatgggaacgttgtggagaggccgtgagatctgcgccctccccagtttagttatctgccagctactttaaccagagtggcgacattctgaaatatttcctatgacactcgctaacagtttcatcccctggtcacaccttgctggcccagggcctgagctttttcagacaagcatgacatgggttttcttttcatttcttctgttctccagagtagatcgggcttgtgacacctgtgtgtgtaccttcactcaatattatctttctggaacggagcagaaaaaaataaacttcaattaggtgaaagtttgtgtatttgctcttctcttagcaaaaacttgggtcaggagactactgcatgagagagcagtgtgtgttgagaaaagaaacaactgcccacgttgtccctgggttgactctgatccccaccctcccgaaaaagctttggtttcccctccctagtctccatttaacgttgacaacccagcggtgctccctaatggcccagcaggttgcacaaattgacagtgagctgagatattatcaggacaacaccccattgagcaagttcttgaaacgcagaagtggaggccctttctctgggccactgggcgcctgtggcctttccaccaatcagagctggaggttgcagtggccacctgttgtctcgcaagagaacatcttttaagtttcgctattagtatttaacaatggcctacagagcaggatctggccacaggagaggagcagtgtgatgatctggggtaccaaaaaagaattttttaaaaaaaaaattttacagatagctcttacaagg

SEQ ID NO: 1243460 - DNA, 4001 bp, Homo sapiens
ccagggctgcgactctcgcccgcctcgctgctccgagcgacgcccgctgcccttctgaggtccacctcgccacctggaacgctcggtcctcgaagttggcgcagggggaggtggagaaggtggagtgaccccagggtgtggtgtggaggtctccaatcccgatctccccgaaatgcaaaacttagcccccccaaaaaaatgagaggaaagaagccacttactctaagcggggaggggcgggcaccccggttccgaggtccaaagtgccctaacgaaagggcagcaaaggccacctgcggggtcccaccacttccccccactcccctgtccaggcatactcaaaagtttgttcctttccgtccgtaagcggccccgaggccggctctggagtaggtgggggaggtaagaaggactgggggtgggggagggcaagatcatcggaccaggagatcagggacccctgcgtagcccccactcagtccaggggggctgcgatcgtgtttactaataacagcaacaaacaatcacacgccagcccttctttcagtcctcgggctctcttcgctttttgggggcagcaaaggagagtctggcggggaggtgggagggagcggaggggctgaggagagcgccggctgggggacaaaaagcggcgtgggatggggcagaaagagaagcggggagagctggacagagacgaaggctcaaaggtagaagagacatgggaggaaagaggccaaagaaaagtgcagcaggcggtgagcccgagcgcggggcgcgcccaggatggggaggtggcccccgccccccggcccaccggcccagcccggtcaccttgctgtagccgtagtaccccaggcactgcgcgaagtccaggctggcagggtccccggccgccgcggggtagaacctcacatccatgccgaagctgggcccggggccgggggccgggactggggttcgccggggccgggacccgcctcctcgccgccgctagatccaccgtcgagggcgcccgggggtggcgcgtgggactcgcggccggaggggcgccgggacccagagcccgaggagctcgggagccgcggccgccgcacacaaaggcgcggccacgcgagccgcgggagagcgggaggcggccggggggacgcgccccgccggggcaccgaggcagcgctgcgcgcgggccgggcgccgggggcgcggggcgcggcgctggggcccgggtcggcgaggcgagttcaggtgcgctgggcgaggctgggacggcggcggcggcggcggctggccccgctcctcctcctcctccccgggcggactgaggagacgagccgcggagacaaggggcccggcccctcccctccttctccccctcctgcctcagccgccggtcccctccccgcgccgccgccgctccgcccctcccaccgcgggcagctggcgcgccgcccgccccgccggtgcgctcctcggcccggaccgcctccgggagcgcccaccccgccccgccggccccatcacccccgccgcggccgccccctctccggggcccctcttctccctacctcgccccccttcccgctccggtcctctttgtccccactgcctcggagcgctcctctctcccctcctttcctcggccgaagcggacgccagccctgcgtcccgtgtgtcccaccctcctcctgcgcgaccacagcttccccgggccccagcatccccaagccgtctgctcccttcctgtcgctttcctccccatgacccccttccttcttcatgggtgcctgtccccgggcccctctcctcgaccccgccttgcctttcgaatgtcccctgcgtggacacacctaacccagacgccaacctgcacgagtgtctcccggtagccgggagccgggaccccaagttcacctgtaggatttcccagaaggggtgttggggcctgacctttcacaggtaggcagacttgaagcttcccaggtgaagcctcgtgtcggttctcttcgtattctctttgctcttgtttgtattcgaaaggcatttgagtaactggatctaggcagatcattcactgctctgggagagaaaatgtccctattttcctaaaaggtcctagctgattaacttccccactctacactcacccacccctctttatttctttatctttcttaagctccatctttttatttaattttttttctcatcggctttattgctttgagttaatctgagagtttggccttcagccttggcgaagggaaggggctttatactaaatgggaacgttgtggagaggccgtgagatctgcgccctccccagtttagttatctgccagctactttaaccagagtggcgacattctgaaatatttcctatgacactcgctaacagtttcatcccctggtcacaccttgctggcccagggcctgagctttttcagacaagcatgacatgggttttcttttcatttcttctgttctccagagtagatcgggcttgtgacacctgtgtgtgtaccttcactcaatattatctttctggaacggagcagaaaaaaataaacttcaattaggtgaaagtttgtgtatttgctcttctcttagcaaaaacttgggtcaggagactactgcatgagagagcagtgtgtgttgagaaaagaaacaactgcccacgttgtccctgggttgactctgatccccaccctcccgaaaaagctttggtttcccctccctagtctccatttaacgttgacaacccagcggtgctccctaatggcccagcaggttgcacaaattgacagtgagctgagatattatcaggacaacaccccattgagcaagttcttgaaacgcagaagtggaggccctttctctgggccactgggcgcctgtggcctttccaccaatcagagctggaggttgcagtggccacctgttgtctcgcaagagaacatcttttaagtttcgctattagtatttaacaatggcctacagagcaggatctggccacaggagaggagcagtgtgatgatctggggtaccaaaaaagaattttttaaaaaaaaaattttacagatagctcttacaaggagccaaaactctggaaagctaagtttttctttgcacactcacaatcctcaccttctgctcattctgttttgcatctgaagcaatctgagcttgattaaaggatgaagaaaagtataatcaaagttacagagactaaacctgaacttgtaatcagacttcgaggatcaggaatataaatacgcttcgcagtggaaacccgctagctgcaagaatgggaattgcaagtgggctgatgtactgcattcagctttgggcggtagagcctagaaaatgaagcgagaactttacccctaaggctctcaggagttaggaatgctcggtgacaatccctaactcctggccattgttttggaaaagtctttctcttaaatttcccttccctgttaggatgcaaatacctttgtgaagggaacaatactcatctgtctgcattttattatttgatttaggatataaggtaagcaaaagatctgagtttagattttgatttagagggaggggaagaatccgggtgatgagctgaagatgtgtatgttgaggcatttagaatgagaaaatcactggaacagaaaaagggcattggtgaaggctgctgacttgacgatttagcccaatctccacgcatttggcagctatctttatttattgttttttttttttttttttttttgagtacctaccatgtgccagacatgattttaggcacttgtgaatgagaaagaggattcaattcccgacatgacacatatagaagtcctcaaagaggactatgattttggctcttggaacacaaaatacacacgaactcacatgcacacgtgtatacatgccctgaaccatcccagtcacctggagatactgtcatggcacagccactagctgctgttgagagaagcgacatgaaaaac

SEQ ID NO: 1243461 - DNA, 4001 bp, Homo sapiens
tcaaaaacctatttttttttttttaatctaaagatccacgaatcccccacaaaagtacaaataaaaccataccaaggccatattgcaatttaggaaagcagcaggcaggactttcaattgacttgatatgatttatcatttttactatttgtaagaatggaaataagttcttagagttttggtcttggagaaagtctgacgttaaggacaaacgacagttattaaaggcagatgactttccagacttgtcttaaatgttccattcttcaccttagaacttatttaaatttgtttcttccaaatactgcagtaatattgatgctccagagagatgtcccacggagattctgctcttgtgcgtctgccctgcacggagctgaggcagtgtctatcagtttcagaagcgagtagtcgtgcagtacttaacctgaaaaacttaatggaaacatgaattaagagaatgatcactgtttagttctatcagaaaactattaaaagtggtccaagggggtatttaaaaagagatattaaagtattttccaagggagccctattcagggtagaagcgcagacactatccctgacctcaccacacaaactaccctcatgtgttgggagggaccaaggggcgctctggtcctgctgacctgcattaatcacggcccggaggtccacactaagaccctgaggcctgggaagcagcctgggtggggtcagagaagcggtggatgaggctccacagcagctcccagggtcccatccccgtagctgtttccttagtggatgcagcagggtcaggcccttccgctgtgacgttttctcctctttattacactggtgggaaagtctccgtgagaggcccgacctagatatggaccacgcagcgagcccgggggtccaagcggcgctcctggggtgcagaggatttgtgacagcctagagaacagaggaaatggttttgaaaaggcaaatggcaggtgactagggacacgatgttttcacttctggcagtcaagtgacagtttcagacactcatgaacgggcttctcgaggggatcccaaggagcctccaggtcggccgccattaccctacacctagggacgggctgcactgcgcatttccgaaagggcaggccccttagccccacccctaggaatgggtgcactgcgcatgtgtgaaagggcaggacttttatcccgccgctagggacgggctacactacccatgtctgaacgggtgtgacaagagggaggagcgagaagggacggggcggagcgggagatgggcaagaataggggcgcggtgcggccaacgtccggcggaggatcgttaccacggcaacgctgctgtggaggccatgaaaggcgaacggccctttgttggctgacaggaaatcgagacactcgtgagggggcttcttgaggcgatcccaagaggcctgagaactgccacatccgcggcccttaacccagccctagggacgggccgcactgcgcatgtctgaaagggagtgacaagaggaggagcgaaggagggtggggctgaggaggaggcggggtgagaaaaggggcgggtcgcgccccacccttgtctgaggagcgttaccttgacaaccctgccgcggaggcagtgagaggccaccggccctttgttgatctgcaaggtatcaaacttcgaacatgacaagcataaaagcctgcagctcgaggagacagggtgtcacaattaccaggtgaaactagccgccctagctccaatgtctcttcagcaggagagatttggaaacagcaaggctcctctccgcagggcgaaactgctgggctgcgaaaggcgggacagggagcggaaccgtcttcaaccgttccgggagttctggtgtctggtccgctcccggctgttggtcgcagggcagagggtctaggatgccagctggctgcgggctgggagatgcagggtgaggcgcgcatcgcggtgcatactgggagttgtagtctctccaccgttccccacggtggatggtggggctacaggaggacaatcccagattgagacaggagcggaggcggggcgcggccgtgcagggagggggagggcggtgtaggcggcttcgtttaccaagcttgctggccattgatttcatgccaaaccctcgccaaggggattaaatcaggagaggaacttgaagggcaggcctggtctcgccagtgaggaggatgtgttgttgggaagtgcaccccgcctttgcctaaatcgagagtgtctggtcctcactcacgcgacttcgacttccagctgctcagctcgattttctttcccactcgcacccgagttctttccagagcgtcccacctcctccagcccatggagccgtctgctttcataagtggctgtggaaactggtctgaggtcccagacgctgtcactgtgctgctgccctccgctctctccaagcaaagcacaagctgagccgccttggaaagacaaccacggcctggcctgggaatgcgcaagttcagagctttgcagggagtgaccatgggctgtggcttcgtgaaaatgtcacgttcaccagtaccctttttgcggatgtggccgtggagccatgaggggggtaatcactgggttacaaaggtgctgctaagagcggaggagaaaaacccaattcccagccatgtgtctggtatgacatttcaccaacccatttaagtgtgcaggcctccaaatatctacctaaagattatgatagattaggcattttacactaaaaatctgtggcttcgtgtccactaaagcctgactgaccagtgcctaaaagaaacagacgataacctgatccctcaggaacagatggtgttctagctttgtggaagtgaatttcaaggtatggagcacttgaggggtctttgaaacctgccaggtctcacatctctgcttttggtgaaaagctcatcaactaacagtagtcaggaatgtgcctttacttcctggggctggtctgttgaaattttgtgtgtggacaatggaaacatccaggagcatttctgctttcctatagcctcttaataattgatgccctaaagtcctatatcctttgattcctggatggtaccagatttcatgctgttaaatctaatctgcaaaaacctgagcgttaatctccatgaatagaagaacttgttgtttcttatttaaatgctcttttttctcttgtcttagattctgagcaggatttccaatacggtgttgaaagaagtagtgagagtgggcatctttttcttataataaatcttaaaaacaattccaaaatttcaccattgacaataatgttaaccatgggattgtcctatagcttataaagaacatatctctttattttgaggtatattctttctatacctaatttgttatagattttatttggaatggattttaaattttgtcaaaataattttaggcatgcataaaaaagtcatgatttttaatctttttgttgtgtaaataaggagtatggcatttattgatttccacatattaaaatattattgcatcccaggaataaatccaacttgatcataataaatgatccttttaaagtgcttttgaatttcatttgcaactacgttgcggatgatttttcatctatgttcatcagggatattggcctgtaattgtttttcttgtaatgtccatctctggtttttgtatcagtgtaatgctggcttcataaaatgagtttggaagtattcctcctccttcaattttttcaaagatttggttctttttaaatgtttagtaaaattcagcaacaaagtcatcagatctaaactccttacccattactgatctattcatattttctatttctttatgcttcagtcttggtgggtggtacttgtctagaaatgtattcatgtcttctcccttatcccatttggtgggatatcattgtacataggagtctgtgtacatagcagtcttatgacctttttttatttctgtt

SEQ ID NO: 1243462 - DNA, 4001 bp, Homo sapiens
ttcaaaaacctatttttttttttttaatctaaagatccacgaatcccccacaaaagtacaaataaaaccataccaaggccatattgcaatttaggaaagcagcaggcaggactttcaattgacttgatatgatttatcatttttactatttgtaagaatggaaataagttcttagagttttggtcttggagaaagtctgacgttaaggacaaacgacagttattaaaggcagatgactttccagacttgtcttaaatgttccattcttcaccttagaacttatttaaatttgtttcttccaaatactgcagtaatattgatgctccagagagatgtcccacggagattctgctcttgtgcgtctgccctgcacggagctgaggcagtgtctatcagtttcagaagcgagtagtcgtgcagtacttaacctgaaaaacttaatggaaacatgaattaagagaatgatcactgtttagttctatcagaaaactattaaaagtggtccaagggggtatttaaaaagagatattaaagtattttccaagggagccctattcagggtagaagcgcagacactatccctgacctcaccacacaaactaccctcatgtgttgggagggaccaaggggcgctctggtcctgctgacctgcattaatcacggcccggaggtccacactaagaccctgaggcctgggaagcagcctgggtggggtcagagaagcggtggatgaggctccacagcagctcccagggtcccatccccgtagctgtttccttagtggatgcagcagggtcaggcccttccgctgtgacgttttctcctctttattacactggtgggaaagtctccgtgagaggcccgacctagatatggaccacgcagcgagcccgggggtccaagcggcgctcctggggtgcagaggatttgtgacagcctagagaacagaggaaatggttttgaaaaggcaaatggcaggtgactagggacacgatgttttcacttctggcagtcaagtgacagtttcagacactcatgaacgggcttctcgaggggatcccaaggagcctccaggtcggccgccattaccctacacctagggacgggctgcactgcgcatttccgaaagggcaggccccttagccccacccctaggaatgggtgcactgcgcatgtgtgaaagggcaggacttttatcccgccgctagggacgggctacactacccatgtctgaacgggtgtgacaagagggaggagcgagaagggacggggcggagcgggagatgggcaagaataggggcgcggtgcggccaacgtccggcggaggatcgttaccacggcaacgctgctgtggaggccatgaaaggcgaacggccctttgttggctgacaggaaatcgagacactcgtgagggggcttcttgaggcgatcccaagaggcctgagaactgccacatccgcggcccttaacccagccctagggacgggccgcactgcgcatgtctgaaagggagtgacaagaggaggagcgaaggagggtggggctgaggaggaggcggggtgagaaaaggggcgggtcgcgccccacccttgtctgaggagcgttaccttgacaaccctgccgcggaggcagtgagaggccaccggccctttgttgatctgcaaggtatcaaacttcgaacatgacaagcataaaagcctgcagctcgaggagacagggtgtcacaattaccaggtgaaactagccgccctagctccaatgtctcttcagcaggagagatttggaaacagcaaggctcctctccgcagggcgaaactgctgggctgcgaaaggcgggacagggagcggaaccgtcttcaaccgttccgggagttctggtgtctggtccgctcccggctgttggtcgcagggcagagggtctaggatgccagctggctgcgggctgggagatgcagggtgaggcgcgcatcgcggtgcatactgggagttgtagtctctccaccgttccccacggtggatggtggggctacaggaggacaatcccagattgagacaggagcggaggcggggcgcggccgtgcagggagggggagggcggtgtaggcggcttcgtttaccaagcttgctggccattgatttcatgccaaaccctcgccaaggggattaaatcaggagaggaacttgaagggcaggcctggtctcgccagtgaggaggatgtgttgttgggaagtgcaccccgcctttgcctaaatcgagagtgtctggtcctcactcacgcgacttcgacttccagctgctcagctcgattttctttcccactcgcacccgagttctttccagagcgtcccacctcctccagcccatggagccgtctgctttcataagtggctgtggaaactggtctgaggtcccagacgctgtcactgtgctgctgccctccgctctctccaagcaaagcacaagctgagccgccttggaaagacaaccacggcctggcctgggaatgcgcaagttcagagctttgcagggagtgaccatgggctgtggcttcgtgaaaatgtcacgttcaccagtaccctttttgcggatgtggccgtggagccatgaggggggtaatcactgggttacaaaggtgctgctaagagcggaggagaaaaacccaattcccagccatgtgtctggtatgacatttcaccaacccatttaagtgtgcaggcctccaaatatctacctaaagattatgatagattaggcattttacactaaaaatctgtggcttcgtgtccactaaagcctgactggccagtgcctaaaagaaacagacgataacctgatccctcaggaacagatggtgttctagctttgtggaagtgaatttcaaggtatggagcacttgaggggtctttgaaacctgccaggtctcacatctctgcttttggtgaaaagctcatcaactaacagtagtcaggaatgtgcctttacttcctggggctggtctgttgaaattttgtgtgtggacaatggaaacatccaggagcatttctgctttcctatagcctcttaataattgatgccctaaagtcctatatcctttgattcctggatggtacagatttcatgctgttaaatctaatctgcaaaaacctgagcgttaatctccatgaatagaagaacttgttgtttcttatttaaatgctcttttttctcttgtcttagattctgagcaggatttccaatacggtgttgaaagaagtagtgagagtgggcatctttttcttataataaatcttaaaaacaattccaaaatttcaccattgacaataatgttaaccatgggattgtcctatagcttataaagaacatatctctttattttgaggtatattctttctatacctaatttgttatagattttatttggaatggattttaaattttgtcaaaataattttaggcatgcataaaaaagtcatgatttttaatctttttgttgtgtaaataaggagtatggcatttattgatttccacatattaaaatattattgcatcccaggaataaatccaacttgatcataataaatgatccttttaaagtgcttttgaatttcatttgcaactacgttgcggatgatttttcatctatgttcatcagggatattggcctgtaattgtttttcttgtaatgtccatctctggtttttgtatcagtgtaatgctggcttcataaaatgagtttggaagtattcctcctccttcaattttttcaaagatttggttctttttaaatgtttagtaaaattcagcaacaaagtcatcagatctaaactccttacccattactgatctattcatattttctatttctttatgcttcagtcttggtgggtggtacttgtctagaaatgtattcatgtcttctcccttatcccatttggtgggatatcattgtacataggagtctgtgtacatagcagtcttatgacctttttttatttctgtt

SEQ ID NO: 1243463 - DNA, 4001 bp, Homo sapiens; identical to SEQ ID NO: 1243462

SEQ ID NO: 1243464 - DNA, 4001 bp, Homo sapiens; identical to SEQ ID NO: 1243462

SEQ ID NO: 1243465 - DNA, 4001 bp, Homo sapiens; identical to SEQ ID NO: 1243462

SEQ ID NO: 1243466 - DNA, 4001 bp, Homo sapiens; identical to SEQ ID NO: 1243461

SEQ ID NO: 1243467 - DNA, 4001 bp, Homo sapiens; identical to SEQ ID NO: 1243462

SEQ ID NO: 1243468 - DNA, 4001 bp, Homo sapiens; identical to SEQ ID NO: 1243462

SEQ ID NO: 1243469 - DNA, 4001 bp, Homo sapiens; identical to SEQ ID NO: 1243462

SEQ ID NO: 1243470 - DNA, 4001 bp, Homo sapiens; identical to SEQ ID NO: 1243462

SEQ ID NO: 1243471 - DNA, 4001 bp, Homo sapiens
gttcaaaaacctatttttttttttttaatctaaagatccacgaatcccccacaaaagtacaaataaaaccataccaaggccatattgcaatttaggaaagcagcaggcaggactttcaattgacttgatatgatttatcatttttactatttgtaagaatggaaataagttcttagagttttggtcttggagaaagtctgacgttaaggacaaacgacagttattaaaggcagatgactttccagacttgtcttaaatgttccattcttcaccttagaacttatttaaatttgtttcttccaaatactgcagtaatattgatgctccagagagatgtcccacggagattctgctcttgtgcgtctgccctgcacggagctgaggcagtgtctatcagtttcagaagcgagtagtcgtgcagtacttaacctgaaaaacttaatggaaacatgaattaagagaatgatcactgtttagttctatcagaaaactattaaaagtggtccaagggggtatttaaaaagagatattaaagtattttccaagggagccctattcagggtagaagcgcagacactatccctgacctcaccacacaaactaccctcatgtgttgggagggaccaaggggcgctctggtcctgctgacctgcattaatcacggcccggaggtccacactaagaccctgaggcctgggaagcagcctgggtggggtcagagaagcggtggatgaggctccacagcagctcccagggtcccatccccgtagctgtttccttagtggatgcagcagggtcaggcccttccgctgtgacgttttctcctctttattacactggtgggaaagtctccgtgagaggcccgacctagatatggaccacgcagcgagcccgggggtccaagcggcgctcctggggtgcagaggatttgtgacagcctagagaacagaggaaatggttttgaaaaggcaaatggcaggtgactagggacacgatgttttcacttctggcagtcaagtgacagtttcagacactcatgaacgggcttctcgaggggatcccaaggagcctccaggtcggccgccattaccctacacctagggacgggctgcactgcgcatttccgaaagggcaggccccttagccccacccctaggaatgggtgcactgcgcatgtgtgaaagggcaggacttttatcccgccgctagggacgggctacactacccatgtctgaacgggtgtgacaagagggaggagcgagaagggacggggcggagcgggagatgggcaagaataggggcgcggtgcggccaacgtccggcggaggatcgttaccacggcaacgctgctgtggaggccatgaaaggcgaacggccctttgttggctgacaggaaatcgagacactcgtgagggggcttcttgaggcgatcccaagaggcctgagaactgccacatccgcggcccttaacccagccctagggacgggccgcactgcgcatgtctgaaagggagtgacaagaggaggagcgaaggagggtggggctgaggaggaggcggggtgagaaaaggggcgggtcgcgccccacccttgtctgaggagcgttaccttgacaaccctgccgcggaggcagtgagaggccaccggccctttgttgatctgcaaggtatcaaacttcgaacatgacaagcataaaagcctgcagctcgaggagacagggtgtcacaattaccaggtgaaactagccgccctagctccaatgtctcttcagcaggagagatttggaaacagcaaggctcctctccgcagggcgaaactgctgggctgcgaaaggcgggacagggagcggaaccgtcttcaaccgttccgggagttctggtgtctggtccgctcccggctgttggtcgcagggcagagggtctaggatgccagctggctgcgggctgggagatgcagggtgaggcgcgcatcgcggtgcatactgggagttgtagtctctccaccgttccccacggtggatggtggggctacaggaggacaatcccagattgagacaggagcggaggcggggcgcggccgtgcagggagggggagggcggtgtaggcggcttcgtttaccaagcttgctggccattgatttcatgccaaaccctcgccaaggggattaaatcaggagaggaacttgaagggcaggcctggtctcgccagtgaggaggatgtgttgttgggaagtgcaccccgcctttgcctaaatcgagagtgtctggtcctcactcacgcgacttcgacttccagctgctcagctcgattttctttcccactcgcacccgagttctttccagagcgtcccacctcctccagcccatggagccgtctgctttcataagtggctgtggaaactggtctgaggtcccagacgctgtcactgtgctgctgccctccgctctctccaagcaaagcacaagctgagccgccttggaaagacaaccacggcctggcctgggaatgcgcaagttcagagctttgcagggagtgaccatgggctgtggcttcgtgaaaatgtcacgttcaccagtaccctttttgcggatgtggccgtggagccatgaggggggtaatcactgggttacaaaggtgctgctaagagcggaggagaaaaacccaattcccagccatgtgtctggtatgacatttcaccaacccatttaagtgtgcaggcctccaaatatctacctaaagattatgatagattaggcattttacactaaaaatctgtggcttcgtgtccactaaagcctgactgaccagtgcctaaaagaaacagacgataacctgatccctcaggaacagatggtgttctagctttgtggaagtgaatttcaaggtatggagcacttgaggggtctttgaaacctgccaggtctcacatctctgcttttggtgaaaagctcatcaactaacagtagtcaggaatgtgcctttacttcctggggctggtctgttgaaattttgtgtgtggacaatggaaacatccaggagcatttctgctttcctatagcctcttaataattgatgccctaaagtcctatatcctttgattcctggatggtaccagatttcatgctgttaaatctaatctgcaaaaacctgagcgttaatctccatgaatagaagaacttgttgtttcttatttaaatgctcttttttctcttgtcttagattctgagcaggatttccaatacggtgttgaaagaagtagtgagagtgggcatctttttcttataataaatcttaaaaacaattccaaaatttcaccattgacaataatgttaaccatgggattgtcctatagcttataaagaacatatctctttattttgaggtatattctttctatacctaatttgttatagattttatttggaatggattttaaattttgtcaaaataattttaggcatgcataaaaaagtcatgatttttaatctttttgttgtgtaaataaggagtatggcatttattgatttccacatattaaaatattattgcatcccaggaataaatccaacttgatcataataaatgatccttttaaagtgcttttgaatttcatttgcaactacgttgcggatgatttttcatctatgttcatcagggatattggcctgtaattgtttttcttgtaatgtccatctctggtttttgtatcagtgtaatgctggcttcataaaatgagtttggaagtattcctcctccttcaattttttcaaagatttggttctttttaaatgtttagtaaaattcagcaacaaagtcatcagatctaaactccttacccattactgatctattcatattttctatttctttatgcttcagtcttggtgggtggtacttgtctagaaatgtattcatgtcttctcccttatcccatttggtgggatatcattgtacataggagtctgtgtacatagcagtcttatgacctttttttatttctg

SEQ ID NO: 1243472 - DNA, 4001 bp, Homo sapiens
tgttcaaaaacctatttttttttttttaatctaaagatccacgaatcccccacaaaagtacaaataaaaccataccaaggccatattgcaatttaggaaagcagcaggcaggactttcaattgacttgatatgatttatcatttttactatttgtaagaatggaaataagttcttagagttttggtcttggagaaagtctgacgttaaggacaaacgacagttattaaaggcagatgactttccagacttgtcttaaatgttccattcttcaccttagaacttatttaaatttgtttcttccaaatactgcagtaatattgatgctccagagagatgtcccacggagattctgctcttgtgcgtctgccctgcacggagctgaggcagtgtctatcagtttcagaagcgagtagtcgtgcagtacttaacctgaaaaacttaatggaaacatgaattaagagaatgatcactgtttagttctatcagaaaactattaaaagtggtccaagggggtatttaaaaagagatattaaagtattttccaagggagccctattcagggtagaagcgcagacactatccctgacctcaccacacaaactaccctcatgtgttgggagggaccaaggggcgctctggtcctgctgacctgcattaatcacggcccggaggtccacactaagaccctgaggcctgggaagcagcctgggtggggtcagagaagcggtggatgaggctccacagcagctcccagggtcccatccccgtagctgtttccttagtggatgcagcagggtcaggcccttccgctgtgacgttttctcctctttattacactggtgggaaagtctccgtgagaggcccgacctagatatggaccacgcagcgagcccgggggtccaagcggcgctcctggggtgcagaggatttgtgacagcctagagaacagaggaaatggttttgaaaaggcaaatggcaggtgactagggacacgatgttttcacttctggcagtcaagtgacagtttcagacactcatgaacgggcttctcgaggggatcccaaggagcctccaggtcggccgccattaccctacacctagggacgggctgcactgcgcatttccgaaagggcaggccccttagccccacccctaggaatgggtgcactgcgcatgtgtgaaagggcaggacttttatcccgccgctagggacgggctacactacccatgtctgaacgggtgtgacaagagggaggagcgagaagggacggggcggagcgggagatgggcaagaataggggcgcggtgcggccaacgtccggcggaggatcgttaccacggcaacgctgctgtggaggccatgaaaggcgaacggccctttgttggctgacaggaaatcgagacactcgtgagggggcttcttgaggcgatcccaagaggcctgagaactgccacatccgcggcccttaacccagccctagggacgggccgcactgcgcatgtctgaaagggagtgacaagaggaggagcgaaggagggtggggctgaggaggaggcggggtgagaaaaggggcgggtcgcgccccacccttgtctgaggagcgttaccttgacaaccctgccgcggaggcagtgagaggccaccggccctttgttgatctgcaaggtatcaaacttcgaacatgacaagcataaaagcctgcagctcgaggagacagggtgtcacaattaccaggtgaaactagccgccctagctccaatgtctcttcagcaggagagatttggaaacagcaaggctcctctccgcagggcgaaactgctgggctgcgaaaggcgggacagggagcggaaccgtcttcaaccgttccgggagttctggtgtctggtccgctcccggctgttggtcgcagggcagagggtctaggatgccagctggctgcgggctgggagatgcagggtgaggcgcgcatcgcggtgcatactgggagttgtagtctctccaccgttccccacggtggatggtggggctacaggaggacaatcccagattgagacaggagcggaggcggggcgcggccgtgcagggagggggagggcggtgtaggcggcttcgtttaccaagcttgctggccattgatttcatgccaaaccctcgccaaggggattaaatcaggagaggaacttgaagggcaggcctggtctcgccagtgaggaggatgtgttgttgggaagtgcaccccgcctttgcctaaatcgagagtgtctggtcctcactcacgcgacttcgacttccagctgctcagctcgattttctttcccactcgcacccgagttctttccagagcgtcccacctcctccagcccatggagccgtctgctttcataagtggctgtggaaactggtctgaggtcccagacgctgtcactgtgctgctgccctccgctctctccaagcaaagcacaagctgagccgccttggaaagacaaccacggcctggcctgggaatgcgcaagttcagagctttgcagggagtgaccatgggctgtggcttcgtgaaaatgtcacgttcaccagtaccctttttgcggatgtggccgtggagccatgaggggggtaatcactgggttacaaaggtgctgctaagagcggaggagaaaaacccaattcccagccatgtgtctggtatgacatttcaccaacccatttaagtgtgcaggcctccaaatatctacctaaagattatgatagattaggcattttacactaaaaatctgtggcttcgtgtccactaaagcctgactggccagtgcctaaaagaaacagacgataacctgatccctcaggaacagatggtgttctagctttgtggaagtgaatttcaaggtatggagcacttgaggggtctttgaaacctgccaggtctcacatctctgcttttggtgaaaagctcatcaactaacagtagtcaggaatgtgcctttacttcctggggctggtctgttgaaattttgtgtgtggacaatggaaacatccaggagcatttctgctttcctatagcctcttaataattgatgccctaaagtcctatatcctttgattcctggatggtacagatttcatgctgttaaatctaatctgcaaaaacctgagcgttaatctccatgaatagaagaacttgttgtttcttatttaaatgctcttttttctcttgtcttagattctgagcaggatttccaatacggtgttgaaagaagtagtgagagtgggcatctttttcttataataaatcttaaaaacaattccaaaatttcaccattgacaataatgttaaccatgggattgtcctatagcttataaagaacatatctctttattttgaggtatattctttctatacctaatttgttatagattttatttggaatggattttaaattttgtcaaaataattttaggcatgcataaaaaagtcatgatttttaatctttttgttgtgtaaataaggagtatggcatttattgatttccacatattaaaatattattgcatcccaggaataaatccaacttgatcataataaatgatccttttaaagtgcttttgaatttcatttgcaactacgttgcggatgatttttcatctatgttcatcagggatattggcctgtaattgtttttcttgtaatgtccatctctggtttttgtatcagtgtaatgctggcttcataaaatgagtttggaagtattcctcctccttcaattttttcaaagatttggttctttttaaatgtttagtaaaattcagcaacaaagtcatcagatctaaactccttacccattactgatctattcatattttctatttctttatgcttcagtcttggtgggtggtacttgtctagaaatgtattcatgtcttctcccttatcccatttggtgggatatcattgtacataggagtctgtgtacatagcagtcttatgacctttttttatttctg

SEQ ID NO: 1243473 - DNA, 4001 bp, Homo sapiens; identical to SEQ ID NO: 1243472

SEQ ID NO: 1243474 - DNA, 4001 bp, Homo sapiens; identical to SEQ ID NO: 1243472

SEQ ID NO: 1243475 - DNA, 4001 bp, Homo sapiens; identical to SEQ ID NO: 1243472

SEQ ID NO: 1243476 - DNA, 4001 bp, Homo sapiens
ttcaaaaacctatttttttttttaatctaaagatccacgaatcccccacaaaagtacaaataaaaccataccaaggccatattgtgatttaggaaagcagcaggcaggactttcaattgacttgatatgatttatcatttttactatttgtaagaatggaaataagttcttagagtttttgtcttggagaaagtctgacgttaaggacaaacgacagttattaaaggcagatgactttccagacttgtcttaaatgttccattctttaccttagaacttatttaaatttgtttcttccaaatactgcagtaatattgatgctccagagagatgtcccacggagattctgctcttgtgcgtctgccctgcacggagctgaggcagtgtctatcagtttcagaagcgagtagtcgtgcagtacttaacctgaaaaacttaatggaaacatgaattaagagaatgatcactgtttagttctatcagaaaactattaaaagtggtccaagggggtatttaaaaagagatattattttccaagggagccctattcagggtagaagcgcagacactatccctgacctcaccacacaaactaccctcatgtgttgggagggaccaaggggcgctctggtcctgctgacctgcattaatcacggcccggaggtccacactaagaccctgaggcctgggaagcagcctgggtggggtcagagaagcggtggatgaggctcccacagcagcttccagggtcccatccccgtagctgtttccttagtggatgcagcagggtcaggcccttccgctgtgacgttttctcctctttattacactggtgggaaagtctccgtgagaggcccgacctagatatggaccacgcagcgagcccgggggtccaagcggcactcctggggtgcagagaatttgtgacagcctagagaacagaggaaatggttttgaaaaggcaaatggcaggtgactagggacacgatgttttcacttctggcagtcaagtgacagtttcagacactcatgaacgggcttctcgaggggatcccaaggagcctgagacctgccaggtcggccgccattaccctacacctagggacgggctgcactgcgcatttccgaaagggcaggccccttagccccacccctaggaatgggtgcactgcgcatgtgtgaaagggcaggacttttatcccgccgctagggacgggctacactacccatgtctgaacgggtgtgacaagagggaggagcgagaagggacggggcggagcgggagatgggcaagaataggggcgcggtgcggccaacgtccggcggaggatcgttaccacggcaacgctgctgtggaggccatgaaaggcgaacggccctttgttggctgacaggaaatcgagacactcgtgagggggcttcttgaggcgatcccaagaggcctgagaactgccacatccgcggcccttaacccagccctagggacgggccgcactgcgcatgtctgaaagggagtgacaagaggaggagcgaaggagggtggggctgaggaggaggcggggtgagaaaaggggcgggccgcgccccacccttgtctgaggagcgttaccttgacaaccctgccgcggaggcagtgagaggccaccgaccctttgttgatctgcaaggtatcaaacttcgaacatgacaagcataaaagcctgcagctcgaggagacagggtgtcacaattaccaggtgaaactagccgccctagctccaatgtctcttcagcaggagagatttggaaacagcaaggctcctctccgcagggcgaaactgctgggctgcgaaaggcgggacagggagcggaaccgtcttcaaccgttccgggagttctggtgtctggtccgctcccggctgttggtcgcagggcagagggtctaggatgccagctggctgcgggctgggagatgcagggtgaggcgcgcatcgcggtgcatactgggagttgtagtctctccaccgttccccacggtggatggtggggctacaggaggacaatcccagattgagacaggagcggaggcggggcgcggccgtgcagggagggggagggcggtgtaggcggcttcgtttaccaagcttgctggccattgatttcatgccaaaccctcgccaaggggattaaatcaggagaggaacttgaagggcaggcctggtctcgccagtgaggaggatgtgttgttgggaagtgcaccccgcctttgcctaaatcgagagtgtctggtcctcactcacgcgacttcgacttcccgctgctcagctcgattttctttcccactcgcacccgagttctttccagagcgtcccacctcctccagcccatggagccgtctgctttcataagtggctgtggaaactggtctgaggtcccagacgctgtcactgtgctgctgccctccgctctctccaagcaaagcacaagctgagccgccttggaaagacaaccacggcctggcctgggaatgcgcaagttcagagctttgcagggagtgaccatgggctgtggcttcgtgaaaatgtcacgttcaccagtaccctttttgcggatgtggccgtggagccatgaggggggtaatcactgggttacaaaggtgctgctaagagcggaggagaaaaacccaattcccagccatgtgtctggtatgacatttcaccaacccatttaagtgtgcaggcctccaaatatctacctaaagattatgatagattaggcattttacactaaaaatctgtggcttcgtgtccactaaagcctgactggccagtgcctaaaagaaacagacgataacctgatccctcaggaacagatggtgttctagctttgtggaagtgaatttcaaggtatggagcacttgaggggtctttgaaacctgccaggtctcacatctctgcttttggtgaaaagctcatcaactaacagtagtcaggaatgtgcctttacttcctggggctggtctgttgaaattttgtgtgtggacaatggaaacatccaggagcatttctgctttcctatagcctcttaataattgatgccctaaagtcctatatcctttgattcctggatggtaccagatttcatgctgttaaatctaatctgcaaaaacctgagcgttaatctccatgaatagaagaacttgttgtttcttatttaaatgctcttttttctcttgtcttagattctgagcaggatttccaatacggtgttgaaagaagtagtgagagtgggcatctttttcttataataaatcttaaaaataattccaaaatttcaccattgacaataatgttaaccatgggattgtcctatagcttataaagaacatatctctttattttgaggtatattctttctatacctaatttgttatagattttatttggaatggattttaaattttgtcaaaataattttaggcatgcataaaaaagtcatgatttttaatctttttgttgtgtaaataaggagtatggcatttattgatttccacatattaaaatattattgcatcccaggaataaatccaacttgatcataataaatgatccttttaaagtgcttttgaatttcatttgcaactacgttgtggatgatttttcatctatgttcatcagggatattggcctgtaattgtttttcttgtaatgtccatctctggtttttgtatcagtgtaatgctggcttcataaaatgagtttggaagtattcctcctccttcaattttttcaaagatttggttctttttaaatgtttagtagaattcagcaacaaagtcatcagatctaaactccttacccattactgatctattcatattttctatttctttatgcttcagtcttggtgggtggtacttgtctagaaatatattcatgtcttctcccttatcccatttggtgggatatcattgtacataggagtctgtgtacatagcagtcttatgacctttttttatttct

SEQ ID NO: 1243477 - DNA, 4001 bp, Homo sapiens
aggccaggctgctggtcgggcaggcattcagtgaggacagcatctctgtaagggtcatgaggacccagcaagagccagtctgggcacgggtgcatgccctgggcaggggtgcagctggtccagcaaggccttgttactatttgctgttaaacaaaaacatgaggggagcttggggctggcctggccacagtttgtgaagcctggagacggttgctaagggagggtggtgctgcttggagaatgttgctaagggcaggatggtgtcagggcagctcagggagaagctcccagtgctgaggggctgggctgggctgggaagctggggcccacgggtggggcacgccagcactccctgcgcctagggcataaccgtggcttcctggccccttgccaccgactggtgctgtaacctcccactgtggagttttgggggagcaggaggttgggggctagtagcgtgggggctgtagagttacgaaccccaagagtcgtgctggcaagtggggctgtggctgaaacacacttcatcatgtctacacctcagacctcccctggccacgccctgaacttggccacaccagcccacattcccagcgaccctgtgcactcagccctggcctgccaccccctgggccttgtacccctggccataccttcagccctccatcctccatcttcacacccacagccacagccctcggccaccagcccccacatatatactaacaagcctgcgccaaccccagtaatacccacagtccagcactaaagtgccccccacacccacagccctccgctgcagacccctggccacaccctgagcctacacagcagccttctccatccccacacccgcagccctggggctgaggcccctggccacaaacctgcatcccttcctgagacccctgaccatagcctcagccactcaccccctccaatacccgcagccctttatcaaggcgccctgaccctcagcacccctttgtccacacaccctcagccctctggccacaccctcagcctgcactgaaggccccagtccacatccacacactaacattataagactcccaggtactatgcggagatcccctgcgtagagacctccccaccacatccccctcctccactgccacctcctgaccacaccctcggtctcagcaaccatcttctagctctgccttttacactagggcttccagtgaccacggcctgggctctgcccggctgccccatcttccaccaaaaactcctcgccagtgaccacactcccatccctaagtggcagtttctgggactgtgagcaccggtggttcctacgttacagggaccataaccccagtccacgctgcactccccttccctttccctgggtgcaacctcccaccagggaccccaagacccgcacttggttcaccaagggtaacgtccaggggagcttggatgccacagggtgcttggcccaagcactgggcggatcctgcgtgcagtgctcactcctgtccgtggaaagatggattcttggtcatctcagcgcggtcaggtggcgctgggttgcaggccgcagccccatgggtctgcaggccatggatggagtggccacacccgtgaactggagccacccgtcccgctcccactgggacagctggagtcatcaatcagccggaccaggaggtgggggctgcgaggtggaatgcttggggccagggcagggccgctcagctggctcctcggctgggaccgccggaggttgggaccctttccaggctgctccccccaaccctcatcgtgcaggatactgattggggtggcgggcatctgggtctcctatgggcttctacctcgcggctgctcctgaagtgtgcgttcggaaggacagaacgacgcaggaatggaccgatggacgcgggagaccaggcggctccgcagctccgctccctgccggctcccgggtgggactgcagcccaggcggctccgccgtattatcccctgtttctcggtctccatagagacggcgagtcccacccccgaggctgtctcggcgggagagtgaccaaggtcacgccggccccgcccacgaggccccgccctccccgagactctccgggagccgcatcccgcccctcccccgcaactccgcggtcctcgcgacggcgagaccagcgctctgcagttcggggcgtcttcggacggccccctgaggaaacagcctcccatcctgggatgtgcctaaagctctaagcggccccaatctccagaagagatccagctccccagagagtcaaccagaggccactggggagctgcgcggggcattggtggggcttggggaatcgggaaggagctctccctcagtgacaggggtatacggttgactcaagagcactgccatccactgaacggatggcacccccaggccacaactcccgtgctctcttgggtaggattcagagcctggagcagtggggaagaagggaggggactccctacgagcgaatcgcgctcgcccagccccaggatgctggcattcgacggcagccctgctgccggggaaaagctgcgggacctcctggctcggccccctcctttcgccgccacctccccacggcctcgcagcctcagcgcccactgctgctttcggagcccaaagcctgctttctctcggcctcccagtgcaaagcccatctttaagaaaaataacctcctccaggccgccttctaaggcctttcctaaccacgagccgcacgtgagcacctccacagggcagcctgggtggctacctactatacagggacctcctccccgcccccggtccactggccagggtcgggcttctggatggcccgtggcccctgccattaagaaagtaagcgcgacgtccgcaaaagcataaaaaagtttattggagcatcacagccggtggggcgggtattgctgagtcgtgggggagggaggccgatcccgccggccgtaggggcccctaaagtgcactcggtgcggcaaggatggggtgttgcatagagagtcaggccggccgctctaactcggccctccggcctctcggcccagctaagccagaccagcctcccggccgcccggcgccctgggctcgccgctgctcgggctcacgaaaacggcgggcgcacgcgcctgccgcgccagcgtgggctgtcggccccggccccgcggggcggccagagcggcgctgcccaggcgcgtctgcgccactggaatctcgtccacggactctgccgacgccgagtggtaggcgccggcagggccagcggcgtgcacagggctggcgtccgcggaatccgtcgacgagctggagcggcggctgggggccctaggccctgcgcaagggaagggaacatgagcccagtggctgcggctcgcttgtggctctgccttcccctccctcgagttcccagagcaggacccggacagggagaggcgctcacccgacgccggatccgaggtctcagacgttcgcactttatacacgcgcctcttcctctttttctgcagagacacgggggagcctgagggccccacatcgccaaaagaagcagaggcgagcgccagggtagaggcttctttctatcccactccacctggaccggaggcccagcacagtccctcctacctggggtcggatccggggaggcagggcgagagtgtctggggaagagggtggtggaggttccgcttggccacgggtggcaagaaactgggagggactgagggggaagcaggagggtaagcctggggcctgttccccaaatccctccccactggaggtgctgagagaagcttcccttcctgttagctcagagaagggcctgacccatgccccgaccttagcctacccccttctcctgcctcgatggccctgccatgctaactggagatgcccagtggcacatgcccaggttgcactcacttggcattcactgctgctggcccggcctggccagggggctctgggcgcatatg

SEQ ID NO: 1243478 - DNA, 4001 bp, Homo sapiens
tcccacggtgactggctgtgccttgagggctaggacctcacactgtggcaggtgtcctcagcacacctggaccccttctctcccagtgacatccacaaccagaaacacagcgatgcacaccagtgatttccatgcactttaatgaggtccagcactcaggaggattagcgcccaccaccagctatctgggcaggggagggctggagggcccggtgcaggcgtcaggcttaggacagggaagggggctcaggatagggaagggtcctcaggacaggggaaggggctcagaagagagcagggggcttaggacaggaaggggcactcaggacggggcagggaaggtgtggggggcagtcgccacctgggtaggaagcagtggtgttttggacagcaggggttggtcctccagtgacccaggtggccaacccaggcctgactcacggctttttggggacatagtggtggatccagtccaagtagtaggtgacacgggtgtagatgccaggccggttgggctgggcacagccctcgccccagctgaccacgcccgcctgcagccaggtgccattcaccttgcacaccaggggccctccggagtcgccctgggaaggtcagaggtcagcgctcgccgaacaggcctgggagtgggggttggggggcggggggcgggggacaggcggggcccacctggcatgagtccctccgggtgttcccggcacacagcatgtcgtcacggacgatgcggacgtcgtctcccgtgtaggcgccaaggtggtattttgcgtcacaaatgtggttttccattatggggaccttcacctgcttcagaggaaatggcggtgggaggcgctctgcaggtggggaagagggtgcagcctcaggagggggccgggcaacccccacctggagcccagagggagcccaggggctgggctgtggctaagaccctggccccacctccactgtccccagacccaccatcattgtccacatcgccccagccagtgacccagcacggcatccccggggggaaggtctctgaggcagggggcagggtgaccgtgtggacgtggctggagacgttcaccggctcctccagctccagcagggcgatgtccgctccgatctgggcggtgtagaactgtgggtgcacgatgatcctgctgaccggcagcagctggtcctggtagtagaggtgctgctcccgcagttgcaccctgagggcggccagatccttgacgtccctgggcagcggaggatcccactcagggccctgggcagcccccaggagcacccgggagccagggctcacatccagcccttccccacccctccaggccccgggagactcacggtcccacgcagtgcgctgcggtcagcacccactgggggtggatgagggagcccccgcagaagtgcatccagtatgggccgtggactctcaggctcacctgccagggccacttgctcctgggggcctcctgacccccgacgatgcccactcgctgcagggcctggcctggggctggggcaggtgccaggtcaggaccaggaagcagccccaggcctgggcccagcccttccctgtgtgggggccagcccgacctccccagaacccacccaggccctgacctgtggaatgtggtgaggggcagggtggaccccggctgggactcaccaggggccgcgtaggcgcggctcgccaggacgggcagcgccagcagcagcagattcagcatctggggagcaaggaggagcatcgtgggcctggccgggcctcacagggcagggctgggggctacagattgtggggtgaagaatggagctgggacggggggaccggggtgggtccaggcctgcgggcctgggtcttggtgctctgagtctgaggctgggccactctgctccaggtgacgctgatgtcagggtctctgagagtggggacttaccctggccgctccctgttccttctacccagtgggctctcccctccccatttatccttccagatcaggagggggcggaggaggggcgctgggtcctcccatccagactcggaggaagtggatgactcagacccagggcccccgtgtaacacgtgcccccgccaccccgatgccctctgtgtgtggggctgccaggcaggccccgctgagggctgagcactggagactggcagctccacctgtcagctggtggatcccagcactggaacccaccaccttcccgctggtgggatctgctcctgcccctgtctcggtgccaggaggccttcaggcattgctgcacccaggtggcctggctgccccaggctacaagacccgtcgctcctgaaacctgtttccccaagagggacacgggtgaggaactcatgtccatgggccacgctccaagagacgggaaggtgcccacggggtggggacatgacgggtgacacccctcctacggactccgaatccacgggggtggggccagccctcctcgactcacttggttgggggctcacgtgagacccctttgtcagatggggaaacagccttgagaggggacagcaccaagtgtcctcagccaggaaggggccctgctccccacccgccgtatgagacccaagtcctcctacgagtcctcaatgtccacctctggggctgtccgtgcaggtcccctggtctgcaggtgcctccttatcatgggatctgagcttcatacgcagagggaagagcagagaggagtgcaggtgcaaccccaggaggcccagcccagctccccatggactcacccccaacttcagccccagctccccatggactagtcccagccccagccccagctccccatggtctcatccccggccccagctccctgtgctctccatcccattcagcgctgacactgtccctgcaggtccgtccaccccacctcccgactcccctgggcctgttggtcactggggcctccagcccacctcctccgcttctgagccccaggaccccctgcctgccccccgacccccaacacagggccactccggggctcctcctgcccccaccctgcctgggaccagcctggtttggggctgactctgcactgcggggccatatccatctggactccttccgggctgcaccccccgggggacaggcaggggtggcccagaccgctcctgctcatgaccctgcttctcctccattctctggacaaactccccagaggcctccacctgccccgtcctggttccatgaatgaggcccacaagatgggaccttcaggagcccaggaggtgaggggatggggtgacgggggacaccagggatgagggtgtggcagggacacgggagacaccagggctgacggtgaagaagagactcaggggacaccagggctgggagaacccagggacacacggggacaccggggctgtggtgtgcagagggctctgggacccccgagtcaggggctctggggccgctcctcctaggaatgctccgattgggtcaggcctgggaggcggaccaatcagcaccatggggatgcgagagctttgattggctaacactgggccaatcagggcgcgtcctgggcaccccgccccgatccccggccgctcccctggggctgctgcagggctggggtcccaggggaggtggatggacctgtgcggccctgccccggcgcctctcaggaagccccgcatcctatctctgccgtcccgcagcaaaaagctgaactcccgtcacgtacaaccagcaacgaacaaaaacgataacaaacccataattcacagtggaaaggactctgcgctcaggaaggttccatccagttcagaatgaagacgcagaataaagattccttgagaccctgtaactagccaagttctcatcagactatgtattcatttgcttatttataactgaatagactcatggtcccctgttttattcaattattttaatttctttctttttcccaatcatttttctaatatgcaaactcatcctgatgcg

SEQ ID NO: 1243479 - DNA, 4001 bp, Homo sapiens
ggggaccagggctgcccaggaggccccgtcccacggtgactggctgtgccttgagggctaggacctcacactgtggcaggtgtcctcagcacacctggaccccttctctcccagtgacatccacaaccagaaacacagcgatgcacaccagtgatttccatgcactttaatgaggtccagcactcaggaggattagcgcccaccaccagctgcctgggcaggggagggccggagggcccggtgcaggcgtcaggcttaggacagggaagggggctcaggatggggaagggtcctcaggacaggggaaggggctcagaagagagcagggggcttaggacaggaaggggcactcaggacggggcagggaaggtgtggggggcagtcgccacctgggtaggaagcagtggtgttttgaacaggaggggctggctctccagtgacccaggtggacaccccaggcctgactcacggctttttggggacatagtggtggatccagtccaagtagtaggtgacacgggtgtagatgccaggccggttgggctgggcacagccctcgccccagctgaccacgcccgcctgcagccaggtgccattcaccttgcacaccaggggccctccggagtcgccctgggaaggtcagaggtcagcgctcgccgaacaggcctgggagtgggggttggggggcggggggcgggggacaggcggggcccacctggcatgagtccctccgggtgttcccggcacacagcatgtcgtcacggacgatgcggacgtcgtctcccgtgtaggcgccaaggtggtattttgcgtcacaaatgtggttttccattatggggaccttcacctgcttcagaggaaatggcggtgggaggcgctctgcaggtggggaagagggtgcagcctcaggagggggccgggcaacccccacctggagcccagagggagcccaggggctgggctgtggctaagaccctggccccacctccactgtccccagacccaccatcattgtccacatcgccccagccagtgacccagcacggcatccccggggggaaggtctctgaggcagggggcagggtgaccgtgtggacgtggctggagacgttcaccggctcctccagctccagcagggcgatgtccgctccgatctgggcggtgtagaactgtgggtgcacgatgatcctgctgaccggcagcagctggtcctggtagtagaggtgctgctcccgcagttgcaccctgagggcggccagatccttgacgtccctgggcagcggaggatcccactcagggccctgggcagcccccaggagcacccgggagccagggctcacatccagcccttccccacccttccaggccccgggagactcacggtcccacgcagtgcgctgcggtcagcacccactgggggtggatgagggagcccccgcagaagtgcatccagtatcggtcgcggactctcaggctcacctgccagggccacttgctcctgggggcctcctgacccccaacgatgcccactcgctgcagggcctggcctggggctggggcaggtgccaggtcaggaccaggaagcagccccaggcctgggcccagcccttccctgtgtgggggccagcccgacctccccagaacccacccaggccctgacctgtggaatgtggtgaggggcagggtggaccccggctgggactcaccaggggccgcgtaggcgcggctcgccaggacgggcagcgccagcagcagcagattcagcatctggggagcaaggaggagcatcgtgggcctggccgggcctcacagggcagggctgggggctacagattgtggggtgaagaatggagctgggacggggggaccggggtgggtccaggcctgcaggcctgggtcttggtgctctgagtctgaggctgggccactctgctccaggtgacgctgatgtcagggtctctgagagtggggacttaccctggccgctccctgttccttctacccagtgggctctcccctccccatttatgcttccagatcaggagggggcggaggaggggcgctgggtcctcccatccagactcggaggaagtggatgactcagacccagggcccccgtgtaacacgtgcccccgccaccccgatgccctctgtgtgtggggctgccaggcaggccccgctgagggctgagcactggagactggcagctccacctgtcagctggtggatcccagcactagaacccaccaccttcccgctggtgggatctgctcctgcccctgtctcggtgccaggaggccttcaggcattgctgcacccaggtggcctggctgtcccaggctacaagacccatcgctcctgaaacctgtttccccaagagggacacggggtgaggaactcatgtccatgggccaccctccaagagacgggaaggtgcccacggggtggggacatgacgggtgacacccctcttacggactccgaatccacgggggtggcgccagccctcctcgactcacttggtgggaggctcacatgagacccctttgtcagatggggaaacagccttgagaggggacagcaccaagtgtcctcagccaggaaggggccctgctccccacccgccgtatgagacccaagtcctcctacgagtcctcaatgtccacctctggggctgtccgtgcaggacccctggtctgcaggtgcctccttatcatgggatctgagcttcatcggcagagggaagggcagacaggagtgcaggtgcaaccccaggagacccagcccagctccccatggactcacccccaaccccagcccagctccccatggactcacccccagccccagcccagctccccatggactcacccccagccccagcccagctgcccatggactagtcccagccccagccccagctccccatggactcacccccagccccagcccagctccccatggactcacccccagccccagcccagctccccatggactagtcgcagcccccggccccagctccccatggtctcacccccagctccagacccagctccccatggactagtcccagccccagcccagctccccatggtctcacccccagccccagcccagctccccatggactagtcccatcccccggccccagctccccatggtctcacccccagccccagcccagctccccatggtctcacccccagccccagcccagctccccatggactcacccccagccccagcccagctccccatggactagtcccagcccccggccccagctccccatggtctcacccccagccccagcccagctccccatggtctcacccccggccccagctccctgtggacttgcccccggccccagctccctgtgctctccatcccattcagcgctgacactgtccctgcaggtccgtccaccccacctcctgactcccctgggcctgttggtcactggggcctccagcccacctcctccgcttctgagccccaggaccccctgcctgccccccgacccccaacacagggccactccagggctcctcctgcccccaccctgcctgggaccagcctggtttggggctgactctgcactgcggggccatatgcatctggactccttccgggctgcaccccccgggggacaggcaggggtggcccagaccgctcctgctcatgaccctgcttctcctccattctctggacaaactccccagaggcctccacctgccccgtcctggttccatgaatgaggcccacaagatgggaccttcaggagcccaggaggtgaggggatggggtgacgggggacaccagggatgagggtgtggcagggacacgggagacaccagggctgacggtgaagaagagactcaggggacaccagggctgggagaacccagggacacacggggacaccggggctgtggtgtgcagagggctctgggacccccgagtcaggggctctggggccgctcctcctaggaatg

SEQ ID NO: 1243480 - DNA, 4001 bp, Homo sapiens
cgctcgctggccaggctccggggattggggtgggggacgcgagggcccacctggcaggagtcgtgattttcgctccccgcacacagcatgtcatcgcggacgatttgaaagctgtggcccgtatggaggccggtgtgatattccgcgttgcaaaggtggttttccactacggggacttccacctccttcagcgggtatggcggcggcaggtgcactgggggcggaggggggcgtggagccgggtctggggccggctgggtgctgcttcgtggacttggtggcagagtcacgggcaggggagatggcaccatgggcccagtgctgttctgtgcctgcagccccggggaaggggcggtgaatgcagtccaggcccctccgctgaggctggtcctgggtccctggcctcatttaagccccatctggggaagggaggggagggccctggaggttgccaagctgggctccatggcacgggggtgcagagcccgacccgtgtctccccctgggctcagctgactttcgtctgggctaggcccatggtccacggttggccctagccgaggggaacacagggcgctgggctcagcttccccgctgtgtggggcggaatagcgggacagtggctcaggccccttctgagtgacccagaggtcacagcccagggttgccgctcaggctgtaccccaaagctttgctctgaattgtggataaaatggggacaagaccttctagaagtgaaaatgtgcctcgtggagggccacagtgagcttcgtccagccccccacagcactgccacgaccccgattcccaggcccctgccttgtctgtagcacagggatggagggcaggcaggtctcatcccagcaccggtctctctccttccagcaagacccccgtgtgatttctctctccacatagcaagtccgtgacgtacaaacttttgatgcaccctttcaggcaaggggaaaccgaggcacggaggtgctaagggactctccaaacccctggggtgggggacgcccaggccctttggactcaccgtctctgctcagggcacctgctgcctctcgccaccgcctgctccatccatcctggcctccacagtccccctccctgagccgccctgagggaccctgtcaccccacggactggcctgtggctgtgacttggtgcccacctggcccggcctcccgctgtccccaacacccaccattattgtccacgtcgccccagccagtgacccagcacggcatccccggggggaaggtctccgaggcagggggcagcgtgaccgtgtggatgtggctggagatgttcacgggctcctccagctccagcagggcgatgtccgccccggtctggatgatgtagaactgtgggtgcacgatgatcctgctgaccggcagcagctggtcctggtagtagaggtgctgctcccgcagttgcaccctgagggcggccagatccttgatgtccctgggcagcggaggatcccactcagggccctgggcagcccccaggagcacccgggagccagggctcacatccagcccttgcccacccctccaggccccaggagactcacggttccacgcagtgcgccgcggttagcacccactgggggtggatgagggagcccccgcagaagtgcatccagtatgggccgcggactctcaggctcacctgccagggccacttgctcctgggggcctcctgccccccaacaatgcccgtttgctgcagggcctggcctggggctggggcaggtgccaggtcaggaccaagaagccgccccacgcctgggaccagcccttccctgtgtgggggccagcccggcctccccagaacccacccaggccctgatctgtggaatgtggtgaggggcagggtggaccccggctgggactcaccaggggccacgtaggccgggctcgccaggacgggcagcgccagcagcagcaggctcagcatctggggagcaaggaggagcatcgtgggcctggccgggcctcacagggcagggctgggggctacagattgtggggtgaagaatggagctgggacggggggaccggggtgggtccaggcctgcgggcctgggtcttggtgctctgagtctgaggctgggccactctgctccaggtgacgctgatgtcagggtctctgagagtagggacttaccctggccactccctgttccttctacccagcgggctctcccctccccatttatgcttccagatcaggagggggcggaggaggggcgctgggtcctcccatccagactcggaggaagtggatgactcagacccagggcccccgtgtaacacatgcccccgccaccccgatgccctctgtgtgtggggctgccaggcaggccccgccgagggctgagcactggaggctcgcagctccacctgtcagctggtggatcccagcactggaacccaccaccttcccgctggtgggatctgctcctgcccctgtctcggtgccaggaggccttcaggcatagctgcacccaggtggcctggctgccccaggctacaagacccgtcgctcctgaaacctgtttccccaagagggacacggggtgaggaactcatgtccatgggccaccctccaagagacgggaaggtgcccacggggtggggacatgacgggtgacacccctcctacggactccgaatccacgggggtggggccagccctcctcgactcacttggttgggggctcacatgagacccctttgtcagatggggaaacagccttgagaggggacagcaccaagtgtcctcagccaggaaggggccctgctccccacctcccgtatgagacccaagtcctccaacgattcctcaatgtccacctctggggctgtccgtgcaggtcccctggtctgcaggtgccttcttatcatgggatctgagcttcatccgcagagggaagggcagacaggagtgcaggtgcaaccccaggagacccagcccagctccccatggactcacccccagccccagcccagctccccatggactcacccacagccccagcccagctccccatggactagtcccagccccagccccagctccccatggagtagtcccagccccagccccagctccccatggactcacccacagccccagtccagctccccatggactcacccccagccccagcccagctccccatggactcacccccagccccagcccagctccccatgaactagtcccagccccagcccagctccccatggactagtcccagccccagcccagctccccatggtctcacccccagccccagcccagctccccatggactagtcccagcccccggccccagctccccatggactcacccccagccccagcccagctccccttggtctcacccccggccccagctccctgtgctctccatcccattcagcgctgacactgtccctgcagctccgtccaccccacctcctgactcacctgggcctgttggtcactggggcctccagcccacctcctctgcttctgagccccaggaccccctgcctgccccccgacccccaacacagggccactccggggctcctcctgcccccaccctgcctgggaccagcctggtttgaggctgactctgcactgcggggccatatccatctggactccttccgggctgcaccccccgggggacaggcaggggtggcccagaccgctcctgctcatgaccctgcttctcctccattctctggacaaactccccagaggcctccacctgccccgtcctggttccatgaatgaggcccacaagatgggaccttcaggagcccaggaggtgaggggatggggtgacgggggacaccagggatgagggtgtggcagggacacgggagacaccagggctgacggtgaagaagagactcaggggacaccagggctgggagaacccagggacacacggggacaccggggctgtggtgtgcagagggctctgggac

SEQ ID NO: 1243481 - DNA, 4001 bp, Homo sapiens
gaacctcacagaaggtgggcaaccagctcctccctttccattggaaggaagtaggctcagagttcccaagcctcggagtgagtcaagaccaagtggaggcctctgcgctggcgcatgccccactggggcctggacattgagactgcccctgcccacccggacactcacccggagaagcagtgggcagctgtgagcacccactgggggctgagcagtgacccgccgcacacgtgcaccctccgcaggcggaggctggcctgccatggccatgcgccggccggggcagcgtgaccccccacgatccggccgcctgcatccgaaacctgcggccggccacaccctaagtcgaaggaggaaggggtgcctggtggggatcccaagaaacccactgcacttcctccatgaagccttccctgaccacacctccctgccttcttggggactttgctcttcagctctctcgtctgccagactctccccagaagcatcgtgggtgcagcagaaatgacgtctcaggagcagtgagcgcgcctggggctcaggtcgtcctttctaagcaccatgctccacaaactaaccagggctcccggaggcggtggaaaggctgcagagggcccctaggcggctagaaaggggctcagaacggtggagcccccgagaaggcccggggtgctgggggtggctgcctagtgggccccggttttccttcaggggtggtggagatattcgaagctggataaaattcggggggcggggggcagacagcactgtccaaggtgctcggggcctctgaattggacgcttgataatgtaactttatcttctgtaaacttcacctcagtaagttaagaagaaattaagaggaagtcagctggagacccactggccacacctgggtctgcctgagctggataattgtgctggtgatggagtgtggccactgggctgaatggaagggaagctgggatgtagacagacagagatgtttatagataggcagcgggtgtggggtggggcaccggctctcccacacggcaaagcccccagctggttccagggccacggtggggacgctgtggggagaaagttcgaggagggccaggttgtttcatggcctcagagcatctcccaaggtacagactgactacagtggtggtgggggagacagccctgcagcacaccccgaccagccccactcaaccgagagatgcgagcagaaaccacggcgacaaactatgacctccccgggcccccattgggaccccagggaaggagagggtcaccgaggccctcctgccaggccttgcctgcaccctcccccacaccccacacctgtcagagacgtacctggctgcaaagtcctgagggacacacctgtgggaaagacgaagggcccaggatggagggggctgccaaggagaggggtgtgcgggctccagaggcccctgccaggcctcagggcggcactggggtggggcctggtcctgagcagaggggcccggcctggtgaggctgggtcaactgctgtctcactggcccagggctgggtgggacaagccacaggccataaacggcagctggaggccgggagcttggcctcaggcctgggcctcctccccgccctccaggtcctgctcaggaaagaaatcaccagtgttctagggcctgggactcctggcacccccaactcccacccgcacccccaactaccacccgccctgccaactcctgcacccccaactcccacccgcacatccctcctgcctctccccagcacggacagctgggcctccagccaggggtgcagtctcttcagaggagacacggggccccacagggtggggactcagcatgtttctccgtctcagaccagcccccagtttcacccccatcaggggtccaggcaggaagcagatgcccccccatccccacacccaggccaggtcacccaccgggcacagccaggagcagcaggaggccacaggccccaagggccatggtgtctgcccactgtagggagaaggagggccagcctgacccttggacctgctgggcgtgggggataggggtggccacacacctgctgtcaggcagggcgggaggacggaggaggaggccggagctccacagacggccccacctgttccttctgcacctcagagaagggtcgtcacctccatttatccctgtgtggacgccacagccctggcaccaagtggccggctccgtcaagggaaagcggggaaggacagaaggcaaaagtacttctcaccttgtctctgctccggggccagggctgagggaggggtgagtgttcctctgagtgccgccccctccaaaaattactccctggttccctcggggcacgccaccccctctccttcatcctctgggagcccagtcctgggggttcttcaggagggtcccaactcaaggcccagcagccctttggagacagctcaggccctcgtgacaaccactctttgagaagtccctgtccccacgtccggcagcaggtcctgtgctcgtgcggcagatcagatgggcaccacttcacggcccagcctgggttggcccttcctaaccgtcctggctgccccagcctgatgactcagctgattaggggccctgggcagcgcccgggactttcctgccgccctccccagatccaaatcacaggccaggctggagggtccagctgagaccttctaggtcagggatcccctctttgatgtggggaaactcagccacgggttggggggagttgcctgaccacccaccaggatgtggcctcccaggcacagacgtggccgcctgcacgccagcacgtggggtagccaaggctcagaactggaggttcagtgtttttcctggtgaccaataaggacaacaccagcatgcggggccagcagtgcacccacggccgggcaccctcctccctcacggcagccgcacacctggagggggcgcctcaggggaggcaggacagtcccaccccacacaagggagcggggtctgagccacgagtccccggcccagggtgcccctaacagggcgatgtcacccagtggggagggagcctgaggggcagggtcttcatggaaccaggtcctctagtcctgacctctagggctgtccccaggtccccacaggtggggacttcagggccctcacctgtcccaactcaattcacctgcagcactggggaccccgtctttctgcctgtgccccagcacgccactccccgcagagtgctccacacgacccagattgcaggcctgctggggaggaagaagcttcaggcaccatcccctgagccccagcagtcctgtgacatggtgccgttcacccccaccattggacaggagagccaactgaggaaccgggaggggggcctggccctggtgattgcccccagcttggtggggtctcctgttgtccaggaccctgggagacctgggattgcttctgtctgcggtggcctggccacctgggtgccgtcccctcggtgggaaccctgtcccccccactcgccctccgcctcacacccccctgtgacggggaaccagggcctcctgccggcagccacgtgggtgaccttggagcaggtgcccccgtcccagtcaaaacgcaggtggctgcagccctggccagcagcctgcctgccacgtcctgagagacccttcctgctgaagctgacgctcacatctgccagtgtcactgggctgagcttcactgagcttcccagggatcttagatctaatttgggaagctctggggctggagcccgccctccccctccacccagtgaccggcccctgctgtccacctttccttacaccggcagccctgtcctgaggggccgtcttgcttcccttcggggtctcatccctccgactcccaccccgcaaaacctccagtgggcgtgtggaagtgcttctaggggctcagtgttccctgggggtcaccccgtgctgtctctgtgatccctagaaggtggg

SEQ ID NO: 1243482 - DNA, 4001 bp, Homo sapiens
cttttcctacccacccttttcctataatcatgggctcaaggccctacctcctgccccatcagtcacactcctgtactctcatcagggtttatatatggtgggctaagaggagtgttgagtgttagctatggggcaggacagatggggtggcccagctgccatctgtttacatgaggaacaggaagctgtcctcctgccctggcctcccaaagtgctgcgattacaggagtaaggcactactctcgacctttgttttttcaattgtcttgtttttgagacagggtcttgctctgtcacccaggctggagtgcagtggcactatcgcagctcactgcagccttgaccttcccagctcaagcaaccctctcacctcaacctttcaagtagctgggactttaggcacacgccgccatgcctggctagtttttgtatttttagtagagatggagtttcaccatgttgcccaggctggtctcaaactcctgggctcaagcgatctgcccacctcagcttcccaaagtgctgggttacaggtgtgaggcaccacacccagccttctaatcttttcatagaaaacattaatacttgtgtacttacgccaaaccacagtctggatagtaacaggaagtttgcattttgtttatctctgggcaggatgaaggaaggtaggtgggggtggggaaggattgtgggtgatttttattttctttgtatttagcaatattttctgctttatgtgaagtagacatattttctttgtattaaaagagcaaaataaatttgttttctttaaaagcaaaacaagaaaaaacaggaaactctgcaggtgacaagtgggtccataatagggagccagccacggaggtgagataaggggggagtccttcgaaagtggcctggggagtaggagagagtgggaacttcccctggaaacattccctctttcatgtctttctggccccttgacttgagagtgcttgacttggttatggtcccaccccaaggggtggaagtggggaccgaacaggaccattgtctgcccatcaggtctgtgggggtcgagggggaggtggggagtactgggaacctggagactggggatgctttctcacactcactagtactagaagatggggaaggtgaaccaggctggaggtcgagttaacagggtaaagaggccagggccctagtttcgcatccgccgactggcagctcttcttacgtgttctttcacggaagcccctccttgggaagccccgcgccccacccaccaggagtcgtccctttttgggcggggctgaggcttccaggctgggtcctgagaaagtttggtggccggagactgtggggcgcttaggtaccgacctaacaacttctgcgcctgtttccagggacgagccacgcacggtgccccctgaacacctaacagtcccgggggcagccccacctctggctgggtggacagagacagcctgtgggcgtggcccagaactgaaagcctgtgactccttgcgacccgccgggcacaccccctactcagctacgcagctcccgagcgcttgaggggagcttcccaggctcccactagcccaccctcaagctggggtttcgcacgtgcgatcggctggggtgggcaagggggtctccgctcaaggaaagtattcagaaccagccccttctcccccaccctctctcctgcagggccctactgcacctcgaaagtgctggcagggacgaggagcctgcgggggccaaattccgtaccgtcccccgcctcccacggtgttcgaacagctcagtagaccgccgccaccagctggctggagcagccgccggtgacatctgcgccgcgcccacgcttcggagccaagatccacctcctctcccgcccgcaccggggagcccacccacccacctgctgcactaacctggccgcctcggcggggcctgggttcccacgcccgccaggctccgctctactccgccgcttccgggtgtgcgcggaggcgctggggcggtgccctagcccgagccgccccgtccgcccgcgcgtcccgccccgcgggctcccggtggctgcttcccgtccgctgtcctctgctgccagtcccctgccccgggcaaagcccatctggtccgccgagcaggtaagacaccagcgcccaaggttagacggcaggaagacccgactttgggggtttgcgattcttacgaggcggggggctcgtaagagctacagctgccagacttcggtaaatcaagggggcgccccctggagaccagaattttctggtacccctggggatccggcttcaagatcgctgctaccagtgggcactcaaaacggggtgcccatgggtcccaggtacaagcccggccgaacgtatctgaagccccaggaaacacgtggcacaaattccgggagaaactgttagcccggaagatatgggaacattaactggcgagtagtgtgaagccttgtgtacacaaacctttaagaaccttaaaacaagattggcggccgggcgcggtggctcacgcctgtaatcccagcactttggaaggccgaggcaggtggatcacctgaggtcaggagtttgagaccagcctggccaatatggtgaaaccccgtctctactaaaaatacaaaaattagcccggcgaggtggcgcgcgcctggagtcccagctactcgggaggctgaggcagaagaatcgcttgaacccgcgaggcggagtttgcagtgagccgagatctcgccactgcactccagcctgggcgacacagctagattccgtctcaaaacaaaacaaaacaaaaacaaacaggattggcaacttcaaagaggacgcacactttccagtaacccatccccctctaaaggctgcgctccagggtgggtctgcggagttccagccgaacccaaattgctcagcgggagccagggctgctcaggggtcggaacttaaatcttgagcccctcaggccccagaaccgtcaggtcccagagacccaagttttttttcatccagtggggctgtcttaggaagcacccgggacatctccccggcgaggcggaggcggggaaggagcctcccctccaggggtggatccagctttgccccgcccacgcctcgcttcctgattggctcatggtccctgacaaagaaaagcctacattaacgctcccgccttattaaccctgtagtcactttctactaaccggcggggttaagatggggtttctcaggccgggcgcggtggctcatgcccgtaatcccagcactttgggaggcccaggcgggccgatcgcttgagcctaggagttcgaggtcagtctgggcaacaaagcgagacctcgtctctgcaacaaaattacaaaaattagccaggcgtggtggcgtgcccctgtagtcccagctactcgggaggctgaggtgggaggattgcttgagcccgggagactgagggtgcagtgagttgtgattgcgccactgcactccagcctgggtaaagagcgagaccctgtctcaaaaaaaaagaaaaaaaaaaaaaaaagtgggaggggagttctcaacgtggaacctgtggagtcacaggggcttgttgaaatgcagattcctgggccttaccctttccggagagcctgatttagtaggtgaggcggtgaaatctgctttgtgaacaagtttcggggttatctgatgccccacgctgtctgagaggccctcagttcctcaggccacaagcatttgtacacctaagctcggtcttcctgcaacactttgcgccttcccgacctcagagacgtccgtctctctccaggccggagctattgggagtggcggatcctcccaccccagccggatctgggccatggccgagcctggagagggactgccagaggaggtgctggcactcatcttccgccacctgtccctgagagaccgtgctgccgccgccagggtctgcagggcctgggccgccgctgctacctgcag

SEQ ID NO: 1243483 - DNA, 4001 bp, Homo sapiens
cggctgccacacatccaggagccccggcagcgcctgagccagtcccatgccaagccggggagtggctgcatcccagagccaggctgcccaggcctcctggccaggaggctcttcaactgcatcttcctcctttccccaaactgctcattccttgtccaaccagctggccgagagtcacaccaaccacggggtgccaggccccatgcgggagggtggggatgtgtgacggctgaacacgaatctgacccgggaggagctaggagccttgtgggggacacaggcagacagaggggcaggagccccaccaatcgccactcaatctgccaaaggcacttttcggtgggtgccaaagaccctgaacttttccattcacttccagaaatatcgtaacacttggccccagtgggccacggtggaagtcacttcaccagagaccctcaggttggggcgtcaggttggggtgctgactcccagcccctcccctccttaggccaggctgcccataccactgctccccctcaggacacggggcccgaggcttccacagagaactatgaatgcccagaacagtgaagtcaggatattcgcaacagagaggcacagggaaggggtctaggaagggagaggcccaaagagaaggaatgaggaagagggaggctcctcacttggcgagggctagggggcctgtgtgtgcccaggaaggggtctgaggggtagtgagaaaggtgggcagacaggctgggcggcatgaaattcctgagcaagccagcagcccctcacccccaagagcagggtgggctccagcaggcccctgcccctggactccagactcaaccccagctgaccactctggcctggctcaagacaaccgtatcttgacagcaggaccccagtggggactaggagacgatggcctagcctccctctctcctgcttccccagtgaactctgaagtctgtggtccacacacagttagaaagctctttactggacctagatcggaccgcctctccagcgcttcctcaaccccaagtcatttgccagcataataacccccccgccccaccccaccatgcaccctgtgagcctggtccggcctcatcgacttcacctctccacttgccagtgcttgctggggtgcgtcaggccccttctcaccccaggcctatgtacatctggctctttctacttggaatgctcctcctgcatgtcctgggactggctgcttctccaacaggcctttggctaacggtagcgccgcccctacccccggccagtactcactttttcagcaccctctttctttctttcacagcacataccgctgctccccatgattttaactacctattgtcaatcccaccaccctgtctgtctagatgggggatggggggagttgttccgcaggaggcatttgccaatgcatggagacatttgttatcgcaattgaggaaggggtggtgtttactggtatctagcggccaggagccaggcaagctgttccacatcctacaatgtacagggcagctcctcgcagcaaaaagcgacccgggccgcgtggtcgatggtgcggaggttggggaaccctgcagcagacgccgagcacaggagaactgggaccgtgttctccgcggtctcccggcgcccagaacagtgcctggcacccgggagtctcggggaatgcaggaagaaggaatgagtaaagaactgcgcgagaacaggacggagcgagggacggactactgactggcggacggacagcgacgcggaccccgaccctgaccccgaccccgaccgtctcagccccgcccccccctccccgccccggcccgacccctcgcctcgcctcgcctcgcctcgatctccacgcgcccgatcccgccccaccgcgcggtcccgaggcgcgagccccgggtcgggcgcgccgcggggacactcacccgcccgcggccgcccgggagcggcagcgccgccagcccgcttcatgatgccccctcggccgccggccgggaaagggactagacgcgcgagccggaagcgccaggccgctgcgcccgccgggacgtgtagttccccgcctctccgggcccggacggctgcctcacgcgccgcacttccgaaactacgacttccggcggcctcgtcgtcgcggggcgggaatggcagcttcagaatcactctatgttgcagatcgaagtctgattggctttgttcatccgtcactcaccgttaggcttcacggactctgcataagggaggagcttcgggtctgggtctgagagaccgtctccaaaagaaatgccacggtacgattggtggaaacaacgcggcagggagcggagcgtaccagcggcgggggaaggcgggcacttccgccaggatagcccaatgacagaggtgggacagtttctataaaagcttgagcctcgcccgcccctgtcttttcggggtcgagtccgagggggaagaggtttgttaatacgttcgccatgtgctacgatcttgggacgaactgagccacgagcgtggctttgagggccgtccgaacgctgcaggccggccaggtccctgggcgtccaggcctggcctacgcaccactttgtcccttagcgtttaaaggtttcttcccgaatctcaggccctcagctacctgcaggtaagactgggccgggcttgggttcccttattctcccagtctgtgatgaattgctttgacttctgacacctcgtatgaaaactgcacgtgcagtctgattatttagcaagactgaggcttgagggtgcgcactcctgacggggagctgagagtggaaacaggtgttgcccgaaacgaaggagtggggacttaatgtctgtattttggcgctgactttcaggtttcgtcgcgagccggctgcaagttttgaacctaagtaaacctcaatccggagggcctagcggtaaggtgggcgctgtgtctattgaagtgcttagcaataaagaaaggtagtgagttgattcggttttctctcaagtgtctttattttcctattctggcaccccagaggtctggctgatccacaggcaatcttggaaaagggtacagacatgaaaacggaagctcgttaccagtgacttttcatctcttgggattgccttctccatttctgcccgtgattttttttttttttttttgagacggagttttgctcgtttcccaggcgggagtgcgatggcacaacctccacctcaagcgattttcctgcctgagcctcccaaatggctggaattacaggcgcccaccaccacgcccggctaattttgtatttttagtagagacggggtttctccgtgttaggctggtctcaaactcctgacctcaggtgatctgcccacctcagcctcccaaagtgctgggatcacaggtgtgagccaccacgcccagtcaaatactgtttttcatgccttttgccccagggtgagtccaaaaaggcttttgagatttgtggagggaagttgacaccacctagggttcccatgtgcctccttagggaggcagccatgggccatggaggaatggtagccacacacctgctgagggttctgggccttgctgagtctctcaaactccagcatcctgctctagaagtggatttttttcaacagatgagacagacgctccagaaaacacaactttattcactaggactgaaaacaaaggcttgtgcaatcaaaaggccaagttgagtgcaaggtggagcgtgctcggaaatcacagacctcacctgtggccaggccgggctggcagttgttgtttctggtgttttctgtgatttcccacattttatcacaaggccacaggcatcctccaaggtcagtgaggaagaccctattgctgtttgagccagagcctcctagagggtgggccgggagcaggcagctcccaggacacacagatgcacgatgtgattagcagtgaagccttctgtcccaggcgtgggcaggcgtcctcccttagctgc

SEQ ID NO: 1243484 - DNA, 4001 bp, Homo sapiens
taacctccaagggggaaaaaacccgagtcagctacaaaagaaacgagaaccaaattaacagaacagttggccaggcacggtgacacacgcctgcaatcccagcattttggagggcaaggcaggcagatcacttgaggtcaggcactggagaccagcctggccaacatagtgaaaccccacctcataaagacaaaaaaataaataaataattgatcagacactggtgctagaagagagcaacagcatcactttctgagggaaaattattattatttttgttgttgagatgaagtctcactctgtcgcccaggctggagtgcagtggtgcaatctcagctcactgcaatctctgcctcctgggttcaagcgattctcctgcctcagcctcccaagaagctgggattacaggcgcgcgccaccacacccagctaatttttgtatttttagtagagacagggtttcaccatgttggccaggctggtcttgaactcctgatctgcccacctcaggctcccaaagtgctaggattacaggcgtgagccaccgcgcccggccacaaggtatcttttatagaccactggttttgaaaagacataagattcagcgttgaagaaaatacctttggaataggcagtcttgatgcctgctaaaggggatataaattgataaggcctttttggacaatttggcagtatctgctaacatttcaaaaatgcataggctctgaaatatcaattctaaaattctaattatgtaaggctaaagaaataccgcacgtgaacaaatatttaagtactcacccattctatgcagcattgtaataaaaagtaaaacctgaaataacctttattgcgtccactaataggacaatgtttaaacaaatgacacgtccatcatacagaatactgtgtggtcactggaaggcacatggacctgtatacactgacatgaaaagatgtggaaagaatgctgggagcgttaaaattttctgaagtacaacgtagcacaatgcatacatggtttaggctttttagaataaaaaatacttatacgcagacatttatatttacacgtataacactgtgtacagccccgaagcaatgccgaaactttcactgttgttacctccgagtggggactgggaaagcagaggttagggtcgttctctctgttttacaaacatttattggcgcatccatcaattccaggccccgaggacacagctgcgtcaacgacatcgagtccacctgctctggggacccggatgactgctataggttttgttcactgtggcgtccccagaacctgcacggcgccgggcactgagcgggcgctcacatgtgcgtccaatgaacgaattaacaaatgaaccctcagtgcgctactgggaggcggggaggggtaaagcacgatccatggaactagcacgatcaccccgagtgagtccattccccgcaacatgcacccgcaaagactccgcgctccgcagcggctccacctgcacgtgcgctacctgactggaccgaagctccaggagggacgaccccgcagccgctccgcccgaccccgcgaccccccaagacccagcctccttcagggctcccatgggcgggtggcgaggggagtccagccgaggaaaaggcagccaagctggagctggcgaggagcggagcgaaagtaaacgcgtctgccgcgcttggcctcgccggacctcccacgcctgtgaagcaggtgccggcgcctcgctccccggagcacagggacgtccctgccgtctccgtggcccggcccgcccgctgcccgtccagccaggacgccctcacctcccggcacggccgccagcgccggcgcccgcagcaaaggccgcaggcggcggccccacagcagcagcgcccgcagctcgcgcgccatgtcgtactcccagagcgccgcgcgcagccacgcgggaccgtacacgatgggaaggggcgggacggggctgcgcggggcggggcttcctcgggcgcggggcggtgacgtcacggcgggcgccgggctgtccgggcagctgcctgctcgggcgcgtggcggggtactacccgtctcgtggacggtcgggcctgggggtgggacctccgtgaccttggatcgcgttgtcaagggcgacgggccttgcgcgcggaggtgggggaggtggccccgccgcccccggcccacgctggccggctgcgcctagctgtgcgcattcctggaatggggcggatgtcagtatccacgcgagggtgtggaggcgacgctggggaagaagcagttcccgtgtctgcgacctttgtgaatcccggccatccgtctaggccgctgcaagtctcttgcaaaccaagactggacaaaaagctaaagcgaatgaggaaggggattccaggcttgactggctactactccaaaacctgaacccagtgaccaataccaccaggaaaactgcggttattcgtttattccacttctcttgtccttgtcgagaagagtcaaactctaaagtatttagaaggttattctgagccaaatatgagtgtgcatggagggaggcacagtctcaaaaggtcctgagaacttggcccaaggtgcttgggttacagcttgcttggttttatacattttagagagacataagacatcagtcaatgcatgtaagacataggttggttccgtgtggaaaggcaggacaactcaaagggtgaaatacttagaggtcataggtggattcagatactttctgattggcaattggttaaaagagttgagttctggttgggcgcggtggctcacgcctgtaatcctagcactttgggaggctgaggtgggcggactgcctgcggtcaggagtccgagaccagcctggccaacatggtgaaaacccatcatctctactaagatacaaaaaattagctgggcaaggtggcacgtgcctgtagtcccagctcctggggaggctgaggcggaagaatagcgtgaacccgggaggctgcggttgcagtgagccgagatcgtgccacttgcactgcagcctgggcgacagagctgtgactccgtctcaaaaaaaaaaaaaaaagaaaacaaaaaaaagaaaaaaaagagttgagttatacagacctggaatcaataaaaagagtgtctgggtgaagataaggggttgtgggcacgagcacggtgactcacacctgtaatcccaacactttgggatgccgaggtgggcgaattgcttgaggtcaggagttggagagcagcgtgggcaacatggtgagaccctgtctgtaccaaacatacctgtaccggatgtggtggcggaggcctgtaatcccagctacaagggaggctgaggtgggtggattgcttaagcccaggagggagaggttgcagtgagccaagttcgtgccattgaactccagcttgggcaagagagccacaccctgtctcaaaacaaacaaacaaacaaacaaacaaaaaacaggttgtgaagaccaaggttcttattatgtagaggaagtctcatagatgaccacccttacaggtaatagatggcaaatgttttcgcaaatattgtttattcagaccgttaaaaattcctagaccctcaggatcaggaaaagacctgcaaaggtggcctggcatggtggcttacgcatgtaattccagcactttaggaggccaaggtggtcttatcacttgaggtcaggaggttgagaccagcctggtcggcatggcaaaaccccatctctactaaaaatacaaaaattaggccaagagcagtggctcacgcctgtaatcctagcactttgggaggctgaggcgggcagatcacctgaggtcgggagttcgagaccagcgtgactgacagggagaaactccgtctctactaaaaatacaaaaaatcagtcaggcgtggtggcgcatgcctgtaatcccagctacgcaggaggttaaggcaggagaatcgctggaacccaggaggtgaaggttgcagt

SEQ ID NO: 1243485 - DNA, 4001 bp, Homo sapiens
cctgaaaagcacagaaagaaatccttgcaggtacaaagcagaagtgtcccacttcctctgcaaaccagacaacggacacgtgcaaaccaaaacattctacggggaattctagccttgcttttcccaaatggctcttccaatgaaagagaagagttacaggccttcattcacctcaagctaccctaattccctggctggctaaaaactctcacctctttttcttctaaaaggtttcaagttatctgatcctaaagtacatcttgcaactgtaggtcctccctgacacacaccctgccctgaaagatacaccttgtagtcctccgtggggtagagcaggcccaggtacagctccctctggtcgaccagggccttccccattgcggagatcttctcatccaccacgtccagagatgtgtgcaccatgtagtggaacttcagctcgttctccgtaggggtgctgcgaatgtagagggggtaattctgcaagaaaggatgacggcgactgaaaggacaagactccacccagcgcacaccagctctgaactatgctgcagagccgtgacctgcagccacccggggaacgcattcccatgctctaaggcccaccgcttcattctctatgccgcagtgggcactgccttcaggggatcccagctaacctaaggagatttatgtgttgtttgcaaagcagcagcagtagggtgggcggaaaagaaaaaatgaatcagaaaaatgggcctgagcacagcctgccgatcaagcctggcacctgggcacgcctctcaccttctcctggaggccactctgcctcagcccacctctaactctgcatggctcacccaaatacagcaccctcaatactggcttttcttcaccttgacagtgacccttttactaaacccttcaagactcagctcaaattcccttcatctctgcatttctgaccattggaagcccagaattaacagcttctttctcggtctttcacacaccaccatttaccctgtgtgtgttcagcactgggtcctgcacaaatacagtgaacaagagtcctcgctaccctcgtggggagtgatacctagtcaataaacccacaaacaagcaaatgatcatcttggccaagagggaagcccatgagcagcttagcagcagccaccgcccagcagggagcggtctcgagtctggtctcgggagaccctggctaggaaatgaaggctccgtgcagcaggagcgtgtgggcagccacccagctcagtcttagccttcagaaaatgctttccagttgaaatgtatgtgggccagtaaagaggatgggagctggggagaggtgttccgcgtgcaaaggcccacaggtgagagggcagagcatgtccagggagctgcagaattgtttggttggagcggagagtgccaagggttatggggggaaaggatcccagagcaggttattcagacagcatcctaaggcaacgagaagccactgcagaggtctcaggcagaggcgtgacaggatccgatttgtttttaactcggctccggggagactggcaggagggccggggccgccgtccgcggggaaccagcgctggacgggagaacgggcagaacctgctgaggacggaggacggaggtagtgcccgggaccacctaggtttctggtgggtcctggcggggaggagacctgctgcgccgaggggtgcgttcagcagcgggacgggcgagcgcggaactggggtctcagtcagggtctgcctggcggctcgtccaccgcgaagcccctgaccgctggagctcggcgaaggcctcctccaggtcccatttcctaaggtgccttctaagcccagggaagaagtagaaagaaagcggagagccgaggatggtgcgagcccggacgccccacgccgcgcgtacgcacctccttggcaatcaccgcgatgcacaccgccatcttgggaggctcggcgccaggcaccgcgtcacgtgacccgccgctggtcacgcggcctccaaagccccgccccatccgcacacagctggctcaggccccgccccactggtcacgaggcagtccaggccccgcctcccgtccctccgcggactctggccccgccccgcgagtcacgtggccgtccaggccccgccccgcagcccagccggaagggccggcggacgctcgctaggtcggctcgctggccggggctccgcggctcccgtggttgccatggcggcggttgtcgcggcgacgaggtggtggcagctgttgctggtgctcagcgccgcggggatgggggcctcgggcgccccgcagccccccaacatcctgctcctgctcatggacgacgtgagtgcgggcggtgggacggggcagggccggggtggggcggggaggggaggggcggatggagggaggagcgaggtgggggaagggcgggcggggtggggggagaggtgaggggaggccccttggggaaggggggaggccccgcgcggggaggaggagggggaggggacggggggtatccccgtgcggggagggggaggcccctcggggagtggccgcggggtccaggcgtggggtctcggcggtcaccgatcaccacacgcgctgccactgtgctgcatgaccgggacagcgtcctccctggcaggtgggtggccggcgtgctaccgggccctgcctcccccgtctgacctttcccgccctctactcttgggaaaggtgggcgcgcagcgtggcctccccaaagggaggaagaggctgctcctgccgccctgcctgagagctgcgtcgccctaggaatcactcccgccacctcgggccgccgggtccccccgctgggctccagtcttacctgacggctgtctctgtcctctggagaatgctgagcgaaggtcaggtgtccctaaggtctgaagaactgaaaggctggaatgtctcctggtgggcaagtgcggggtcaggggtcacagccagcctggaggcctccttccctaactccttgtgggagccacctggagactcaggaatgagcctgcctggggcatgggtcaccgtgcaggaccccagacacacctgggttgaaaccctactgtctccaagcttgggggtcacttccattcttgaacctcagctgccacacctggggggttacacctgtcccgccgtgctcacgttgtgtgtgaggactgggacgacaccgagtaccagacagttttgggccgtcggtgtcgctcagcccctgtgtgctggctccgaccagcagagaccctgacaggtgccttcagacccacctgtgctgaccagtgggggccacgggccacacccaagggctgggcagtcgtggctgtcggaattggaaggtgctggtagtgtaaaatacacagatttagaagacttggtgaaagaaaaataatgtaaaatatctcacttaacaattttattaaattaatggttttttaacataaagatatacttgaaaagataacagacaccacccataatttccccacccaggggtgacagccgacagtcctgggcagctgcttttccatctcatatgtcttatttgtgtgcagtgactgctttccagagcacgctctccagcgcccaggggtccgtgtcctgacagcagtagccgggcctttctctgcactgagtggcatctccctcctaaagatactttgcttcagaatttcatcctttcacttttgaagttcctctgggccagtgtagatactttgtttcagaatttcttcttttcattgtgtaactccttctgggccagcatagcttcgctggatgagctgggctctgcaggtgaagcctccctgttaagtttctgcttttcctgactttctcagaggacagaggggtgaggcggggcagctcatgaataattttttatgttgaagacttgtcgaaataatattttggttatgttgggttaaataaaatataaagttagtctgtatttcacctacttctgcttttctaatgtggc

SEQ ID NO: 1243486 - DNA, 4001 bp, Homo sapiens
cagcccctgcacctgtcatttattcttccactgcccaataaatattcatggcagactttactggggctgcgcgcacacgtgcccgccggtagctatacgtgtgtgcttttgccacacggatgacacgcaccagccagtgtgcgttcgtctctatttgcctctgtctgggtgtctctgctgggtacttcgggacgcgcacaactgcgtgtgggctcccaaggctttcgggacttccagctccacccagaaaaacatcctggacggggctctcggtgccaccctgggcccgcacacataagtgcagatcccggctgcctagcccttacagtctcccttctggtgaggccccgcctggggaccgtcaggccagcccaagttccgcagcttcaggggtgcgtgggcctccgctgagcacaaggggacaaccctgccccggccgcctggctcggtcccgaacgccgcgcctccagtccaaagtgggccagcgccgagcagggagccagcccgaacggcccaccgggtgcaggaatgcgagcgtgggccgcaggggctggtcagtccctgctccgcctggctccgcccggcccatcagacccgccctggggctccgcccgcccatctccagtttcctctagggactaaggccgggaaacctacgtttgctcagcgcccttatcgccaggctccatccctgcgcggctttcctctgccagccccgccttaagctcctcagaccctctttcctggctgcttcgccccgcccccgccccccgcaactccaggagctcgtgagcctctctagagactcagaatccaaatcactgcagcgacctccccatcggccccgtgccaccgaacagcccctccgaccacgatgcgcgcggatcccgcaccttgaggcgtgcgtgggcctcggcggcaggcaggaggcgatgaccgcggtgcgagccgagtgaggcgcacactccgcacaccagcgcgcggtcctgctcgcagtagatgctcagcgggtccaggtgctcctcgcagtggccctgcggcacctgggccagcccctccaccaggcgcgccagctgcaggttggtgctgagtgcctgcggccgcgtgggggcctggcagcaggggcagagaacggtgccatccgccgccggctccccggccacgcggcctaggcaggcgcggcagaaactgtggccgcactcggctgtcacgggcgcgtcgaacagctgcaggcacagcgggcaggacagctcctggtgcaggaggccgggcgcagccgacatggcgggcctgggtggaggaggagtaggttagggggaccccgcggcgccgcgctcccggcccagccctggcccagccctagcccaggccgggcccgccgccccgcagggagaagccccagcctgtaaagacctcacatcctacactggatgggactctgacggccaaggggaaagaggaactcggtctcaggcccaaaagcagcctccactgcaattctcagctccaaccccaaaaatatgccctatcagtcaaccccagttcctgaacacaagcccagattctagcccactgtccttgccctcgccttagccccaggcctcagcctctgaccttagtcccggacccaaattctccagagcccccactccgagactcccctccctcactttaccaagatacccagacctcccctccccctctctccagcccacgggactcacaggtctggttggagatcttaggctgaaagagtctcgaaggaggaccggtcagggttgagcttagctggactggggtcagggctgggtccaaggatctgagacaagcagcaggctccaagcaaggacagggactcacaggggcagctggcagtggacaccacgcgtgatgggcacacagtgctcagcggaagaccctcccagactgagccatggccccaggactatatttagctgccctgcccaatccctcccatcacttccggaaaccgttctaaaagtgagggctgagtagtccctgggcacacatcacatgacagggccacctgtcttggcccatccactgttctctccccggcctgcctggagtcagagctcagagccagcggggagccagggcctttcacaccacagaaaagacagaaaattgaagggggtctgccctttctccccccactcccacctccacactctccagctccttcctccttgctggcagcccctccccagcctgtcacccactcattccccaagtttatggctgaccaaggtcaccctggcaggattaccccacctgcaggagggcaggacctcaccccaccctgaaatgttttcttcctccagagctgaggggagggtcttttccactttggtctctctagtacacccaggacaagcctgggacaaagtaggcctctctaaatgcttggagaatgaatgatagagagacattgaacaaatgaatgaactgaatccagagcctgcagcccagaactcaattctgccctggttcctgtatgtgtatctttcaaatctcagctgaaatttcatttaagtggcgctgggataactggctagccttatgcaagagaatgaaactggacccctacctttcaccatataaaaaaaattaactcaagatgggttaaagatttaaatgtaagacttcaaaccataaaaatcatagaagaaaccgcaggagaaatactattctggatatcagccttggtaaagaattcttgactaagtcctcaaaagcaacaaaaacaaaaattgttaagtgggacctcattaaactaaagagcttctgcacagcaaaagcaaaagcaactatcaacagacagacaactgaagaatggaagaaaggccaggcgcggtggctcacgcctgtaatcccagcactcttgggaggccaaggcgggtggatcatgaggtcaggagatcgagaccacagtgaaaccccgtctctactaaaaatacaaaaaattagccgggcgcagtggcgggcacctgtaatcccagctactcaggaggctgaggcaggagaatggtgtgaacccgggagacggagcttgcagtgagccgagatcgcgccactgcactccagcctggggtacagagtgagactccgtctcaaaaaaaaagaatggaagaaaatattcacaaactatgcatccaacaaagatctactatccagaatatataaagaaactaaacatttcaacaagcagaaaacaaccccattaaaaagttggcaagggccaggcacaatggctcacacctgtaatcccagcactttggggggcccaggcgggtggatcacttgaggtcaggagtttgagaccagcctggccaacatggttaaacttcgtctctatgaaacatacaaaactcagccgggtgtggtggcaggtacctgtaatcccagctacttgggaggctgaggcaggagaatcgcttgaacccgggaggcagaggttgcagtgaaccgagatcgcaccactggactccagcctgggtgacaagagcgaaactccaactcaaaaaaaatagctgggcatggtgaagaacacctgtagtcccagctgctcgggaggctgagatgggaggattgcttgaacctgggaagcagaggttgcagtgagccaagatcatgccattgcactccagcatgggcaacaagagcaaaactccgtctcaaaaaaaacaataaatattaaaaaaaagaaaagaaagaaatttcatctagaataaaaaccaaagtgctaactgtggcttacaaagccctatctgctatgaccccattaatcactctgactcttttatcacccctttccccattgatcactcggcatcagggactttgcacttacggtcccctctgcctggaacactctccaacccaggtactgcatggcatcctctttttcctccctcagactttgctcaatattacctttccagcaagacctctcccaattccctgattttaaatctcct

SEQ ID NO: 1243487 - DNA, 4001 bp, Homo sapiens
gagcgaaactcggtctcaaaaaaaaaaaaaaaaaaagatttactgaggggctttactgctccatcccgaggagttgagaatgtgcaattttttttcacaactgcaaatgttgtattgagataaaacataacatgaaatacaatttcaaactgcacaatttttttttagacggagttttgctcttcttccccaggatggagtgcagtggcgcgatcacggctcactgaaacctccgcctcccgggttcaagcaattctcgtctcagccccccgagtagctggaattacaggcgcccaccactatgaccggctaatttttggtatttttagtagagacggggtttcgccatgttggccaggctggtctcaaactcctgacctcaggtgatccacccgcctcggcctcccaaagtgctgggatgacaggcgtgagccaccgcacccagccaggatggactatattttattcatcagttgatgaacgttttagttgtttctaagtagaaaactttacaagtgcaaaaattcagcatttactcatgggcaaaacacaatgccaggcatgtgtgacaaagacacaaacacacataaaagataacgacctagcccatgtgcgatggctcatgcctgtaatcccagcactttgggaggccaaagcgggcagatcacctgaggtcagcagttcaagaccagcctggccaagatagtgaaactccatctctactaaaaatacaaaaattaaatgggtgtggtggcacgtgtctgtagtcccagctactcaggaggctgaggcaggagaaccacttgaaactgggaggcagaggtagcagcgagcagagattgtgccactgcactccagcctaggcaacagagcaagactcagtctcaaaaaaaaaataaaataaagaacctacttctcccaggaactcacatcttatcatgtaacacctggacatatccttacctgtgaagatgatgatactcaggcctcatctataagatgggctttctttcatcaacatctgaatagtaactcaagtgtgcctgaaccaggtcaccaagatcctgactttcgaagtctcctgaggaaggacatgtcggcctccaagtactggagacagcattcctgtgtagacagttgccagcaacccgtctcccacagaacctggtgcaagaccaaacccagccttctctgcatttccctctagcctagcaaagacacaggtagctcactcactctcagtatttccgcggtgatgataaactccgtctgtttaccctctgcagacctgggatttggcctcggtgttcccagtcccaacagaatcttaaacttctccttcaagcctgaatctttgcttgttggtttggccatggtggaccaggacgcaccagaaaacccctctgtgcaaacgaaacaggaatggggacatctgagcaacacctctgcccaccttccccactgcggacctccagccgtcaggaccctgggtctctggtgggcataacctttcctcccacactccctgggagaactcaactacagcccagctgaccagctcgcaaacaggcacctaggaaagcccgggagacaccaggcctggtctagagagctctctactcagacgctgccgcccgccccgcccgactcagtgcacgggttaggactgccgccgcgaagtcctgggagccccgacgtttgccgtctctcctctacccatgtgaagcaggagctgtcacggagccgcctgcagcagagacccgttcgcacccgccatgacttaaaactaagggatgctcggagctccggagtcgggttgcagtgggcgcgggtgagggcccgggacccggacactgcggggtccgcctctctaggccgctgccccgtggggaccgccacttgccccgtggggaccgccacttaccccgcgccgcgccaccgcgctccgggccgccccgacgcggagaaaggcgcacccccctggccccgggacgccgccggaagcgcgacccgcacttccggtagcggcattgcgcggagggccgccttgggagcttgctgggagttgtagttctgtgccgccctctggcggaaaggccggcgatccttgcatcacgtgacggggccgcatgggccgccgggatgtgtagtccgcaggagtccggcatgaccgccttgagcgcgaggatgctgacccggagccggagcctgggacccggggctgggccgcgggggtgtagggaggagcccgggcctctccggagaagagaggctgcagcaggtagcgccgcgccgtggctggagcgtgggaggaggcgggataggggctgcaggctggagtcccgggccgcctcctgcggctcccagctgcgcgggcaggggctgcaaacccggcagccgcgaacggttcccacgtgcggccctgcgttcccaccttgcgcctttttcccaaagattgcggtccgcaggggctgggtttcgggcgctccgctccgctgccccctttcgccccaagcaagaaaacgcttcctttcccaccactctgtccgggactctccactccaggctctgtgggtcccatccccgccctcctgcagtgaacttgctgtcctcggagaggctgggtgccaaggacacacgcagccagaagcctgctcccccagctcgggggagggtgcctctgagggaaaacaggaaagggcatggcacttattatatttatcctgcagccgttgaggacctgctgggggccaagcactgcagtgagcagtgagggacacggacagggcctctgcgctagtcccgctgggacttctgcagaattggccagagctggattcccataggcacccagggaccccaggggtagtccagactatgtcaggaggaactggtgcagctgggagcaggcaggtggtgatgccagccagggtggcaggagctttgatgccaggatagagtttggagtttattatgacagtaaacggaagtcaattaggaggttttgttgtttgttttgagatcgggtcttgctctgtcacccaggctgtagtggagtgttgtgatctcagctcactgcaacctccgccccccaggttcaagcagttctcctgcctcagcctcccaagtagctgagactataggcccctgccaccacacccggctaacttttgtatttttagtagagatggggttttgccatattggccaggctggtcttgaactcctgacctcaagtgatccacccacctcggcctcccaaagtgctgggattacaggcttgatccaccgcgcccggccggccaggattttttaaaagggagtgacacaacctgatgtgggtgttagcagactgtctctggtgcagtatagaagatgtattgggggcaccttggtacaggctgttgctagagtcctcatgagctaacatggaccttgtcagggtcgctggcataaggagggcccacataccccagactgcagagggcagagcaccccaagtgtattagatgatggacagttgtggcatgaacgagtgaggggtgagctagcaggcgggatggcacccctaccctaccttcacctgtggccccaccagagggactgcgtggtgctttttgcagaagcgaggaaaagccacagccccgtgaagcgtccgcggaaagcacagagactgcgtgtggcctatgagggctcggacagtgagaaaggtgagggggctgagcccctcaaggtgccagtctgggagccccaggactggcagcaacagctggtcaacatccgtgccatgaggaacaaaaaggatgcacctgtggaccatctggggactgagcactgctatgactccagtgcccccccaaaggtaggcaggggccccatctgcccagatgaccccccatcttagcaaggtccttgttttctttctacccggtggcttttggctggcaccctcccctgcagacagcaccttgggaggatggacacccggtgccccagagcat

SEQ ID NO: 1243488 - DNA, 4001 bp, Homo sapiens
ggattctctttctgggtctgcttcatatccttttcatagagaatggcagtttactaaattaatcctgtgctgggtaacaattctctttctctctctctcttttctttttccttttttttcttttttctttttttgagacggagtctcactctgtcgcccaggctagagtgcagtggcgtgatcttggctcactgcaacctctgccctctgcctccctggttcaagcgattctcctgcctcagcctcccaagtagctgggaatacaggtgcctgccaccatgcccggctaaattttttttttttttgagacgtagtctcgctctgttgcccaggctggagtgcagtggcaggatctcggctcactgcaagctctgcctcccaggttcatgccattctcctgcctcagcctcccgagtagctgggactacaggtgcccacccccatgcctggctaattttttgtattttgtagagaccgggtttcaccacgttagccaggatggtctcgatctcctgacctagtgatccccccgcctcggcctcccaaagtgctgggattataggcgtgagccaccgtgcctggcctcttaggggcttttgtaggcttttctctgtcaaggcagcagaccctgaagagtttaggtgggattgggtggtgtttttttttttttcccccactgggaatgagtagaaggggggacactacattcattcaacacttactgggtgcctattacatacaagagctgtgtcaagagcttcacatattctgcctaaatgttcccaacaatgtttgtggggtgggctgtatcattcccatgtttgagatatataagctgaggcctggaacttgaagggccctgtctgaagtcccaaaactagaaaacgatttagccaaaatttttgttttaatccgtatgtatggctctccaggctgatggagctggtcatattttgcagtacccagaggctatacacctgagtacaggcagaagctacccagaggatgatctctccaggcttctaaagtatttctttacttgttcaatggtaatattactactttatacagttgttgtgaggattaaatatggtacgtaggccgggtgtgggggttcacgcttgtaatcccagtttgagaggtcgaagtgggagggtcgcttgagtctaggagttcgaaaccagcctgggcaacgtggtgaaacctcgtctctacaaaaaacaaacgaacaaagaaacacccaaaaattagccaagcgtagtggcgcatgcctgtagtcccagctactcgggaggctgaggtagaaggatcgcttgagcccgggaggtcgaggctgcagtgagccgtagtagtgccactgcactccagcctgggcgacagaacgagatcttgtctcaaaaataaaatatttaaaaatgtggtatataaagcatttggcatatagtacattcaatacaagctggttgttactagtaatgataaagtgcgcctaccgttttgctagcacgtaacgtcttcactgggctaaatcagcccgattctaaccattgactctgtggtgctggagccctagatcaatggtcagaggccagcaggaggtgcagaggtccggatcaagtgccatttccctctctagaagtactcaaaccctcatctctgccctcatccctgccagcgcctacctcgacgcggacgagaagctgtggtaccgcgactgctggcaggccatgacccacgggcaggcgggcaatcagcacccgcggcctgggaagctgtggtagcgtacagccggtcgccatggcgaccaggccccagaggcccccccgcggcgggggcggagtcagggatgcgccacgcccccgagcctagcgcccgcgggctgggagtaggacaaagtagcaaaggtggactgggacccggcagcgggtgccctgagagtcaaccactacagccgatttgaccccaggtaccagaactgaggcagggggatgaacagaggccatggggagggaagtgtgctgagaggccggagccgctttgccggcgggaatggtagttttcggtgtcccgacgtctcgatgggacaggcttatggctgaggacggttatactacatctcccagaattctctaccagcccgagttgctccgcctctcgagagctctgcattgtggggtatggagttcgaaatgtggtaaggcgtgtcagtgtccaaagaggggtgccggactcggactcggtttccctgcggcccagggaggctcacgggccattggctgagcggggcggatctggtcccgctcctccccgcccccagtgacacaatagtagctccctccaagatggcggcagcgacggcagacccgggagctgggaacccgcagcctggggactcctccggcgggggcgctgggggcgggctgccgtcccctggggagcaggagctgagccggcgcttgcagcgcctgtatcccgcggtcaaccagcaagagactccgctgccgcgctcctggagccccaaggacaaatacaactacattggtctctcccagggcaacctccgcgtccactacaaaggtatcggcccgtcaggctggggggaattaaggctagagcgtccgtggggtggctctgctgccaggcccccgccctatcacctccctttccctgcctaggtgctccaagttagggcttggccctttcaggatgtccagggtggtgaggctgaacaggccgagggctgactgcctgttctctgtcctgagacacctgccgtcaagagaaccgcaacaggtgtccaaacccagtgctgggccggaccttccactccagggcctccgtgcttatcctaggctggcgccaacggcagcgggacctttcgccactgcttagaagaaaggggtggtcacatacctaccattagcgtgagactcatgggcttccccacctgccaggcatcctagactgagcctggggttccgtgctagagtttggggggtgtcttccaggtcggcctcatccttcttcccctggcctcccaggtgggctgcctggattctagagaggctgccagcagcacttgagtatctctcacattgcctctacccttgttttgtttgtatgggcagtgtctcaggcaggactgctgttctcaggaggaggtgaggcaaaggtggaaggtttaagtgtttattcagttgtctaatgattcctcggcctgtgtaagtgcgtcctctggccacagaggagtggagttgtcatggaggagttgcagagaaaaatgaggcttccatttgcatttccttctgctgaaatttcttacttgccctctcctgttaggtcatggcaaaaatcacaaagatgcggcctcagtgcgtgccacccaccccatacctgctgcctgtggcatttattactttgaagtgaagattgtcagcaaaggaagagatgggtaagcccttcatgaccaccctctttccctgatcatggagctgatccctgtggtcagagttcaggtcctttggctggcacttgttgctgatgtgagctggggagccgcatgggtctgggctgccattatttcctgactgtgggcatggtctggtctaagcagcagatcttgatggccagtgggtgtgttgggggtaaagcagggattatttttagtgatgatgtaatttgatacctagaaggttaggcaaacaagtaacaagtttactttaaaaatttagtgtccagaatggagtttccctcatgagcatgtggtgtttttgtgacttccttcctttcacattcttgctgtattcatgaggttcttttttatggcatttagtcatgtggaggccctggtagccttcaaagagatagtagagtctttgcagcattcatgaaagcttctgtggccaccggcctgtcatctcagggtaaacagcatacacatgatcagaatcaggtgaccttgctgctcataaacttgtttttcagtccaaggacttgaacac

SEQ ID NO: 1243489 - DNA, 4001 bp, Homo sapiens
aagcccaaggacctaccgggtgctggccacaggcctgttggggtttccaaactctctccctgaatccacatcgaagggatctgagccgagagaggaaagtggcctctaagtgagctcagagcaggaccaggcctcccaccccccaggctttggagggccttggttcccaccccgccaaggctcaccgatctcctcctcctgggggctctccttggcattggccaagaactcctgctccgcctgcagcacctcctccgggctgccgcaggccgcgtacttgtccaggagctggcggttcaggtccaagaagcccttgccccatttaaacttccgcagcaaaatgacagcaaggtctggaaagcctgacggtgtgagaaacaggaaacccaaagaagtcgacggtcccctcaagtgcctcctgatcaccctgctgccggatggcggcgctctcccaagtaaccgcagggtccccagcaaacatcagctcacagtcctgagaacccgtgctgcccccagcctgcacctcccttgctacagtccacacctctgcaaccgaccaagtccccctcctttgctgcgaaacaaacattcccaccaagactgccccacgcctcatcagggcctctttagatcagcaattcagtaaggaggacgtggaggataaggaggattctctgggcagtggtgccctgataatgaatggcaccccacacaccggccctgatagaacagcgatcccattctgcctctactgcaactccacaggccgaaaacctgaagtgacagttggggctggaaccgtggtctgtctgaactgttcccctgtccgtcccttatgctcctcctggggtctgtcggcaggaaacatgatgctgggagcatagcaggaacagcaggccgccgggtcacactgctgtggggcccctggactcacctacgatgcagaaggtggcagcaaacgcttccacgcaggaaagtctgtagggccggccatagttcacggggttggcggccaccaggtagggcaacaggcgcaagtggctccctcgcatcttcccaaacggtgtctcgtccagcctggcccaggagcagtcgatgacggcgaccccagactgcgccaccagctgtctgccagggacagcatgggataagttcaggagccagcactacccaaggtggagcatgccccggagaatggcctagctaagggattcagggacatcattccgccatccccaaacaccctcaaacggacttcacgagcaagcttttgaggcagctgcttggggcacctggagcatgtgtttattcactcaacaaacgtttattaccccaaaacctcctttatcccaggctctgcgctacgcaacggaggcaaactagacagacgttccctgcccacgtgggtgtggatgtgggtgcgacatacaagtgccactaaaccatccctgaagggaaccacgcgctggaaatgaagacgacctcgggcaggcctcccgcgcctacctgtctgcgggggacgcgtactgcttgcccacggggctcagcaccagaccgccgaatctgtggcccaggcgcaggcagcgcaccagccccaggcgggccagcttgcggcccgtgcagcgccgggggtcgcagtggcccaactcccacatggccagcgtgcagggcagcgccgccgggcccgggccgccctcgccgtcagccgcccctggctccacggaagctgcacgagagagagaagggcactcggcctcagcgtgggacccccgggcaggccctcaaaccctgacccgctctccccatcacgcctcgctcaccctgcagcgcggcgccgacctcctcggcgaaggcctccagggagcgcgtcgggaggtgccgagggcggccgccttccgcccccggcccgcgcgctgccctcctgcggcccatggcgcggacctggggtgccggggactccccaccccacggccgcgcccctcggcctcccaatgggctgtgcggctgccagcgcttgcgccggacgccacttccggtccccgtggtcacgtgaccgtcacttcacgtgaccgcgcggcggccgctgcggcgcgatggcggcggggctggcgcggctcctgttgctcctcgggctctcggccggcggtgagtggcccggccgtccgcgtccccaggccccgcgcgcgctctgcaccccggcctccccgctcacggtctcgctccccgtagggcccgcgccggcaggtgcagcgaagatgaaggtggtggaggagcccaacgcgtttgggtgagcagcctcgcgggctggcggctcgagcgggggacggcccgggcccgttccccgctgaccttgccgcttcccgtagggtgaacaacccgttcttgcctcaggccagtcgcctccaggccaagagggatccttcacccgtgtctggtgagtgaggagcgctgttggccggcgcgggggtggccgcggggagcagcaacagtggaggatggatgagtgaccctgagagttacggcccggagtctaaagcattggtttgtcagccttctaaaattaatgtggaagtacgagagaatataccagaacgttcttgtagcgaattaaattatctccagacttagtccttcctttcctttccgagaggtaactgctgttaatagtctggtgactttgcagacgcgtttctgtgcttttacgtgcgtgtctatgcaactggaaaacgtatagtttttgtaatctaatcgcttttttaaaaaatcatgctgcgcgagtatttggctgatttgtcgttgtcactcgctgtatctctcgggacgcttcatggtgatgatataggtcttcgttctttctcttggtgctcagcacgcgataggatggcactgcactccccgattgtatttaggttcttgccatttttttggccattagaaatagttctgtggagaacatgctgtgtaggtgctttggtttgccctcaggtgagcggtttcccagtgcaggattccagaagtggaattggtgggtcatgagtatatatatcatttaaacgctgaatgagtattaaatataatagacaaaaatccaagaatttttttttttttttttttgagacaagagtctcgctctgtcgcccaggctggagtgcagtggcacgatctcggctcactgcaacctccgcctcccaggttcaagcgatcctcatgcctcagcctcccgagtagctgggatcacaggcatgcatcaccatcacgcccagcaaatttttgtatttttagtagagatagggtttatttcaccgtattgaccaggcgggtctcgaactcctgacctcaagtgatccgcccatctcggcctccaaaagtgctgggattataggcgtgagccaccgcgcccagctttagtaattttattatcgaatacctttatgtgttagggtctgtgctggggttgcagaaacgaacacagatataccaatgcttgtcctcatggagctgacagtctaatggggagggatggaggaacaggcactgagcctgtagaattagataaaatacatagaatggccaatgatgaaaaatgccatgtagatgtgtgaagcagaggagggagtgtgtgtatgtgtgttagagtattgtttgggggatcgctttttttattttttagagacggggtcttgctctctcactcgggctggagtgcagtagtgcaatcatagctcactgcatccttgaactcctgggctgaagcaatccaccaacctcagcttcctgagtagctgggactacaggtgcacgccaccatgcccggcaaatgttaagtgttcttgtagagatggaagtctcactatgttgcccaggctggccccaaactcccagcgtcaagcaatcctcctgtcttggtggggattgctttaaatagggtgctgaggaaaagtctaagaagtgacatttcagccaaaagctaaaggagaaaagggagtaaagctgtggctatt

SEQ ID NO: 1243490 - DNA, 4001 bp, Homo sapiens
cccctccaacaaagggacagggtggagctaggacgccgaggggtgtcggagcaggctggggaaatcggggcggctctagcctctcgggggacgttcggctactccagtggggggttcgggccgaggaaatcacggctgtgaggagaaccccccaccccacccaaacctgcctaccccacccgtctcactcaaggctatgccgcggccccaaaaaagagggccacgcccagacagggctcccagctgcacctgcggaggcccggtggagggggtgcaggtgtggagggggcgcaggtgtggagggggctgaggcttcgcgactgacgtgagctgcgcctcgacagcccgaggtcacctgggcaggggcagagaggtgcaggcgagagtcccagggcgggggccccgcgtcccggccgcccggcgcggcgctgggcgcatccctttgttgcaggttcgcaggggcgggggcagctggaggtgcggcccgcggggcacggcgcctccctcctcccgccccggggcccgggacaggccggggcgcgcagcctcaccttggccccgatctggttgccgcactggccggcctggatgtgcacgatctccctcatactgggcgcgtctggcgggcggctgcggacgggcgcgggcgggccgggctggctgctgagggtcggggaccgcggccgcgcgctcttatagccgcggccccgcccttcgcatcggctgatgtcaccgcgggtggccaatcgggaggcgccgccgcagagccccgcccggcccgcaggctccgcaccgcgcgtccccgcccgccgcgcgcaatgcggcgcccctcccgcagccaaggatcccccagcgctgggccgggcgcggtctgagggccccgcgcattcgaaaggaggggctgtctcccagaggagctggctgtgggggcgccgggctccagggaggacaatggcccctcttggccctgggaaccccgcccccagctaccctctcggttccgcccttgcgacagccccaccctgcggctttgtacggagggtcttttttccccacgccggtttagagaccaacccgcaccatcccagctccctgtcttttggcagacaaggtgctctgagcttttgccggttttgggtgggggaggtaggtaaaggctggcccaggccctgaacccactgagaagaaacaaagcgtcggatcagagctcggaagggcgcgaacacagaggggtggcggcggccgagagcgagctccgtgggtcgccggcttccgcagtgggcggggagggggtgggcacccgacctcctccaccaaggggctgccatgagcgtccaaaggagctttgtgggcccgggcgcgcacagcacctggacgtgccactgcccggtgcgcatccgtgtcaggaattgtcacaaggacgcacaagccaggcaagaacccggccagggtgggggagggtgggcagcggcttctatctgactcactctctgaggtcggagactgcgtgcaggggggcctcgggggagcgactggagatgcgtttactggtcagagaaggaagggagcaaaggactcgccggcacggcactgacctcctcctgggccagatattacagtgccaccaccttagaacaagggccttctgatacttcagtaacaaaaatccttcaggaagggtctgacagtgcacgatgtacagacgaaccccacccggcccccaaatcagcattcacttcacaaaatgagcagctgcgaacttgcctgtggacgcctgtgtccggtctgtgtgcacagggctgtgtgtgggtggcgtggacctgtacctgtctctctcttttctctcaagaagctctccagtttggaaagtcgagaaatggatcttttgttctcaagagatgcccctccctgccccacagtgtgctcgtgtggctgctgctggggtctagctgcctggggttcctccctgtccctgttcaagggagtccggggtgagtgtctgaggtgcctccctgtctccacgagggaagaagttttgcagcctcagggcagccagctcctgctccatcctcagaggggtctggtgccgggcttaaggctgactcaccgtccggtctcccagcagaggcgggccctgccaggaagcagctcccagttctgaggccggcagtcaggggtggggctggccagggggctgctgactgagcctgcgtaggagtcggctgatggccctgcagcctccattgagcctgtcccaggaagggggctgactgagtgctcagtctctgcagaggaaatggaggtggtctcttcagcgagacgcccaggtttcagcagagggatggcccaggggcgccactgctccccagcaccaggcagcatagttcatccccaggtactcactcccagggacttctccgccggctgggcctctgcctcactgccatcttcagaagcctcacatcaagcatttcccaggactggctgaacacagaccctccacccccgaccccttccccacctgcctactcccagaatggcagtgctgggcagacagcagacccagcccccagcccacctgcactgagcccccttccaggcatctcagagtggacagggatggtcccattcacggctcatcatggctggagggactcagggccagggccagcaaagggatgtgtcccggctgaggtcacatgtggtcacagggaaggctgggaacccgcctcttctgcagctaggacagcgtcaagagtggaggggactggggccctgctgcacctgctcgtccttcctctaggctggggtttgtcagcacggagagaaaaccgagaagcagggtcagcgcaagcctggttgggacctccacactccccaggcatttggggcctctggggctgtggcttcctcacctggggaggcagccacgttttccgggactcctttcttccctctcgactctcacccctgcccaccttcccctcccccatccctccacccgcaaacttcaagcactttctggaaggggctaaggtgggtgatgctgagtcacatttattaccagactttcctggccccatgctcacaggcactggtcactgagtcaggcatttgccagggctgtctgcttgggcgactgctgcaggaaagcaggctgaggccccagtgcccagtctgagccttagaaccggccctcaggagggctcagccccataccactaggggggctcctgcaaacctggtcccttggcctgaggcagggatttcacctccttttgcaggagccgctgcaaggctgtggatgaagctttctggtcacaaagccccttctcctggggctgctgtgggagtagctcttggcacacacttccacccagagacttcacatcccagctgacgagggcacggtcctgagagctggcagcaaagatggggtggggtggatgctgctcagtcattggagcagacggagtgtcccaggagtgggcggaaaatgtctctttaggagcctgaggttggcccctggtgcccggagcctgaggccccacaacctccccatgtcctcctccgttccccacgactgctggtgagaagtcctgcctggagttttgcagggacccctccctggacccagaagggtccgcgcttcaacactttcagagatcatttagtccatcctctttgacaaacggggaccagggaggtaaggaactgcccagggtcacacaggaaccagaccacacaatatcaccacctccctctgcccagcacacttaaagccgcgtgcaccgcgctcaccaggagcatgtcagcacctccttgagcgtcctgcggagctcctggctgtggaaggcgtagatgagggggtcgatgatggcattgcagatgatgagggcgagaaagaggttgaagttcttgaagatgcagccgcacgtggggtgctcggggcagaggacgatgagtgtgagatgcaggaagaaggggccccagcagaggaa

SEQ ID NO: 1243491 - DNA, 4001 bp, Homo sapiens
tattaagaaaaaacaaacaactcaaaaggaataaaaagtagcgggcaaactaagagctccagtgttcagaagcagagcacaaggcagccaaggacacggtccaggggacaagggctccctctgctacccgtggagcctcaggggatgtctgcatgtgcacctgacttctagatcccagctcttgcctgacaagtgccttgtgggaccacagctctgggcccatcccagccatagaaggagaaaccccaggtgggccccagggctgcctgccctccctctccccagagacccctgaccctcccaggagccccagggctgcctgccctccctccccccagcgacccctgaccctcccaggagcagatgctcaggggaggcttggccccagtgaccacattaatgagccctcagcccctcccatcaggccaaggcagctgtcagaggctgctccgggagtcctggtttgatttgaggccactgtcccccaggtctcccctcccccaggctctccttggcaggcacagctgtctccttgggtgattagagtctccccactactgggcctcccaccctcagaggcgcctccacccggagccaaagttgcaatttacatgtcagccacgtggctggccctgttgtaattagctttttgttcctgcctggtttccatggcaacagcctccggaggctgcctttctctggccccttcccctccaggaccgtctcctgcaccccctccttcccagaatcagcgctgcaccagccctgagctgggtccctggccttggtcctgacaaagccagcctccccccccgatcccctgttccccaacactgttcggagggcagatcctttggcaagcagcgcccccaacccgccccgcccgagccccaggttggctcctgcaggggatgagaaccaagggccagcccagctctctcgcacctgctgtgtgaccttgggccagggacagcctcccaggaccaggggacacgacgtccccttaatgatttaggcaggggtccctgcacagctgcaccaacgcccctttctgcgtggccccaacatctgcgaggtgggctaacaatggagggaggggcgcgccacggtgcagcctccacaccccacagcccggctttgttcccacatccaatccccagactggtagaccctgggtgggcgcggtcaagccccgcgggggttgcccaggagcggctgcgccgatggagagcctggtcctggaccaaggtcatctcgagtccaggcccaacccctccaacaaagggacagggtggagctaggacgccgaggggtgtcggagcaggctggggaaatcggggcggctctagcctctcgggggacgttcggctactccagtggggggttcgggccgaggaaatcacggctgtgaggagaaccccccaccccacccaaacctgcctaccccacccgtctcactcaaggctatgccgcggccccaaaaaagagggccacgcccagacagggctcccagctgcacctgcggaggcccggtggagggggtgcaggtgtggagggggcgcaggtgtggagggggctgaggcttcgcgactgacgtgagctgcgcctcgacagcccgaggtcacctgggcaggggcagagaggtgcaggcgagagtcccagggcgggggccccgcgtcccggccgcccggcgcggcgctgggcgcatccctttgttgcaggttcgcaggggcgggggcagctggaggtgcggcccgcggggcacggcgcctccctcctcccgccccggggcccgggacaggccggggcgcgcagcctcaccttggccccgatctggttgccgcactggccggcctggatgtgcacgatctccctcatactgggcgcgtctggcgggcggctgcggacgggcgcgggcgggccgggctggctgctgagggtcggggaccgcggccgcgcgctcttatagccgcggccccgcccttcgcatcggctgatgtcaccgcgggtggccaatcgggaggcgccgccgcagagccccgcccggcccgcaggctccgcaccgcgcgtccccgcccgccgcgcgcaatgcggcgcccctcccgcagccaaggatcccccagcgctgggccgggcgcggtctgagggccccgcgcattcgaaaggaggggctgtctcccagaggagctggctgtgggggcgccgggctccagggaggacaatggcccctcttggccctgggaaccccgcccccagctaccctctcggttccgcccttgcgacagccccaccctgcggctttgtacggagggtcttttttccccacgccggtttagagaccaacccgcaccatcccagctccctgtcttttggcagacaaggtgctctgagcttttgccggttttgggtgggggaggtaggtaaaggctggcccaggccctgaacccactgagaagaaacaaagcgtcggatcagagctcggaagggcgcgaacacagaggggtggcggcggccgagagcgagctccgtgggtcgccggcttccgcagtgggcggggagggggtgggcacccgacctcctccaccaaggggctgccatgagcgtccaaaggagctttgtgggcccgggcgcgcacagcacctggacgtgccactgcccggtgcgcatccgtgtcaggaattgtcacaaggacgcacaagccaggcaagaacccggccagggtgggggagggtgggcagcggcttctatctgactcactctctgaggtcggagactgcgtgcaggggggcctcgggggagcgactggagatgcgtttactggtcagagaaggaagggagcaaaggactcgccggcacggcactgacctcctcctgggccagatattacagtgccaccaccttagaacaagggccttctgatacttcagtaacaaaaatccttcaggaagggtctgacagtgcacgatgtacagacgaaccccacccggcccccaaatcagcattcacttcacaaaatgagcagctgcgaacttgcctgtggacgcctgtgtccggtctgtgtgcacagggctgtgtgtgggtggcgtggacctgtacctgtctctctcttttctctcaagaagctctccagtttggaaagtcgagaaatggatcttttgttctcaagagatgcccctccctgccccacagtgtgctcgtgtggctgctgctggggtctagctgcctggggttcctccctgtccctgttcaagggagtccggggtgagtgtctgaggtgcctccctgtctccacgagggaagaagttttgcagcctcagggcagccagctcctgctccatcctcagaggggtctggtgccgggcttaaggctgactcaccgtccggtctcccagcagaggcgggccctgccaggaagcagctcccagttctgaggccggcagtcaggggtggggctggccagggggctgctgactgagcctgcgtaggagtcggctgatggccctgcagcctccattgagcctgtcccaggaagggggctgactgagtgctcagtctctgcagaggaaatggaggtggtctcttcagcgagacgcccaggtttcagcagagggatggcccaggggcgccactgctccccagcaccaggcagcatagttcatccccaggtactcactcccagggacttctccgccggctgggcctctgcctcactgccatcttcagaagcctcacatcaagcatttcccaggactggctgaacacagaccctccacccccgaccccttccccacctgcctactcccagaatggcagtgctgggcagacagcagacccagcccccagcccacctgcactgagcccccttccaggcatctcagagtggacagggatggtcccattcacggctcatcatggctggagggactcagggccagggccagcaaagggatgtgtcccggctgaggtcacatgtggtcacagggaaggctgggaacccgcct

SEQ ID NO: 1243492 - DNA, 4001 bp, Homo sapiens
gagtcctcaccagggacggagtacaccgcctccacaggcagcaggaaaggcttctccaggtcccgggcgggcactgggatgtaagtgtccacagcatccagtagcttctgcacagacttcaggcctaactcagggtcccgaccctgttgaggggaagtgccaggactctgaaatccccattctacttccctcgattatcaagagccacttcccagacacaaagcagagctctgggtgcccatccagccccaccctctgcagcagctgccctgcctgaccccgcgttcacctcaagggcacagagagcagagcctacgatgactggggtctcctcccctttatagccaaactcggtgagcagctcccggatctccagttccaccagttccaccatctcagagtcctggacagcgtcagccttgttcacatacaccaccacatgctccaccccaatctgtagatgccagagagacagggacaatatacagaggggcccaactccccactcttcccttttgcatccttacccaggctctgagtacctgtctggccagtaataagtgctctcgggtctggggcatggggccgtcattggctgctaccaccaggatgcagccgtcgaggggtgcagtgcctgtgatcatattctggagaggagaaggaaaggaaacagccaagttcaacgagctcttcagttcacatccatatagccaagtgtagcagttagaaactcaggcccacctttctctaccatctcctcaccacccattctgcgtggccaagaccacaaacctgccatctcatacccaaacactgaatatcttaatctcctccccacaagcctaacatttatcctgacaagaggcagcttctggccctgtctccagtgtcccagcaaccctcaccttaacataatctgcatgacccgggcagtctgtgtgggcgtagtggcgggcggcagtgctatactccacatgagccgcattgatggtgataccccgagctcgctcctccggggcattgtcaatctcctcgtacttcttgaacttagccccacctccctcagctagaactaaaggaggaaaagaacacacctctcagctaaagttccagtgctagaggcagagcttagaccacgcccctgaaccctcccacctaaatacataacctcctccaatctctaactcttccagcagagagaactgtgggtcagaaagaaatgttagagggccttaagggtctgccctgtgacttctttagggtacagcctctgcttgcagagcattccccacgactttgtgatccccaagccattggtggatcacaaagttcttcctgttcaggagaaatttgtctcttgcatctcccaatccacctgtcgcacaaattcgggctcttggggccacagtaaactcctccagcagacactctgctggccttgcctccctggctccaggtcccatcagtagatagggcgctgctggacgccccaaccccactcactcttcgtgatggctgcagtcagcgtggtcttcccgtggtccacatggccgatggtacccacattcacatgtggcttgtcgcgcacgtaagtcttcttggcctccacggccaggccgcggcacaagagaggcaatgccggggctttcagcagccgcaacagaccctgcagcaggaaggtccggccggcggcgagacctgccgggaccgaagcttggagtcaggcagggaaggggtcagaccgaacccagccacctaccactcccccaaagtgttcctgggccgccatcgccctccctgaccactcaccgctgaagtggggcgtcgcgcgcagcagggtggcggccgccattgtggtcatactcgcgccccggtaaccggggagccgggaccaggagcccgagcgcacagaagaagaagggcgcctgcggctggaaggcacttccggcggaagttagagctgggagggcaagtccgggcccctctagccgccagtgtctatggccgtctcagccgacgtcgggcgcgcggctgaagacgtcatggagggggctggtgtctcgagggcggagtatgatggagaggttttccaccactcgcgcctctcgggctgaggggcaacgtagttctctctggcggtcgcagggggcactgaggagcgtcccctaaatcaccggcgccgcgaaggctcatgggcgtagtagttctcaggtcggcgggctgtggaggtgatcagagtgggagtcaggcgggctaggccggacccggagggaggggctcgggctccgggaggcagctgcggctccgactgctcaggaacctcctcctgggcccggcagagagagaccccgagtcccccggagtccgactcgctacgcgggtcttgcgagatatctggccgcctctgccgcagctggaggtaggggaccaggtcctggacgcctttcggggatggggtgaagtgtgacctccctcttcgctgagactttgttttctaatctgtaaaatgggaatagtagtatccacttcatagggagagcctgacatctagccctgagaggagatgaactgggtaggagtcagtgttgggccctgtgaggtcaggcagcttgcggggaccctgtactgctagacctcacagggccagagcccacaagacagacagcttcgctgcccacccctgtagtccctcagcagcctaaggagcagttccgttgggcatcgccccacccatctaattttgcagatgaggagccaaggatgaggagccagctaggggagcctttaaggggagcctgagtctcctttaatctgtcggtgtccccagcacctaacagggtggagcatgcagtgaatgttgaatgaatgggtgcaagggtagtcaatgtcccttaactttcacatccatcatctcatggcagcttccacagggcactccaaagtgttaattatggctgcttaaccctggctaatgtttcggaactcatcagatcctgagactcagtggacagtgtttgtttcaaatagattccctaattcctcccctggaggttatgattccgtggggtctatgcacagactgggaagctatataacaaacactcttctaaaactgagaagaggctgggcacggtggctatagtgccagcctatagtcccagcagtttgggaggctgaggtgggaggacggtttgaagccaggagttcaagaccagcctgggcagattaggagaccctatctctacaaaaaaaaatttaaaattagccaggcacagtagcatgcagctatagcccctcctactcaggaggccgaggcaggaggatcgcctgagctcaggagttcaaggctgtggtgaggtatgatcatgacactgcaccccaccgtgagtgacagagaaagaccccatcttttttttttttttttttttttttttggagacagagtctcactctgtcgcccaggctggagtgcaatggggcgatctcggctcactgcaacctccacctcctgggttgaagcaattctcccacctcagcctcctgagtagctgggactacaggcatgtgccaccacgcctggctaattttagtatttttagtacagatggggtttcacctcgttggccagacggctctcgaactccagacctcaagtgatccgcccattgtggcctcccaaagtgctgggactacaggcgtgagctaccacgctcagccaagaaagaccccatctctataaaaatattttggccaggcgtggtggctcacacctgtaatcctagcactttgggaggccgggcgggtggattgcttgagttcaggagttcgagaacagcctgggcaacacggtgaaactctgtctctactaaaatacaaaaaattagctgggcgtggcagtgtgcacctgtagtaccagctactcaggaggctgaggcaggataattgtttgcacccgggaggcggagcttgcagtgagctgagatggtgccactgcactccac

SEQ ID NO: 1243493 - DNA, 4001 bp, Homo sapiens
ctaatgctaaatgacgagttaatgggtgcagcacaccaacatggcacatgtatacatatgtaacgaaccttcacgttgtgcacatgtaccctaaaacttaaagtacaataataataaaaaataaataaaataaaaaaaaagaaagaggcacagggaaacttcacacacacacacacacacacacacacacacacacacgtcacctgaccatggaacagagagagatgtgaacatgctataacactggccttgaagacggaggaacaggccacaagccacagaatgccagcagtcaccaaaagctggaaaaggcaaagaatggattttcccctaattcttccgaagggagtgtggcactgctgccaccttggtttcagcccaggaacactgactgtggacttctggcctccagaactgcaggagaataaacttcttttgtcttaagccaagatgataatggtaatttgttctagcggccataggaaactaatacagtctattactttctggggtttattaggtttgaatcagagagtttgattttaaaaacagagactttacaaggaatggcatttgggtgccagggctcgtcccatgcctactggctctgatagctggaagcagaactgggtgggtgagtgaggctgagctgtgggtgtttctagaagtggctgccgcctgggccatcggcaaccacgttcacaggtcatccctcatgccttggtcatgccaccttctgggatgctagaggtctcaggcagttaagtgacttgacccaggacaagtctgtctagctagactcagcagggattagaataaaactccaagctctcttccacttgtccagcccactgccaagcttgctcccctctggcctcagtggctttctctgatcttacaacatagccccagggcctttgcgcttgctgttccttcagcttggaacactctccctctggagtctcccatggctggctgcttctcatcattctggtctcagctcaaatgccacctcctcagagaggccctccatggctgcactaaggcaagtggccttctctagttaccttctctttcatcacagggctgattttcttctcacattcaattatctcattaatctccttgcctgttcaacatcaactccaccccttcttcctccctctcccaatgcaggctccaggagggcagggactttgtctgatgtgtccacagatatgtccccagccccagacctggcacacagtaggtgctcaatatattttgaatgaatgagtgagtaaatgaatgaatttgcagctttggggaacgcctgacccaagctccatcccaacacacctgatcttggctttcctaaaggccagctcctcctcgtttccaaagtccagggacacatcctcggtatcgtccaccagggcctgggaggagagcaagggcaggtggcaggcccaagcacggcgcacaccccaaccccacccgccctgtcctcctgggcttggactccacttgcaccccaccgggttcccaagtggaccctccgagctggcggggcccctccgctgcggctgcagtgcaaagccctctccaccctcccgaccaccgggtgcagcccagccccaggccccggcgcatccctcctcctcctcccggcttctccagcgctcccgcaggctcccctcgtcccgccccgcctccagccccagcatccccgaggccctacctgcttcatcaccctcccaggagcccacctggcgcccaggcccggggctccagctccgcccgtcgccgctgaaggggtcggacgccgggcgggcggatgtaggcagcagacggtggacgctgagggtcggggcctgcgccctgtggggcagcctcagcgcagcttctcgggtggggcggggcgctcggggcctaaggcgcagtcgcaggctggggagggggctcggctcgccggggacgcgcccaggagagaaagcggcggcagggaggcaacggcctggggaactgcggacagagatagtgggaggaatgggagtcgggggcggggggcggctgcgtcagcgaatggtgtggacggcgcataaacgtggatgtagcgaatgataaggcagtgaatgaatgtcagtggtgggcagccgcattcagggttgggagaaggtcagtgtttcccaacagtctctgcgcgcaagaaattcccaggaaccttgtgaaaagcagattctcaggcccggcccgggggatgtggaaggcctggagtggggccctagaatctgccttccccgcgcccccaccccccacgacaaaatgcagttaggatgggccctgctgtgttcttttttggggggtggggtggggaaggcagattctagggccccactccaggccttccacatcccccgggccgggcctgagaatctgcttttcacaaggttcctgggaatttcttgcgtgcagagattgttgggaacattctctgcacctaggctggagagcactggtgccatcgtagctcactgtggcctcaaactccagggctcaagcagtcctcccgcctcagcctcccgaaaagctgggaccacaggctgcaccaccacacctagctaaatttttatttttgtagagaggagggtctcactatgtcgccccggctagtcttgaacaccgaggttcaagccatcctcctgcctcagcctcccaaagtgttgggattacaggagtgagccaccacacccggcctcacctgccttttaaggggtggcgctgctatagccacagcttcagaaccacagtgagatctgcgtgcatcgccgtgccaggcacttattaagcgcaaagttattagtagtattaatactattattgacagtaatagtagtgtttcttgaagtgaaagtcttcctgggtacctcccaggaaagaaaacttgtcacctgagggtctttcctggcccaggacacagtgactctcctctcctgcgtgccctctccctgtcctgatcccccacccacggacagagggctgagcatcgagatgccaaagccagtgaccctgccctttgccctcccaccatggacaataggtacgtgtcccctgcccctggtgaccccaaagagggctcctgggccacaagcccctgacacattttccccactgctggtctccatgggcggaggtggaggcaggagctgtctcatctctgatcctgggcctgggttccaggctttctgtcctccgcccccaccccaattccctaagctgaccccacaagggcctgccaggtgtgtgtggagggaaagtgctttctcctatgccatttctctttttttttttttttgagatggagtttccctcttgtcacccaggctggagtgcaatggtgcgatctcggctcactgcaacccctgcctcccgggttcctgcaattctcctgcctcagcctcccaggtagctggtattacaggcgcctgacatcaacccgggtaatttttgtattttgtatttttagtagagagggggtttcaccatgttggccaggctggtctccaactcctgaccgcaggtgatccacccaccttggcctcccaaagagctgggattacaggcatgaaccactgcacccagcctctactatgcgatcttcaggaaccaagatttatatatatacaatgtgtatatatgtgtgtgtgtatgtatatatatatatatatatatatatatatatatatatatatatatatgtatatgtatatatatttgccaaactctgctgcgatttggatagcttctaaaagacacactgcccagattgtgttatggaccaattaaatcaggctctctggggatgggaccctataccagtgcttttaaagctcccaggtgttgggctgcaaggtaaagaaccagtgatttaaatgagtgcttctgacccctcaatctgcaaatgaatctcctggggttggcttagaagctggatgctgactcagcgttctgggggtctgggg

SEQ ID NO: 1243494 - DNA, 4001 bp, Homo sapiens
gtgcactgggaaagataacagtatattcaaactttaatggggattgtaagatttaaatgacacccatactaggctctcaattatgtactaaatgaataaatgcttcatggaaacagtggttcccaagcaggcaattttgctcccaggggacatctaacaatgtctgaagccattgtagttgttacatcttgtggggtgtgctactggtatctagtgggtagaggccggggatgctgctagacatcctacagtagtcagggcagcccccacaacacagaattatctgacccaaaatatcaacagtgccaagacggagaaaccctgctgacagtacctggcctatggaaaatgctcactgagagttattataatttatctttccactaaaatccccgatcttttgacacctctttgacaactggccacatatcgtgctaaataaactcaaaaatgttccgaggtgaaatcacagatatcatagtagcaatacagatcttataaactggaatcccaaaagacccactgtggatttgggagaccagaagtacacctgaaatatacagcaaattttgtatgtgtgtacattcctgaaaagacacacatgaactttcatgttcctaccccctacaccccagcctactgtcaggcctttttatcaattccagggaaacaccaagcttgcccagcctcagaaactctgcatttgctgttcgctctaccgtggacacgctcccccgggatcttcccagcgctggtcccttctcctttttgtataagcttcaaatgtcacttccttaggaagtctttccccaccgccatcgtttctatgccctgcatagcactgaagctttaaaaaattatatttacttgttcactgtcccatccactcaagggagcaaaaagttcacccggacgagcgtccggcacatagtaggtgcagataaataatcgttagatcaggccgggtgcggggctctcgcctgtaatcccagcactttgggaggccgagacgggtggatcacgtgaggtcaggagttcgagaccagcctggccaacgtggtgaaactctgtctctactaaaaatacaaaaattagccaggcgtggtggcgcgcgcctgtaatccgagctactcaggagctgaggcagaagaaccccttgaacccgggaggcggaggtttcagtgagccgagatcgcgccactgcactcctgcctgggacacaatgcgtgactccgtctcaaaataaaaataatcgttagatcaatgagtgcgggaattctaaaaggggtctggaactctcgcaaggttgtggatcactacacctgaagcttaaggggaatgaaatcggtgagaaatgagggtcctacagcccgggccgaagtgacaggtccacccctagtgactccaacaggtgaggagcacccccgacccgcctccctcggcactaaagcgggacgatagggcgcagggctccacccggaagcctcgccataatgtccgcgggcgggccggggcgaggagaaggtgggaagccgtggccgcaggttccgggaggggtcagccgtcctgggcaaggtcaggcccgacttccccggctgaggccgctgcgacccggccctgcaggctccaggcggcagagcaaggggagcgccctagcggggccccagggtccgggccgcctcacctgcaggtgaacttgagggcgaggagcagcgcgcagccgagcgccacggccccgcagagcagctccggccgctggcgcgccatgaggaaggcgccacgcagcccgcgacggagccggcccgccgaggacgctgtggccagggtcgggctcgagctgaggcagtctgagcccgcggggccgccgccgccccctccctcgtcctcggcgtcctcgctgctgctgctgccgccgccgcggcctccgcattccgacattacatgctcccagtcgccggctttataccgccgccgccgcctcgggcccgaaggcccggcccggcccgttgctccccaatcccgcagctcgccgcacccgctaacccggacgctccacgtcagccgcgccgccgccgcggggtccgccccacctcacaccccagagcacgcagctccgcccaccgctcacggagtccgggcgggcaccgacaccgcccaaatccccgcccccaacgggccacgccctgcaccctacgtaaatgcacggaagccttccccgcccgcagcccagtcttggccccaccggtcacgaccccgctcacggagtctgcgcaggcgccgtcgcggggcgtggagaagctgctcccttgggataaggcccgcggggaatacttggaaccttgacaccgctgtagtctgctctcgccgcgctgggttttaggagccgtaacgacaataatcgtgtccaccattctcactacaggccccgaagcacgtaggtgccgttttttatcccaacttaactgaagaaaaaaaaaacacggccgggcgcggtggctcaagcctgtaatcccagcacgttgggaggccaaggcgggcagattacatgagaccaggcgttcaagaccagcctggccaacatggtgaaacctcgtctctactaaaaatacaaatatattagccgggcgtggtggcgggcgcctgtaatcctagctgcttgggaggctgaggcagagaattgcttgaaccctggaggcggaggttgcagtgagtggagatggcgccactgcactcccgtctgggggagagagagagagagactcttgtctcaaaaaaaaaaaaaggacttgtcctccaatgtcaataacaacaaactagacaaataaaacttcgagggcattaaggcaatatggtgttatgccacaaacagaaggcacagctaacggccagtagctgagacgccacctctgccacaggtcagctatgtgacccacgtgcaaatctcatcacttcctgtctggttctgcttctgtggatgtagaatggggcaatcaatggctgtcttgctcaattggccagacatttaatgtgtcaaccacccaggcccaacatgttgtgagttcatgtacaccgaccattttgctatttcttttctatatgtcactttttttttttttttggttgttttttgatacagggtcttgtgtcacccaggctggagtgcaatggcgcaatcatagcacactgaagccttgacaaccccagctcaagcgatccacccccgtcagcctcccaagtagtaggcaacacagatgtgtgcgactacgcccagctaattttttttttttgtggagacaaggtctctccatgttgcctaggctggtcttgaactcctgggctcaagcgatcttcccccttcgacctcccaaagcgttaggattatgtaaaagcatgagtcactgcgcccacctgtcacatctttttgtttcttctatactgccttattttgtagaaagtagctattttctcgtataacattaattcctttatttttaacttgtccctcatctctgttttgtgttattattacccttattatctatgttacaaacccaaccatacagtgttaatcttgttttaaaaagctgagaaaaaatatatagttacagagtttttttaaccttctaatttgccacttatacttctgttgattcctttgtgtagattagagttacacaatttattgctaaagaaaataaatatggtcaaaagtcaccagtgtcctcattcactgtagcttgctgcaacagaatttaccctacacttccataagacatctgacatttgcacagggcttcataaggtccaaagtactttcgttgtctgtggtttaatctcacaaaacccatagtcctttgtgagcaaatgcaaggcagtgtcttactgaccagaaaaccaccctggattaacaaaagaatgcctcctttcctcttcactttctgagcaactggggccctgctctggcagcagaatgttctcttttttattttttgtagagatgg

SEQ ID NO: 1243495 - DNA, 4001 bp, Homo sapiens
ttgcactttctactacaatgacaaggactagaatacaggccaccaaatttctagtccaggggtccttctactacaataatctattttcatgattggtagaaatttcatttttgagaaactctttgacaaagaagcttagttttgtggtcatctataagagactccattgagatggtcggtattttgaattcagttccaaatatgaaaagggaggatttcttttcctattttttttgtcacaagtcacattttaagatacgaattaggccaggctcacccctgtaatcccagcactttgggaggccaaggagggtggatcacctatggccaggaattcgagaccagcctggccaacatggtgaaaccccgtctctactaaaaatacaaaaaattagccgggcgtggtggcagatgccacctgtaatccaagctactcaggaggctgaggcaggagaattgcttgaaccctggaggcggaggttgcagtgagctaggatcgctccactgcactccagcctgggcaaggcaacaagagcgaagctccgtctccaaaaaaaaaaaaaggaattatttaactaaaattcacataggaaataagattgttccagctataggtcatactttaaacagggacattgatggcccaaagggacgtcatcagatgtgagcagcagaacaaattaccaatgaaagggaaggtcaaagagaagacggatctgtcccactagaattcaaacaaacagcagttcctccgtgttactgatcgaaaggagaaagtaaggggagaacaaagttgttagtggtgaggctaggggtgcaactggacaaacgttggaagcaggagaggaaaactgagaccacatctaagaaaatgtccatagtaaatgatacccacagagaattcccaaaagaagacgtacaaatggacagtaaataaactaaaaagttaagctttaccagtaagcaaagaaaagcaaattaaaacatatgtttacaaagtcactgaattggcaaaaattaaacaagatagtggtaggggcaggcacagggagttcctgctggaatgcagacacaaaacctttctggaaagaaaactgacatactctttgaccaataactccactgctttcctctctccctctctttttctgaggcggggtttcgctatgttgcccaggctggtctcaactccccaggctcaagcaatcctcccgcctcagcctcccgagtagctggaacctcaggcgcgcgccacaactgcagaaacaccaaaaaaagaaaaaaagcttgaactcacttttgtacagaatcttactacaatgtattccagaaaaacaactggaaatcagtggtcatctctgcgtgtgaacgcatgggtgatttttatttacagccgggcgcgcatctccattttccaaaatatccgatatacatatttaaagtcacctgtgttgcgctgctcctggcccacaagcgctaagggaccccagcacttaccttactcgtccacgccgcctcactccctttcactttgtggctgtcagcaaccacttctcggaagagcccgggcgcggacagctcctttcatcagccccaagccggacaggaccctaagaccaagtcacccaggggctgttgcctagcaaccctcgtggccccgctagcgggaaggaaaccgaacagaaaacgcacaagcgcagaaaagaaactcctggccgtcggtcggcccccgctcaacagcccaataaacggaagagcttctagtcaccgcccaccttgctcggctctgaccggaagctaggcgtcacctccgcccgtattaaagatggtcgacctttttcccctccttttcctgcccccagactagaggcgggatgtagtctcttaggctaagagtgattggtcacaaggagactcggaagtgtctgatcagagccccagaggaggccttgagagcctgttggcgtaccgttccacacttggatccaggaatcgggcgtgttccaggctgctctctatggtagctttgggcggatagagggggcgcgcaaagtattaagggacaataatggccgctttcaaggtgtggattttggctccttgagcctgtctgagcgaggggtggcagcgccggcgccccagaatccgggacagaagggtcccaagagtcgcgcttggtgaggtgagagtcccttcttccttcctggcctgcccttctgtaatcatggcggctctaggcggcggatattggtcccctgctcaggtccgggccccagtttggggagttcctctgtcgtccctgtcacccaccttgccttactcacctcagggatgctgcatccgtcctggccgccttggccttcctccttgctctggtcaaatcctgctgcctggagcggcctcgctgagatccagggatgctgcctggagtggccttggtccctctcccaggcctccgctttaacccaccccagactgtcaccgagcccgagtaggactccttgtgtcttcctctgctctctcacagtgtcatttataccaggcaatctggtgggcgatctcttctactagaatgtcagctccaggtgggcggggatttttgtcttgttctctgttgctatcgccgagaacagcaattggctcagggacaccctcagtgaataattgttgaatgaatgaatccaggttctttcttccctggctttctcgtacgccttgtagtttctttgccattaatccttctcaagaatcttgctctttagctccttatttgttcgtctcagcagctaatgaagttctctctggctgtctccttgtcctgtgttgctggaatcttcccttgctgtctccagaaatgtttgggttcctgtcctcctttaataagtttaaattaattcattttttaatttatcaaacgcttattttgctagacattgagctacagcagtcaacaacacatccagtgttctctcaactgcgtagaatggcagtccagggtacctttcctagtttagacaactattgagtagagcctgtatatctttaccttcttgtgtggatttcctcacatgcgcacagatgtcaccaatatgcagctttctttttttctgttctgcctgatggcattttcaaaatgtaactcttgtttctgcattaatattatgtgtccagtctgtttggcaatactctgtagagctgtgcatttaattagagtttggtaaacaattctggattctggtggcatctcctttgctttgctaacttgttggaatgagaggaattatccaagcatccagaactgatatatgttgatgagtggcagatgtgtagtgagaggtaaagaggagcttgttccaacttgagtgccagaagtcttgtagccacttaaatacttctcagtaacaccttttcctaacctggtgtttctcataaatatttttggtgaacatggattgttattaaactgattttggctgctgtgagtaaattgttttctgtaaaacgcagctaggccaagaaaagccactaaagtatggagaacatggacggtagccttctgccccatctctgtgctgctgtacctgttgtttaaagagaggaagaggtagaactcatgtaaaaaaatgggtgagggaccaacagtatataggaggatagcaaataatacaatgtagcagttacatttatgttaactgttatggttacataaagagctactctttatggtttcacatacactttttgtttgattctcacaatagcttcatggattagataaggtaaaaattttttccatttaatagatatgaaattatggctaaacaaagattaagttatttgcttaccatcatacaggtagaaagtgtcaagagcctggtttctaattgaggtttctgattcaaatttagtggtgttttccctacatccctgttacagctgctgacatcaggctctagaaagtgtcccttagtgagactttttattgcctcttggatctttgt

SEQ ID NO: 1243496 - DNA, 4001 bp, Homo sapiens
gcaggagaattgcttgaaccctggaggcggaggttgcagtgagctaggatcgctccactgcactccagcctgggcaaggcaacaagagcgaagctccgtctccaaaaaaaaaaaaaggaattatttaactaaaattcacataggaaataagattgttccagctataggtcatactttaaacagggacattgatggcccaaagggacgtcatcagatgtgagcagcagaacaaattaccaatgaaagggaaggtcaaagagaagacggatctgtcccactagaattcaaacaaacagcagttcctccgtgttactgatcgaaaggagaaagtaaggggagaacaaagttgttagtggtgaggctaggggtgcaactggacaaacgttggaagcaggagaggaaaactgagaccacatctaagaaaatgtccatagtaaatgatacccacagagaattcccaaaagaagacgtacaaatggacagtaaataaactaaaaagttaagctttaccagtaagcaaagaaaagcaaattaaaacatatgtttacaaagtcactgaattggcaaaaattaaacaagatagtggtaggggcaggcacagggagttcctgctggaatgcagacacaaaacctttctggaaagaaaactgacatactctttgaccaataactccactgctttcctctctccctctctttttctgaggcggggtttcgctatgttgcccaggctggtctcaactccccaggctcaagcaatcctcccgcctcagcctcccgagtagctggaacctcaggcgcgcgccacaactgcagaaacaccaaaaaaagaaaaaaagcttgaactcacttttgtacagaatcttactacaatgtattccagaaaaacaactggaaatcagtggtcatctctgcgtgtgaacgcatgggtgatttttatttacagccgggcgcgcatctccattttccaaaatatccgatatacatatttaaagtcacctgtgttgcgctgctcctggcccacaagcgctaagggaccccagcacttaccttactcgtccacgccgcctcactccctttcactttgtggctgtcagcaaccacttctcggaagagcccgggcgcggacagctcctttcatcagccccaagccggacaggaccctaagaccaagtcacccaggggctgttgcctagcaaccctcgtggccccgctagcgggaaggaaaccgaacagaaaacgcacaagcgcagaaaagaaactcctggccgtcggtcggcccccgctcaacagcccaataaacggaagagcttctagtcaccgcccaccttgctcggctctgaccggaagctaggcgtcacctccgcccgtattaaagatggtcgacctttttcccctccttttcctgcccccagactagaggcgggatgtagtctcttaggctaagagtgattggtcacaaggagactcggaagtgtctgatcagagccccagaggaggccttgagagcctgttggcgtaccgttccacacttggatccaggaatcgggcgtgttccaggctgctctctatggtagctttgggcggatagagggggcgcgcaaagtattaagggacaataatggccgctttcaaggtgtggattttggctccttgagcctgtctgagcgaggggtggcagcgccggcgccccagaatccgggacagaagggtcccaagagtcgcgcttggtgaggtgagagtcccttcttccttcctggcctgcccttctgtaatcatggcggctctaggcggcggatattggtcccctgctcaggtccgggccccagtttggggagttcctctgtcgtccctgtcacccaccttgccttactcacctcagggatgctgcatccgtcctggccgccttggccttcctccttgctctggtcaaatcctgctgcctggagcggcctcgctgagatccagggatgctgcctggagtggccttggtccctctcccaggcctccgctttaacccaccccagactgtcaccgagcccgagtaggactccttgtgtcttcctctgctctctcacagtgtcatttataccaggcaatctggtgggcgatctcttctactagaatgtcagctccaggtgggcggggatttttgtcttgttctctgttgctatcgccgagaacagcaattggctcagggacaccctcagtgaataattgttgaatgaatgaatccaggttctttcttccctggctttctcgtacgccttgtagtttctttgccattaatccttctcaagaatcttgctctttagctccttatttgttcgtctcagcagctaatgaagttctctctggctgtctccttgtcctgtgttgctggaatcttcccttgctgtctccagaaatgtttgggttcctgtcctcctttaataagtttaaattaattcattttttaatttatcaaacgcttattttgctagacattgagctacagcagtcaacaacacatccagtgttctctcaactgcgtagaatggcagtccagggtacctttcctagtttagacaactattgagtagagcctgtatatctttaccttcttgtgtggatttcctcacatgcgcacagatgtcaccaatatgcagctttctttttttctgttctgcctgatggcattttcaaaatgtaactcttgtttctgcattaatattatgtgtccagtctgtttggcaatactctgtagagctgtgcatttaattagagtttggtaaacaattctggattctggtggcatctcctttgctttgctaacttgttggaatgagaggaattatccaagcatccagaactgatatatgttgatgagtggcagatgtgtagtgagaggtaaagaggagcttgttccaacttgagtgccagaagtcttgtagccacttaaatacttctcagtaacaccttttcctaacctggtgtttctcataaatatttttggtgaacatggattgttattaaactgattttggctgctgtgagtaaattgttttctgtaaaacgcagctaggccaagaaaagccactaaagtatggagaacatggacggtagccttctgccccatctctgtgctgctgtacctgttgtttaaagagaggaagaggtagaactcatgtaaaaaaatgggtgagggaccaacagtatataggaggatagcaaataatacaatgtagcagttacatttatgttaactgttatggttacataaagagctactctttatggtttcacatacactttttgtttgattctcacaatagcttcatggattagataaggtaaaaattttttccatttaatagatatgaaattatggctaaacaaagattaagttatttgcttaccatcatacaggtagaaagtgtcaagagcctggtttctaattgaggtttctgattcaaatttagtggtgttttccctacatccctgttacagctgctgacatcaggctctagaaagtgtcccttagtgagactttttattgcctcttggatctttgtgggggctggggaggaatgtatggggtgtgtgtgtgtgtgtgtgtgtgtgtgtatctattttggtgtttattgggggttggaataggagaatctttggagataggcagtgacttgatggaaaggtcttggagagagggagcaaaagtagtcctggtcttaaggggagatggggaaggttaatcacctacatataaccataactgcatttattgtgggatatagtagagctgagccttctctagtaccaaatggtttgccttccttccagagaaatcccagatcctgtgatgggggacaccagtgaggatgcctcgatccatcgattggaaggcactgatctggactgtcaggttggtggtcttatttgcaagtccaaaagtgcggccagcgagcagcatgtcttcaaggctcctgctccccgcccttcattactcggactggacttgc

SEQ ID NO: 1243497 - DNA, 4001 bp, Homo sapiens
cttgcatgtgttacactttttaaacagtcctttattgtatactttatattattacaagtcctggcttaaagattcttcgtgtgcaccttactaggtgcacctcattacacggcaaacagatcaattaagagtgtgtgtgaaaactacaataccataaacaaataataaaatactgaggtacaagggacctaatacaaccccgtcattttacaaactagcttgcttacagttgcactttctactacaatgacaaggactagaatacaggccaccaaatttctagtccaggggtccttctactacaataatctattttcatgattggtagaaatttcatttttgagaaactctttgacaaagaagcttagttttgtggtcatctataagagactccattgagatggtcggtattttgaattcagttccaaatatgaaaagggaggatttcttttcctattttttttgtcacaagtcacattttaagatacgaattaggccaggctcacccctgtaatcccagcactttgggaggccaaggagggtggatcacctatggccaggaattcgagaccagcctggccaacatggtgaaaccccgtctctactaaaaatacaaaaaattagccgggcgtggtggcagatgccacctgtaatccaagctactcaggaggctgaggcaggagaattgcttgaaccctggaggcggaggttgcagtgagctaggatcgctccactgcactccagcctgggcaaggcaacaagagcgaagctccgtctccaaaaaaaaaaaaaggaattatttaactaaaattcacataggaaataagattgttccagctataggtcatactttaaacagggacattgatggcccaaagggacgtcatcagatgtgagcagcagaacaaattaccaatgaaagggaaggtcaaagagaagacggatctgtcccactagaattcaaacaaacagcagttcctccgtgttactgatcgaaaggagaaagtaaggggagaacaaagttgttagtggtgaggctaggggtgcaactggacaaacgttggaagcaggagaggaaaactgagaccacatctaagaaaatgtccatagtaaatgatacccacagagaattcccaaaagaagacgtacaaatggacagtaaataaactaaaaagttaagctttaccagtaagcaaagaaaagcaaattaaaacatatgtttacaaagtcactgaattggcaaaaattaaacaagatagtggtaggggcaggcacagggagttcctgctggaatgcagacacaaaacctttctggaaagaaaactgacatactctttgaccaataactccactgctttcctctctccctctctttttctgaggcggggtttcgctatgttgcccaggctggtctcaactccccaggctcaagcaatcctcccgcctcagcctcccgagtagctggaacctcaggcgcgcgccacaactgcagaaacaccaaaaaaagaaaaaaagcttgaactcacttttgtacagaatcttactacaatgtattccagaaaaacaactggaaatcagtggtcatctctgcgtgtgaacgcatgggtgatttttatttacagccgggcgcgcatctccattttccaaaatatccgatatacatatttaaagtcacctgtgttgcgctgctcctggcccacaagcgctaagggaccccagcacttaccttactcgtccacgccgcctcactccctttcactttgtggctgtcagcaaccacttctcggaagagcccgggcgcggacagctcctttcatcagccccaagccggacaggaccctaagaccaagtcacccaggggctgttgcctagcaaccctcgtggccccgctagcgggaaggaaaccgaacagaaaacgcacaagcgcagaaaagaaactcctggccgtcggtcggcccccgctcaacagcccaataaacggaagagcttctagtcaccgcccaccttgctcggctctgaccggaagctaggcgtcacctccgcccgtattaaagatggtcgacctttttcccctccttttcctgcccccagactagaggcgggatgtagtctcttaggctaagagtgattggtcacaaggagactcggaagtgtctgatcagagccccagaggaggccttgagagcctgttggcgtaccgttccacacttggatccaggaatcgggcgtgttccaggctgctctctatggtagctttgggcggatagagggggcgcgcaaagtattaagggacaataatggccgctttcaaggtgtggattttggctccttgagcctgtctgagcgaggggtggcagcgccggcgccccagaatccgggacagaagggtcccaagagtcgcgcttggtgaggtgagagtcccttcttccttcctggcctgcccttctgtaatcatggcggctctaggcggcggatattggtcccctgctcaggtccgggccccagtttggggagttcctctgtcgtccctgtcacccaccttgccttactcacctcagggatgctgcatccgtcctggccgccttggccttcctccttgctctggtcaaatcctgctgcctggagcggcctcgctgagatccagggatgctgcctggagtggccttggtccctctcccaggcctccgctttaacccaccccagactgtcaccgagcccgagtaggactccttgtgtcttcctctgctctctcacagtgtcatttataccaggcaatctggtgggcgatctcttctactagaatgtcagctccaggtgggcggggatttttgtcttgttctctgttgctatcgccgagaacagcaattggctcagggacaccctcagtgaataattgttgaatgaatgaatccaggttctttcttccctggctttctcgtacgccttgtagtttctttgccattaatccttctcaagaatcttgctctttagctccttatttgttcgtctcagcagctaatgaagttctctctggctgtctccttgtcctgtgttgctggaatcttcccttgctgtctccagaaatgtttgggttcctgtcctcctttaataagtttaaattaattcattttttaatttatcaaacgcttattttgctagacattgagctacagcagtcaacaacacatccagtgttctctcaactgcgtagaatggcagtccagggtacctttcctagtttagacaactattgagtagagcctgtatatctttaccttcttgtgtggatttcctcacatgcgcacagatgtcaccaatatgcagctttctttttttctgttctgcctgatggcattttcaaaatgtaactcttgtttctgcattaatattatgtgtccagtctgtttggcaatactctgtagagctgtgcatttaattagagtttggtaaacaattctggattctggtggcatctcctttgctttgctaacttgttggaatgagaggaattatccaagcatccagaactgatatatgttgatgagtggcagatgtgtagtgagaggtaaagaggagcttgttccaacttgagtgccagaagtcttgtagccacttaaatacttctcagtaacaccttttcctaacctggtgtttctcataaatatttttggtgaacatggattgttattaaactgattttggctgctgtgagtaaattgttttctgtaaaacgcagctaggccaagaaaagccactaaagtatggagaacatggacggtagccttctgccccatctctgtgctgctgtacctgttgtttaaagagaggaagaggtagaactcatgtaaaaaaatgggtgagggaccaacagtatataggaggatagcaaataatacaatgtagcagttacatttatgttaactgttatggttacataaagagctactctttatggtttcacatacactttttgtttgattctcacaatagcttcatggatt

SEQ ID NO: 1243498 - DNA, 4001 bp, Homo sapiens
cctctgggaacagtctttccccagacattgcactcctcaaagctgcattttcaattaactgtgccgctgagggatgtggcctgggtgccagctgggtgccaggttttgagggctgggctgagtcctgcaggcagggcccgcttcccaccggacacctacctgcccagccccaggcagcgagggaaccctgcgtgcagatgtgtaactgccatgaatgcggttttgcaagttttgccacatccagcccctgacacaaacagggctgatgagggctgtggagaccaggagggaagcagggagcttcctccgggtggggctgccttggggcacagggggcagtaagctggccaacagaagctgactcatgccccccaaccccaccatacagatgtggaaactaaggccagagggacagagcagcctcccacgtcctggggtgaacaccacacaggatcagtggcctccgcgacggctggtaggagggaagtaggcaaggagagagggatgtactcatctggatgggatggccactgccttcccagactgtcccaagcttgggacattctgatccccctgcagtccccaggaagcggagcctcagagtcctctggcttctagtccctcctgcaggccctgggatggctcctcatggagaaaccaggttcccagtccccggctgggcacagatggtaccgggatggctgaggccatgaccctacccctgtgaggggcacagctcaaagggctctggcctcatcccctgataccaaccaccatggggttaatcctggggtcggtgaattagggaaagccaggtagcctctgggcagcacaagccaggagcactactgtcctatgggttaggagaggcccgggggagtgggtgccagaccggggcagcatcacctcctacccagctagcccgaaagctggtgaaccgtgtgcaccctccccattgcaccggtaaagggacagatgcccctgccagccccaggagagcacctagtcgcgcacacggagtccccaggcacacctctgaaggggatacacgctcatccctgtggtgtagtgtggggctccgacacgccacccctacactccaggccgtgtacacacatcacaccgtgccgggcacgggcggcatctgcacacccgccacatgtgtacgcgttgatcacacaccaaacgcaccagggggctgcgcgttcacacgcgcgccaacgtgcccgcaggtccgccacctccccggtgcccggccgacgccgtggcgcggtgcgtgcgtaaacacaaatgcacatggacgtgtgcgcacgccgccgaccgcccaccaggcacgcggaccctcggaccactcgcccggagcggctccgccctccggcccagctctgccgaggcctggggcgtcctccttccggccgcccgcccgactgtccgtctgcaccgcggggccgcccggccctcggccgttacccggacaaaaggggtggggggggtccccgtctcgatcccgggggactcgcggccccgcgggggcggcgtatccccgaccggtggcccggttcccacctccgcccgccgcgagcccttgggatccggacgccgggcaccgccgtcgggaaagcgggtcgggtctgcggcccggagggggcgcacagccggcacgcgtccacgccgtccgcccccgcccggcggccacgcgggacacactccgcccgtggccccggccctcgcccggctccggcgccgcgcacctcgaactgccagtgggccgcctgcagcagttgcttcgcctggtcggccgcgcagcccgccgtcagcacgaactggttgatcatgacctggtgcttgagctcgtccatgttcacggacatggcgccgccgcgctgcccgctccggcctccctcctccgcccgcgcctccgcctcacgcgtccaccattagcgagccggctccggctaatacaaatatttactgtgcggctctgactcaccgcgcctcgcctcgctccgccggcgccgcggcatgctgggatatgtagtccccacggtgcgccgggcgccccgggggagcggggccggcaccctaggggacgcgaagcccgggaaggggcgtgtctgagcaccgagcgcccgctgtgcggatgtccgggccgtaacccgagccgggcgcgtccacgtcgtcctcgttgctctcggtggcacccgtgcccctgctctggcacggatgggggtccgctggcgggggccacgtctgtgcatgggcgcaaatgcctgaccacaggatcttggccaaggcctggggaccgtgtctgaactgtgagcgcctactgtgtgtggatgcccgggccgtgaccagggttgggggagtccacgtcgccctcgttgctctgggtggcacccggcccctgctctggcacggatggaggtccgcaggcgggggcctcaggttcgtgcataggcgtttttgccaaggcccaggaacggtgtctgaaaactgagtgcctaatgtgtgcaggcgcctgagctgggaccagagccagtcacgtccacgtcgccctcgttgctctcggtggcacccacgcccctgctctggcgggaattaggagcccagaggccggggccacagatctgtgcatgggcgcaaacgccaggccacagacgtctttgccatgccccggggactgtgactgaacgctaagtgcctactgtgcgcagctgtccagaccgtgaccagagccaggcacgtccatgtcgccctcattgctctcggtggcacccgtgcccctgctctggcacgaattggggtcccaaggtggggcatacagatctgtgcatgggcgcaaacgccgggccacaggcgtctttgctaagacctagggaccctgaacccctctgtgattggcatcgctctgtgttaaatagtaggcacgcccttaagagaggggtctctaggaattttggcccaaatcggctggtctaggctgaaaggcccggcacactgtaggcgccgacaaatactcgttcagtgaatgaatgaatgagccacttaaaagctccgccgcacgtcaccgcctatagctagcctcctagctctcctcactcaatctctcatcgcccactcgtggcatgggtccttcctagcctggctctgggcctgccccactgtagccccatgaccctctggacggcgcctgggacaggctggcggggccagcagcctctggtgcttcggggtccccctcccagcagttctcccgctttcccacgcaaaatctcgtgctctttgccggaaatctcggcccttagcgggcgggcgccaaggcccggcagagccagttccggagcggccccaaactccctttcccagaatgcctcggtttatttgcatcgtttggtcccggtgacgtcagctgagtgaggtcgtgcctcgaccaatggacagcctcggggtgttaggacctggccatataaggtaaacaaagctggtcgcccaatgaagaggcggcgggggcgggcgctgggccggggaggccgggggcggagccgggggcggggcgaccgggcggtgtttacagaccggcacatggcgcttccggttgacgttgctgacagctagtgaggctttagcccgcttcgagcgcccgggggcggtaaggcgcgatcatagcagctctaggtgaccttggtccggctccttgcgccccctggccccagcctccttcgttgagacactatttgttgagtctttcctcttttcctggccctgacctagcgtggggcgacagaagagcaatagccgggtgggggctgtgagaacggctggggttgggagcgaatttcggaaacccggaggacgagtatagccttgcaagatggaaaatgccctcccgggctggcgcggtggcctgtaatcccacctactcggggtccgaggagggaggattgcctaggcccaggactttgagaacacgcctctacagagatttacattttaagaaaatt

SEQ ID NO: 1243499 - DNA, 4001 bp, Homo sapiens
tgccacaggcagccctcctgctgaggactggacagagccgcctagaggcccccgtcccagcacctagctattgctgtctcaggtgtgagaagtcgtgaggggtggtcctgcgagacctcctgccaagacctggctgctgctgctgtgtcccctgccccaaagcactcagcaccacggggtggtctcacaggcactgcaccgccagggcaaggagccacaggtgcacacccaccgtgtcccagacagaagccaggcccctccccctgcaccccctcctactggccttctggagaaagcggccaatctgttacaatgtaatcacaacacagatcaagcgttcaaaattccgctgaaaatcgaatttgcccttccaaattcacagataggcacttagtgaacggctagtagttactaaacgcttcagagcaagaaacttttatgatgcaaagacaaaaacaaccctcatctattagagccaggcaaggcccagacactgcagaaacggggacagggccgggcactccaggagcggcccgaaagtctgccttctgtcctcctgctgggcgcccgcaaccggctgagctttagcttctcggatcaccgccttgctctgctggttgacagcaccgacttcagagcaacttcctggctgagggtgagcaaagcactcacctcccacaactccaccgcactgatctccacaacgggtggtcgccacgacaggctggcacaagaagcctttaaaggccctcctgcacccaaatgcaaactctcccaggcttggggaggtattcccttctgcaagacccaagcacctgcagtcgggagacgcttacctggccgcacctgatctgccccaggccccgagaatgtttctgaagcaagatcccaaaccctgagacaccatacaagcgcacaccagcaatcacccagtggcctagggaacggacctctctgaatgagcaatcagggcaaactgaggatccgtcccgtcttccgttgcataggttctctacccaaaggcaacgtttcttgaagagcaagaaacacttggggtaggtcctgtaaaaggaaacaaaccgaactccccaaagacaggcactttgcaaacagagaaactaagcgtaacttccaattatacaaacaaaaccacttcattctgcgattcaagcgtgactacaggccacgatcacaagcccaactaatcattcccttacattcctcctacgcacgttaactaccagaaccaactactattcaaccgataaaaagagatgtccaaaacagaataaaactccccctccagcgaggcgctcacgttcagggccccagcaagcgccagcggagcatcttcagaggcacaagaaaacttacacttgttttggttttaaggcaccgaaaacaagcccgctcgccggcccccacccccgcgagccagcgatgttgcaatccaagactctccccccgcggcccatcctatccgtccgcggggcgaccgtgaccccggaagccgctccccgcgcaggaggaaggcgcggcctcgcggggccccggctgcaggtggctgccccggccccgcgccaggcgcacctcgggggcgaagtgggggagccccggccccgaaggcctgcggcggcccggccgctcgggccgcagcccagcggcgccagcagcgcggaccgagccggcgccgagcgcggggcctctcgggctccccggaaagctcggccgcggcgcggggcccggctcggcggggcggggcgcggggcagtcgggggcccgggcccaacaggagtagaggcctcggcccgacccccgccccgcggccccggcccggcccccgcacgcgctcacctcgggcggccgcagccccggcgagcgtagcggacaggtggaggaccgagcggggcggcggcggcggcgcttccctttgtctcgggacttccctccggagcccgctccgcgcgcagccagagcagctccgaggaccctggcgcgggcggggcgcgcggggcggggcctaacgcggggctgccctctgcacgcctgcctcgcgcgccgctcctgccgcccggccccgagcgcctcccgcgccgccgagcgctccccgttgcccgcgccccgccgccgcgcgcccgcgccccgggtccgccccaggagcccggccggggggcgactttccagtcaggcggcgccctggacacctacgcccttaaaggagccgcgtccccgatgtgagggagcgtctgtaaactccccttcgggctgcccgcgtccacccgaggacacgccggcaagcagcgggggaaaaaggaagccgagatctccaaaggctccccggatgcctggcggtcacctctccagccacaggtcccggaggtttccttggggtcaggtcctggggccgggggtcaaagaccactgaggcctaaggatcctctgaagcgtcgcaggacggtgacgctcccgcgagttcagcgccctgtgaaaccccttgcaattggccagttcggggcggtaggcggggacaccttctcatccgcccaatgagctgaccccgtacaaaaggccgaatgcgagcatgaccgacgggaggagaagtgtggatgctccctaaaccgggggctggccctgggccggggcgcgggcgggacgtgggggaccgcgagcggcgggggcggggcgagcccgtgggggaggggcgcttccggtcccccctcccgcccacgcaacaagcaggaccgggtcgggaggcccccagacccgcgagcgcgcgggacagtccgttcgccaacgcgcgaccgtgctggcccccgggctctcccggcccccccgcccgcatttcgccgacggcggggccgcagccaaggtcacggtgtccgggtgcttggggaccgcggggagtgaccacattcattcattccctccctcactcattcattcattccctcccctactccgtcattccctccctcactcactaattccctccctccctcactaattccctccctccctcattcattcgatccctccatcactcaatcattccttccctctctcacgcattccctccctcacttactcattcattgccaccctcactcactcattccctccctcacttactcattcattcccactcactcattccctccctcactcactcattccctccctcactcattccctccctcactcactcattccctccctcactcattccctccctcactcattcattccctccctcactcactcattctcactctcactcattcccgccctcattcattcattcccgccctcattcattcattcccaccctcattcattccttccctccctcactcattccctctctcattcattccctccctccctcactcactcattccctccctcactgattccctccctcactgattcattcattccctccatcactcattcattccttccctcactcattccctccctcactcatttcctctctcattcattcattccctccctccctcactcattcccactctcacaaactcattccctccctcacttactcattcctccctcattcattccctccctcattcgttcattccctccctcattcattcattccctccctccctcattccctccctccctcattcattcattccctccctcattcattcattccctccctcattcattcccaccctccctcattcattccctgcctccctcactcattccctccctcactcattcattccctccctccctcactgattctctcccttattcattccatccctcactcattcccttcctccctcattcacttcctccctcactcattcattcactccctccctcattcattcattccctccctccctcactcattccctcccttactcatttattccatccctcactcattgcctccctccctcattccctccctctctccctcattcattcattccctccctcattcattccctccctca

SEQ ID NO: 1243500 - DNA, 4001 bp, Homo sapiens
gccaggcaaggcccagacactgcagaaacggggacagggccgggcactccaggagcggcccgaaagtctgccttctgtcctcctgctgggcgcccgcaaccggctgagctttagcttctcggatcaccgccttgctctgctggttgacagcaccgacttcagagcaacttcctggctgagggtgagcaaagcactcacctcccacaactccaccgcactgatctccacaacgggtggtcgccacgacaggctggcacaagaagcctttaaaggccctcctgcacccaaatgcaaactctcccaggcttggggaggtattcccttctgcaagacccaagcacctgcagtcgggagacgcttacctggccgcacctgatctgccccaggccccgagaatgtttctgaagcaagatcccaaaccctgagacaccatacaagcgcacaccagcaatcacccagtggcctagggaacggacctctctgaatgagcaatcagggcaaactgaggatccgtcccgtcttccgttgcataggttctctacccaaaggcaacgtttcttgaagagcaagaaacacttggggtaggtcctgtaaaaggaaacaaaccgaactccccaaagacaggcactttgcaaacagagaaactaagcgtaacttccaattatacaaacaaaaccacttcattctgcgattcaagcgtgactacaggccacgatcacaagcccaactaatcattcccttacattcctcctacgcacgttaactaccagaaccaactactattcaaccgataaaaagagatgtccaaaacagaataaaactccccctccagcgaggcgctcacgttcagggccccagcaagcgccagcggagcatcttcagaggcacaagaaaacttacacttgttttggttttaaggcaccgaaaacaagcccgctcgccggcccccacccccgcgagccagcgatgttgcaatccaagactctccccccgcggcccatcctatccgtccgcggggcgaccgtgaccccggaagccgctccccgcgcaggaggaaggcgcggcctcgcggggccccggctgcaggtggctgccccggccccgcgccaggcgcacctcgggggcgaagtgggggagccccggccccgaaggcctgcggcggcccggccgctcgggccgcagcccagcggcgccagcagcgcggaccgagccggcgccgagcgcggggcctctcgggctccccggaaagctcggccgcggcgcggggcccggctcggcggggcggggcgcggggcagtcgggggcccgggcccaacaggagtagaggcctcggcccgacccccgccccgcggccccggcccggcccccgcacgcgctcacctcgggcggccgcagccccggcgagcgtagcggacaggtggaggaccgagcggggcggcggcggcggcgcttccctttgtctcgggacttccctccggagcccgctccgcgcgcagccagagcagctccgaggaccctggcgcgggcggggcgcgcggggcggggcctaacgcggggctgccctctgcacgcctgcctcgcgcgccgctcctgccgcccggccccgagcgcctcccgcgccgccgagcgctccccgttgcccgcgccccgccgccgcgcgcccgcgccccgggtccgccccaggagcccggccggggggcgactttccagtcaggcggcgccctggacacctacgcccttaaaggagccgcgtccccgatgtgagggagcgtctgtaaactccccttcgggctgcccgcgtccacccgaggacacgccggcaagcagcgggggaaaaaggaagccgagatctccaaaggctccccggatgcctggcggtcacctctccagccacaggtcccggaggtttccttggggtcaggtcctggggccgggggtcaaagaccactgaggcctaaggatcctctgaagcgtcgcaggacggtgacgctcccgcgagttcagcgccctgtgaaaccccttgcaattggccagttcggggcggtaggcggggacaccttctcatccgcccaatgagctgaccccgtacaaaaggccgaatgcgagcatgaccgacgggaggagaagtgtggatgctccctaaaccgggggctggccctgggccggggcgcgggcgggacgtgggggaccgcgagcggcgggggcggggcgagcccgtgggggaggggcgcttccggtcccccctcccgcccacgcaacaagcaggaccgggtcgggaggcccccagacccgcgagcgcgcgggacagtccgttcgccaacgcgcgaccgtgctggcccccgggctctcccggcccccccgcccgcatttcgccgacggcggggccgcagccaaggtcacggtgtccgggtgcttggggaccgcggggagtgaccacattcattcattccctccctcactcattcattcattccctcccctactccgtcattccctccctcactcactaattccctccctccctcactaattccctccctccctcattcattcgatccctccatcactcaatcattccttccctctctcacgcattccctccctcacttactcattcattgccaccctcactcactcattccctccctcacttactcattcattcccactcactcattccctccctcactcactcattccctccctcactcattccctccctcactcactcattccctccctcactcattccctccctcactcattcattccctccctcactcactcattctcactctcactcattcccgccctcattcattcattcccgccctcattcattcattcccaccctcattcattccttccctccctcactcattccctctctcattcattccctccctccctcactcactcattccctccctcactgattccctccctcactgattcattcattccctccatcactcattcattccttccctcactcattccctccctcactcatttcctctctcattcattcattccctccctccctcactcattcccactctcacaaactcattccctccctcacttactcattcctccctcattcattccctccctcattcgttcattccctccctcattcattcattccctccctccctcattccctccctccctcattcattcattccctccctcattcattcattccctccctcattcattcccaccctccctcattcattccctgcctccctcactcattccctccctcactcattcattccctccctccctcactgattctctcccttattcattccatccctcactcattcccttcctccctcattcacttcctccctcactcattcattcactccctccctcattcattcattccctccctccctcactcattccctcccttactcatttattccatccctcactcattgcctccctccctcattccctccctctctccctcattcattcattccctccctcattcattccctccctcactcattccctccctcactcattcattccctccctcactcattcccttcctccctcattcattcattccctccctcactcatgcattaattccctccctcactcactcattccctccttcactcattcactccctccctccctcactcattcccccaccacctcccacagggtccccagcgggcatttccctgtcaggcacctgcagcaggaggggcagccacacaccctgggtctgcctgcctgggaggcgcagccgtggggatgtgggtccagggcagcaggggcagcctcccccagaatccagtccctggaagccatgcacagccctgtcccaccaagaccagcgggggcctggcctggctgcaactcccaggctcagagcctccgtggcctgtctagacacctgctgtcctggcccccagccttgaggtcctgggaatctgctttttttttttccttttttttgtgagatg

SEQ ID NO: 1243501 - DNA, 4001 bp, Homo sapiens
ttttatttctctcaatgttttatcctcggggacgagtcccttatacatgactttctgcatggcaggcgggagaccttgggaaaaggtagaaggtggacagtgaaaggaaggaaggacagaaaaatgtatggatactacacagctctttggtaacagaccaaaaagtgaatactgcctccaccacctattagctttgtgaacttgggagatttacaacctctgaacctcagtttctagaactgtagaagatttattagagtaagtccttctgtacagacctgtttcaaggattaagagaccaatgcggggcatttagtacggtggctagcattgaataattgttcagtaagtactagctctcattctttccaagttgttcctcagtcatctaaatcattcacatattaagtgagaatccacaggcatcagagctacagaagccaatagggacaaaactcctgttcttaatggagattacaaggctacatgtagaaagctttaaaaaaaaaaaaaagttcaaggccaggagtgatggcttatgcctgtaatcccagcacttcgggaggccgaggtgggtggataaaataaaaaaaactagcccggcggggtagcgggcacctgtaatcccagctactcgggaggctgaggcaggagaatcgcttgaacctgggaggcggaggctgcagtgagccaagatggtgccagtacactccagcctgggcaacagagcaagactccgtctcaaaaaaaaaaaaaaataggaaaaagaaaagaaatctcagatggcaaagagctatgaacaaggtaaaattaagaaacagaatcgactgtgaagaaccagcatcaaagtcaatagcagcgtttcctaaacttcacttagaagaattacctaagatatttgctaaaaataaattcctggctacatcccagacccactgaatcagaatctcctgggaaagggcccagaagctgtaaaacaagcgccttaggtgattttttaattagagatgttagagcaacatcaatgagaaactggggcctaaacgtcagacttcggctttaatcccagctctgcaacttactagctctataaacttgagtctctttccccagctgagtaatgggcatccaagtatccttcagaagactgctgtaaggatggggggacctgatgcaaggaaagccaccaggtgcctagtagggtgcaagggccatcaggaggcggggtggggaagactggctgtcagcgccacaggaattacctgtaatcgagtggatcttctgtttcagctcggagcctgtgctgtccagggggaacttcacgtcatgcttggtcttattccagatgatcttcaagtccaccagctccctgcccgcgccgccgcccgcgtcttcgccgttgctgaccgaggcctgggctgcggggtccccagggggctgggccggggccggctgcaggctgcctcgtgcggcgccggagtcctcggccgccgcccccgccgcggcttcagcctccaggcagttgacgggccgcgcgggagcctcagtagccacagtctcggcctccgtgtccatgccaggttcctccatgcctgcaagggggttagggggtgggcgctcgccgcgggctgggcttgggaacggacgctgtccgggcgccgccggacctccgttcccgagccgcggttctccctcccgggccgggccgcatcccccagaggagcgaccgcaacctcagccccggcccggcgcccgccacccccgccgcactcaccatccggggccccggccgccgccatgatgattgtgtacaacacccaccgctcccgcagaggccgctgggaagaggcgagctggctgagattggcccccgcagcagcccctaatctctcacagcccggccggaaacaggtggaggtttctatggagacccgcctcctccgctcccaggtccggcccctgccacgctttcgctttcccaagctgaagggggcgggtccgggaaatagccctttctctggcctctgccccctggtggcgagtgcggccgcagccgtccaggggggcgtgggatttcgcgctagggggcctgtgactttaaggggcaaggctgcgctggctgtggcggaggccgattggctggaagcagtccccggaagtgacgcagggagaagcccacgtgtgctattccatcccacatggcggcgctcctgaggagactgctgcagcgcgagaggccttcggcggcctctggccgccccgtaggacggcgcgaggccaacctgggcactgatgccggggttgcggtgcgagtgcggttcgctcccagccccacaggtaaccctggcggacgtgacgctacaggccgaggccccctgtcccgtctccgccccacgaatgttcccgaatgaatcctttccggtggtgtcagagtgggcgggcggaggagggttaaggcagcgcgagcccattttacagaggcggaaactgaggtgcaggagcggaaataattcaaattgccaggagtttcttgtgttttttgtgccatcccatctctttcgatctttttttcatgcattccatacatgtgcattgatgacaacctgtgtaacaggtgttgtagacgctgggatacagtgatcattgagaaaggtaggggccttgctctgtggaagtctgcattctagtggctgccgcagacacttataaaaaataagtgtaattttagagtcacatgtgccatgcgggaagtgaaacaggataggagactggggattaagaaggacgctccagaaggctttactgagcaggtaacatttgagctgagatccaaatgacaagaaggagcacgctatgtgaagcctatagaaggaaccttctggaggccaggcgcggtggctcacgcttgtaatcccagcactttgggaggcagaggtgggtgcatcacttgaggtcaagtggatcacttgagagccgtctgaccaacatggtgaagccctgtctctactaaaaatacaaaattatctgggcatggtggcgcatgcctgtaatcccagctacttgggaggctgaggcaggagaatcgcttgaacgcaggaggtggagattgcggtgagccaagatcgcgccattgcactccagcctgggcaacaagagcgaaactgtgtctcaaaaacaaaaaagaaggaaccttctgggtagaggaaatcgcaggtaccaaggcactgtgctagtgctgttgggagcttagcaagctagagggtgacagaggcccattgtatagcctgttggagatctcgtcagggccttttggttcccaccagtaaggctaccttctacgttctctacacggagtatgcctctcatcccaaatcccaggatgaacatacaaagatctttgtagtaaaatcccagctatacatgacaggatctttctggcaggcagtatagcctagagcagtgcctttcaaaccatctgttgtggaagtgctggttttaaatttccaatcaattgtgtatcaatatttgcacaaaattaatataatgaccagaaaaataaaattttgaaaacatccaaaatacaaaccaatctcattttatttgggttagcagaggtaaaatcattctgccagattgctatgtaagtttcgcctggccaatatggcaaaaccttgtctctactaaaatacaaaaattagccgggcatgtggcccaggcctgtaatcccagctactcaggaggctgaaaatcgtttgaacccaggagaaagaggttgcagtgagccgagatcgtgccaccgcactgcagcccgggtgacagagtgagactccatctcaaaacaacaacaaaagtttctaaacctttactctcagtttctgtacttgattgtgaactgacaactgttttcagaccagcactggattgcacactttgctttgaagagcacttatgtagaatgccaaagcctgggattgcctgggtccaaatttctgtcgtggcca

SEQ ID NO: 1243502 - DNA, 4001 bp, Homo sapiens
cgacaagagtgaaactccgtctcaaacaaaaaaaagaaaaaaacaaagatccccctttaaaaacctcagttggtgttactgagaaaatactagccttccttgtcccttggttatcctcagcaatttttaattttttcttactatatatatatatatctccttctaaacattgtattttcaaactggttattgatgaaacagaaaaactaaattgtgcattccaacttataatgagtacccttcctgaattcttattttaatgggttttttggtttttgtttttgttttcaaaataggcagacctatcatccacggaaatgagaattctgtcttcccttttccaaaaattgcatttcttatttttgtttcctgtcttactgcactggctagaactttcaggttttaggcaatatattcttattatctaatagtggtagaaatgtaccatgtttctgatgttaaggggaatgcctctaggttttggtgcaatgttcatttgagatttttttttcttttttctttttggcggggggacgagtctcgctcgctctgtcgcctagctggagtgcagtgacataatctcggctcacggcaacctccgcttcccgggttaagcgattctcctgcctcagcctcccaagtagctgggactacaggcatgcgccaccacgcccggctaattttgtatttttagtagagtactgggtttgaccgtgttggccaggctggtctcgaactcctgatctcaggtggtccacccgcctcggcatcccaaaatgctgggattacaggcttataccaccctgcccggccaagattcatgtttttatttaagttattaaaatctcattcaattcctcacaaattcagaatttttaaacaggaacttatgttaaatttttatcaaattattccctggaatcttaaatacgctttaaagatcactttgtcttaaaaatacacacgcagtaaatgacagtccgtgcagctaattcttggtacttcagggaaactgatctcccaagaaaaatcaggctgcgggacgacccagtacgctaaacaccgacttgcaaccgaaatctctaaccaccacaatgccttggggaaatgcgtgtcgactcgccacctttgccagctggcagtgactcaacaagagcccgacaccaagtctaagtcaatccttaacactgtggagtctgtgatcgggactgggatcttttgcaaaattgtgattctacctggtctgctgaagtttgggccgacgctgcgctcaactgcagttaacacttcccagttcatggttcagttttaaagtgtccaaactacgcccggcatctgtcttcctgttgtcacaactttttcaaaagtgcaaaactagggcaaggctaacgagagagcccggacccgacaacgacacgcacctttgtccccagcgccgacgcgggccgcagacgtccccccgcggcggtcctcatgccggtccccgggcggcggcgcagctagcggtcggctgctaagccgtggctcccagcgggcgggcggcccgcgcctcggcccatggccgggtccccgagcccaggggagcctggtgtgccgcgccgcgcgccggcccaggaggaagcgaagaaatgccaactcgacgtccgcgcagccactccggggacaccagggggtcgggggagcagcctccggtcgccccaggagaacttgcggcgcgggaccccgcgctcagacggcgcctccgaaagcggccgtcgggaggagcgctccaaagaacacgggcggcgggagcggacgggcgcggacaccggggcctcccggcctgcggccaagcagagttgccgggcgcgggagcccagacccggcggaggctgagttccaggccgcgccgagctccgtcagggtagctcactggcgctgcgacggggccgaccagcgcctcgggctcgggaatggccccggggcccgcgccggaccaacgggcgtaacggaagcgccgagaggggaggggcgcggagtccaagacccgggggcggggcgagccgcgaggccggctccctctcgcgctcagccggtcgcaccgtcgccgccgccgccgcctcagaccgcgggcgcttcgttgtcacgagccgaagggagggggaaggagccgggagtctctgcgctccggcgcgcggagaccgcggcgctcgcgtcacgtgcccctcggtcgaccaatgatccccggcgggcgcggtgacgtcagagtagcggcgtggccagtgacagccggcccccgtcacgtggtcgggcccactccaatgggcggcgccggggcgacttgctgttcccggcggcccgtgcgtcggcggtggttgggtggtaagatggcggctgtgagtctgcggctcggcgacttggtgtggtgagtccgagcggccgggccaaccgagacgcgccggggagctacccgcctgggcgcggggttcgctgccggccctggagctgcctttttatgcgctccaggtcgcggagagaggggaagagaaggtgccggcgcttgcgagcggcgccaggcggaaggggcagtccagtcccgggggaccgaggccgagggtggccacgtcgggcaccggctttgatccccgaggccggccgggtggggtctgcactcggggcccagatactggcggcccccgtgaagggagccgccggtgccgcgaggcttccccggacgaccggtccccggggtcttgttggggcttcccagaaagcagaagcgccggggaccggacctgcgagatctggccggtgccattcggtcaaagcccaggttgcgatgcagccgacctgtgcggccggctcagccggggttgtctaaaccggactgctggcgttgccccgcgaagaaacggcggggggacttctcctttacaaccgatggcttggcagtgaccagtgcacgcttgggtgcctcccgcggtctgcttctgtgtcccagacaaccgcccgaaccaagactttgtcgccgcctccctcgagctgcgtagcttgtttctccacccagaggaaggcttccattagcatttgtcaaagccaggcaggtctcctgttgaattaaaccagacttagggagggaaagtctgtgtttacagaggaagctgtcctcccacccccgtcattaagaagctctagacaagtgacttttgacagttgtgttgttctgtattccttgtcaacagaagaatggatatgcgttgtgcacataagtatacaattttgcattttacttctgagggtgttgggcccagctatgaaagcttttgtttcggcatttgaggatgccagcagagatttaggaaaataaattgcgtattgagtgggttgaaggagatggactggcttttgcagggcaagtgttgactctttgtgttttctctagggggaaactcggccgatatcctccttggccaggaaaggtgagtgtcttgctactaaaggaagagatctgaagttgggtttgaagaggtggagaatgtaagatgcattcctctcagtttctagtattgagttaaattgggctcattcagatggcacttagaattttttttcccctagtatcggttattttttaaaaggcaatgcagtatacaccagatcattaaatcttctctaaacccttatttctggatttagaggaggtttatgaagtttcttttttaaccccggaaataattctagtctgaatttagctttatgcttaaatgtaacaaaaggagaagaaaatataaattatccaggaagaaagtctaaatgtaggttagtgaaaagccaaagtatttttgtcccaactaagtttaaatcttctttccatgttaccatatgtgctactccagtgcctctttgcagaagttggcattccagattttgcatgaggtgatccatcattgctttccaaatgttgtgtttttatattcttgcttggagcccgggaggtgtctttagatggtctctttgcaata

SEQ ID NO: 1243503 - DNA, 4001 bp, Homo sapiens
ccctgtccaggcagtaaacacataaccttatctcagtccaagtctgagagactgcagcttcaatcctagatggcaaaactgctcctttcagttgcttaagtgactctccaggcccaagaaggtaaaaaataggactacaggataaagtgagtcaaatctgtactctattaccacttagatttggggttgttttataatcattataatgttctgctgttactaagccatttgaaacatttaagagaatccaatatatttaacaatggtacgttagacttacaatcataattcaaaatgcttaagaaaatataattaagttcaaacatgtttgaatgcttaaaaaaaacttacatttatctattagacttacgagagttgcctaagtccttggaaagattttagctttttttgtggtttttttttttttttttgtgagacagttgcctcactcctgttgcccaggctggagtgcagtggcaccatgagagctcactgcagcctcaacttcccggacccagcactttgggaggctaaggcaggatgatcgctggagcctaggagtttaagaccagcctggacaacatgatgagacttcatctgcacaaaaaaattttttttaaattagccaggtatggtggcacacccctgtagtcttggctactaaggaggctgaggtgggaggatggctttagactgggaaggtccaggctgcagtgagccgtgatcctgccactgcactccagcctgggcgacaagagtgaaactccgtctcaaacaaaaaaaagaaaaaaacaaagatccccctttaaaaacctcagttggtgttactgagaaaatactagccttccttgtcccttggttatcctcagcaatttttaattttttcttactatatatatatatatctccttctaaacattgtattttcaaactggttattgatgaaacagaaaaactaaattgtgcattccaacttataatgagtacccttcctgaattcttattttaatgggttttttggtttttgtttttgttttcaaaataggcagacctatcatccacggaaatgagaattctgtcttcccttttccaaaaattgcatttcttatttttgtttcctgtcttactgcactggctagaactttcaggttttaggcaatatattcttattatctaatagtggtagaaatgtaccatgtttctgatgttaaggggaatgcctctaggttttggtgcaatgttcatttgagatttttttttcttttttctttttggcggggggacgagtctcgctcgctctgtcgcctagctggagtgcagtgacataatctcggctcacggcaacctccgcttcccgggttaagcgattctcctgcctcagcctcccaagtagctgggactacaggcatgcgccaccacgcccggctaattttgtatttttagtagagtactgggtttgaccgtgttggccaggctggtctcgaactcctgatctcaggtggtccacccgcctcggcatcccaaaatgctgggattacaggcttataccaccctgcccggccaagattcatgtttttatttaagttattaaaatctcattcaattcctcacaaattcagaatttttaaacaggaacttatgttaaatttttatcaaattattccctggaatcttaaatacgctttaaagatcactttgtcttaaaaatacacacgcagtaaatgacagtccgtgcagctaattcttggtacttcagggaaactgatctcccaagaaaaatcaggctgcgggacgacccagtacgctaaacaccgacttgcaaccgaaatctctaaccaccacaatgccttggggaaatgcgtgtcgactcgccacctttgccagctggcagtgactcaacaagagcccgacaccaagtctaagtcaatccttaacactgtggagtctgtgatcgggactgggatcttttgcaaaattgtgattctacctggtctgctgaagtttgggccgacgctgcgctcaactgcagttaacacttcccagttcatggttcagttttaaagtgtccaaactacgcccggcatctgtcttcctgttgtcacaactttttcaaaagtgcaaaactagggcaaggctaacgagagagcccggacccgacaacgacacgcacctttgtccccagcgccgacgcgggccgcagacgtccccccgcggcggtcctcatgccggtccccgggcggcggcgcagctagcggtcggctgctaagccgtggctcccagcgggcgggcggcccgcgcctcggcccatggccgggtccccgagcccaggggagcctggtgtgccgcgccgcgcgccggcccaggaggaagcgaagaaatgccaactcgacgtccgcgcagccactccggggacaccagggggtcgggggagcagcctccggtcgccccaggagaacttgcggcgcgggaccccgcgctcagacggcgcctccgaaagcggccgtcgggaggagcgctccaaagaacacgggcggcgggagcggacgggcgcggacaccggggcctcccggcctgcggccaagcagagttgccgggcgcgggagcccagacccggcggaggctgagttccaggccgcgccgagctccgtcagggtagctcactggcgctgcgacggggccgaccagcgcctcgggctcgggaatggccccggggcccgcgccggaccaacgggcgtaacggaagcgccgagaggggaggggcgcggagtccaagacccgggggcggggcgagccgcgaggccggctccctctcgcgctcagccggtcgcaccgtcgccgccgccgccgcctcagaccgcgggcgcttcgttgtcacgagccgaagggagggggaaggagccgggagtctctgcgctccggcgcgcggagaccgcggcgctcgcgtcacgtgcccctcggtcgaccaatgatccccggcgggcgcggtgacgtcagagtagcggcgtggccagtgacagccggcccccgtcacgtggtcgggcccactccaatgggcggcgccggggcgacttgctgttcccggcggcccgtgcgtcggcggtggttgggtggtaagatggcggctgtgagtctgcggctcggcgacttggtgtggtgagtccgagcggccgggccaaccgagacgcgccggggagctacccgcctgggcgcggggttcgctgccggccctggagctgcctttttatgcgctccaggtcgcggagagaggggaagagaaggtgccggcgcttgcgagcggcgccaggcggaaggggcagtccagtcccgggggaccgaggccgagggtggccacgtcgggcaccggctttgatccccgaggccggccgggtggggtctgcactcggggcccagatactggcggcccccgtgaagggagccgccggtgccgcgaggcttccccggacgaccggtccccggggtcttgttggggcttcccagaaagcagaagcgccggggaccggacctgcgagatctggccggtgccattcggtcaaagcccaggttgcgatgcagccgacctgtgcggccggctcagccggggttgtctaaaccggactgctggcgttgccccgcgaagaaacggcggggggacttctcctttacaaccgatggcttggcagtgaccagtgcacgcttgggtgcctcccgcggtctgcttctgtgtcccagacaaccgcccgaaccaagactttgtcgccgcctccctcgagctgcgtagcttgtttctccacccagaggaaggcttccattagcatttgtcaaagccaggcaggtctcctgttgaattaaaccagacttagggagggaaagtctgtgtttacagaggaagctgtcctcccacccccgtcattaagaagctctagacaagtgacttttgacagttgtgttgttctgtattccttgtcaacagaagaatggatatgcgttgtgcacataagtat

SEQ ID NO: 1243504 - DNA, 4001 bp, Homo sapiens
tctcctccccacagctggaaggagtgctttgattgtatagtatacaactccaggaggtgtcacttatatggactaaaaaattgcataacactgcagcccttgttttgctgggactttaccccttgtactccccctccttacctcaccaacatcccagtcttggctccccaattctcagcacattgcacattttgaagaactcagtcatttggagcaggaagtagccagatggaatagtgttctggactcaccactttactgaaggcagctttggattttaactgatcctctgcctggaaactttcaatttgcctggatcacttattcattcaacaaacatctattgagtagctacattgtgccaaacagggagctagtcaccatggagaacaatgaacatggcagtctgctccttcatgcaactcacatatcgtaaagaagtggcttgagacgagcaacttgagaggtaattaaccttcacaatgcatttaaatgtttctggagtggtcacttactatttcttccaattggaaaaatagtccagggtggatgccagtattaccccagtgtttatagcagcaaaatagggtggcatgttggttaagtatgtaggagctgcagcctgcacctgaggttcaaatccctgctttactgatcactaacactgtgatgtgggtatttcagtttactaagtctccgtttttgtctgtgaaatggagattgttgctttcacaaactgaatatctatgatgggccaggctcagttcaaagacattcatgtgctcaaaggcattgggtcctagagcaacgttttccagatcttcgtgaccatgatgtactaaaagaaaaacattttatgttgccaggtgcagtggctcatgcctgtaatcccaacactttgggagactgagggggtggatcacaaggtcaggagtttgagaccagcctggccagcatggtgaaaccccatctctaataaaaatacaaaaattagccgggcatggtggtgggcgcctgtaatcccagctactcgggaggctgagacaggaggattgcttgaacctgggaggcagaggttgcagtgagctgagatcgtgccactgcactcctgcctgggtgacagagagtccatcccccccccccaaaaaaaaaaagacagaaagaaagaaaaacattttatgtcatgatctagtgcagtcgcttctgcatgtatgtgcacacacacataaaattttataagacaattgatatccttactacattaagtgatttaattcttaccacaaccctatgagataagtattatcctagtttgcagatgagaaaacagggggacaaagaggctaactgcttgcctcaaatttgtattgcttactgacatattctattatatttaattaaaagaagtccctggatataacccacaaaaggaatgattttatgacccgctaataagatgcgacctaaaacactgcatattgtcactgggattaactaagatgacatatgtcgagcagggcccagcacatagcaagttgttcattgttgtaaccctggtacctggcacataataggtgcataactaatattcatggaataagtcaaaaaatagtagtcattgttactaggacagagaggatcaaagagaggaaaactaacttactaaagatcatgaagccaataattggcagaataatgactcaaatccaggtctgaccccagtgtccaaggtcttaatttcctctcctacctccctcaaataggatggggagaagctgggctaggagaagacagctacagatagccttacctgaagccagaaaggtagagttagtctggtcatgatgtgcctcatacttatatatacacatttgccccaggctggcaatctctcctccaattagtctctagttctgttttttgatattgttttcttgggggtggaatattttttcctcctggcataatgtttgccttgtccaagctgtgaggttgttgttgttctttttcctaatagctagagaccccaaatgattgacattggggggtcacacctgtgcccggaaatacaaggtcactgtttcgcaccttctaacagcaagagattccatagttagaaattaactgggaaagcagtgccaaggtgctgggcttcttcttggtcactgacaagggcagggtgggatcaaggagccaggcagaagccagtatctgaagccaggctgcataaggacaaaagggatattcactgccccagatgggaggtgcacctgtcttggagagggcacccttctgaaacacccattctcatgagatcagccttagaatccagacacaagcaagagaggagctgagaatggctgaaagtcagaaccagaaggtagttcagacatcactggacctgacccactctgtacaacaaagaatcaggtctgatgactgggaggtccctttggaggcgaaataaatttgcacttaaatagactgactttggagtcagtctgcctcctttatctggtgtttattgtgtggcagtgggctcatttcttaaccttcctgaggtccagaggtcaatttccttgtctataaaatgagaatacccatctcccacagtagtaatagtaaccaaaggagatgatgcaagtaaagtcatatagtaatgattatattcatggaagtagtgaaaattctgctttgctgttgtgcaatcactgaggtagaaaatgacagagcctgagttaaaaccatgtcttcagacccagttcaacatacatgacattccaaaagtcagtgtgagagtggctgtcatcatgttgagaaaaataaaatatgtgtgaacttgggctgagcaggaaaatatcaccatgatcactgcattgatcttttttttttttatactttaagttttagggtacaagtgcacaacgtgcaggtttgttacatatgtatacatgtgccatgttgatgtgctgcacccattaacttgtcatttacattaggtataactcctaatgctatccctccccgctccccgcatcccacaataggcccctgggtgtgatgttccccttcctgtgtccaagtgctctcattgttcaattcccacctgtgagtgagaacatgcggtgtttggttttttgtccttgcgatagtttgctgagaatgatggtttccatcttcatccatgtccctacaaaggacatgaactcatattttttatggctgcatagtattccacggtgtatatgtgccacattttcttaatccagtctatcattgatggacatttgagttggttccaagtctttgctattgtgaattgctcttttcaggacatttctccatcctgtcccactcagtggtagggtaaccactggcactggtgttgtcatctcctcaggattatgtccaaggagtggaaattctgggtcaaagaggtagcacagctgtaggaatattgactcctcttcccaaacagcaccccagagaattattataaattggtttacaatcccaccaacactactcaccagttctgagcattggtaacttgctttcatctttgccaaaaggataagtggaaacgatctcattattgttcatttttgcaattctttgatgaaaagggaagttatctcttcatttatttacttttttttttctgaactagtcgtttttatcctatacctttttcatgaggccttgtctaaaccttattatgggtgtcttcaaaggattaaagacagtgaccccaggtggcttctggagttttcttgacaaagacttgggcaggaaaatggggagtttgggttggaatctattcataagtgtaatcaccatgctttctagtttctgtatttggtgcttgtacattttggggccttactgatcatggagggactgcccctcccagggctcaataattactagagatcaaaaacgacttatctgtgaatgtgcctttccgactgcaaatcaatcaatccagaccacataccccc

SEQ ID NO: 1243505 - DNA, 4001 bp, Homo sapiens
ctaacaagctctctgtgtggaaagcaaccgaccactacaaaacgcttcaaaacctggccgggcgcagtggatcatgcctggaatcccagtactttgggaggccaaggagggaggatcgctgtgcccaggaggttgagaccagaccaggctacagcaagaaccctgtctctatagaaacacaaaacaaggcacttggccagaggttggttctcatgcaggaactgtgtcaaatcagagtgggaaacagctaggcacagtggctcacacctggaatcccagcactttgggaggctgaagcaggaggattgcttgagcccagaagttcaagaccagcctgggcaatgtagtgagaccccatccctacaaaaactatgcaaaattagctggcatggcatgagcctgtagtcccagctacttgggaggctgagaagggaagatcacttgagcctaggagttggtggctgcagtgagccgtatcctatcattgcactccagccccagcgacagagcaagaccctgtctcaaaaaaaaaaaaaaaaaaaaaaaaaaaaaaaaaaaaaaagtggggccgggtacggtggctcatgcctgtcatcccagcactttgggaggccgaggtgggtggatcacctgaggttgggagttcgagacaagcctaaccaacatggagaaaccctgtctctactaaaaataaaaaattagctgggcatggtggcacatgcctgtaatcccagctactccggaggctgaggcaggagaatcacttgaacctgggaggtagaggctgcagtgagccgagatcatgccattgcactccagccagagcaacaagagtgaaactccgtctcaaaaaacaaacaaaaaaaagtgggaggtgaagcaaaattggtttgagtcacacaagggttacccctaaaacacacataatccctcgggaactggcctgagaataggaaatgccgccccagcatccctggtcactagaaaatttcagcgtataattacgactccctctgcaggggccaggtatggacactaaggcgtccgctgagggtcccggccgcatccccgggtggaggccccccacctccgcccaggcagcggcgccccctcgcggccgcttactcgtcgccgtcggggcacacgccggtggcttcgttgtacttggagcagtacacgtcggggctgtagttgaaggtgccgtcgcgcctgcggaggggcctgcggcgccgctggttgaggaagtgccagtggaagcaggtgaacggccggtgctgcgcgcacttgtgctgtgaaaacagggggcactgctccgtcctgaactccttcaggtacctacaaacacagacagcgccgcggctcgcttccggcagcacctccagggactcggactcgtgggcggcgggacccaccggcctcaggagcctcaacccagggtcgacccgtactcacattcccggcgggccccaggcgctgcgcccacccccatcccgactccagacgcgaccctcacccgacctcgtagcccaggcgctgaccctggtccccaagcccaagcgccaccccggaccctgggcgacccgctgtgacctcacggtcggcagccggagcagagggtcccggtccccgagcccaggcgcaacccccaaccccggggcgttcctccctccccagaggcgcgtggaccccggaaccaggtgccatcccagaccatgggcgccgcgctccgacctcaggcggaggccgccgagagcagagggtcgtggcccccccagcccaggcgctgcgcggaggccggggggcgcgggggcggcggaggcggcgcgagccccggcgggaggctccgagctgcaccgggcgcgggcggggggccgcaggccggacgggcgctgacctgtagtgggtcggcttctcagtctgcgggggggacccgctcagcgccgctgccgccgctttcgaaaccgacggcattttcagtcaaaacaatgcagcgcgcatgcgccgcgccggcgcccccgcccccggatatccccgcgcgcccccgcggccacgccccccgcggccccgcccccagcccgcagaccccggccccgccccagccccgcgccccccgcagccccgcccccggcccgcagaccccgccccagccccgcgccccgccctgccctgccctgccctgccctgccctgccctgccctgccctgccctgcagcccccggcccgggacgctggtcctgcccggggccgcgcgtgggacccgcgatggtcgcccctgctgtgacatgacccgacataaccgtgtattttacatgaattaatcacaagagttgtatctcaatagagctgctcttccacaaacgaaccaagaggctgatgtcagggggagccaggcaccgggcggaagggccaaggggtcctggcctttgtagaaaggaatttgttccatttcgaaccttgacctcaaaaacttatactcagagatttatctacaaaggtaattatcacagttattttgcaaacacttgaggtcccccttcccccaacagcgcagtagctgagaaaagggaaaactctaagtgctctgcgtgatttgaaacagtgcttccgaagaatttttagtggtaggaggccgggcgcggtgtctcacgcctgtaatcccagcactttgggaggccgaggccggcggatcagctgagttcgggagtttgacaacagcttggccaacagtgaaaccccgtctctactaaacatacaaaaatattagtggggtgtggtggcttgcgcctgtaattcctgctactccggaggctgaggcaggagaatggcgtgaacccgggaggcggaggtttagtagtgagccgagattgcgccactgcactccagcctgggtgacagagtaacaccctgtctcaaaaaataaaaaagaaatttttagtgatatgaaaaatgtgcccattggccgggcgcggtggctcacgcctataatccctgcactttgagaggccgaggtgggcggatcacgaggtcagaagatcgagaccatcctggctaacacggtgaaaccccgtctctactaaaaatacaaaaaaaaaaaaaaaaattacccgggcgtggtggtgggcacctgtagtcccagctactcaggaggctaaggcaggagaatcacttgaacccaggaggcggagcttgcagtgagccgagatcgcgccactgcactccagcctgggcaacagagcgagactccgtctcaaaaaaaaaaaaaaaaaaaaaaaaaaaaaacgaaaagaaaaatgggcccatttaggttgaaagcaaatcacttcctacagatttgttccaagtatctcagggttttttttaatattaatactgtaaaacaacaaaaactatcatttgctggtaggataaatttcttcataggttcacattttctttttcttttggcggggggcggggggaggaaggagttttgctcttgttgcccagagtggagtgcaatggcacgatctcggctcactgttgcaacctccgcctcctaggttcaaggaattctcctacctcagcctcctgagtagctgcgattacaggcatgcaccaccgcgcccagctaatttatttttcgtagagacggggtttctccacattagttaggctgatctcgaactcccgacctcaggtgatccacctgcctcagcctcccaaagtgctgggattacaggcgtgagctaccgcgccagccaggatcacattttcttaatgaattatctctacaaacattacatttaaatcttaaaatgataatgaagaacatattttcaagtgaagtcaagcaggaaaatgaagtcaagcaggaagggcagggcctgcaaattcttcagagacgaataaacagatcttgaagactcccaaggtgctaggaatggaaagggagtctagggtgacgcccaggtctctcgcttgcaaggatacagagcaagggagaagaaacaggtttgggggag

SEQ ID NO: 1243506 - DNA, 4001 bp, Homo sapiens
cccgcccaacacagtggctctgcagccccgagcccagatgtccagcaggggccaaagcccttcctcctccctggcaaaggatcccttgcttgttcccatggccccactgcaggcccttcccagacaccacgtgtgcaggggctgctggaagctggcactgcaggatcccttcctcatgggctgctcgctcaacccacaccccctgaggcccatgcccagcctgccttcatgcattgcaatagtaaccttcctaccaagaaaagcctcattgcatcctgaatcctgacctgcaagaaaggaggaagcttgtgcccttgcgcgtgccggtcaccgcttcccaatgggtcctttgccgggctcctaacctgctgtgccactgcaggctcagcctggctgtgccttccattcagtaagatcagccacaccagtccccagaaagctgctcggcctccaagccctgcatggaatgccccccactacatccttgcaggtgtcagcctgaaccatgtcagggccctggacagactcactgaggacaggcaccgaccccccaacccgcaggcctgcccacagccccctcatgctcccatacgggggcttgatgacgggcagggccaagcggtttgcccatagtcaggtcagccaggctcgggaacctggacctgccctctgcacccaagtcccaggatcaggatatggcagccccttcagagctcaccgcccctcacacctggcagagatccagaaactcctcatgaaaatcaaagacgcaaagaagttgggggacaggaacggaggcgccttttctccccttggagtggggtgatcccaccaggctccgtgctaagtcggcagaagcttcacccaccagctgcagagtgcgcagcatgtggaggggctaagctgccttcaatgctcacccgacaaactacggctcgcactcaactcagagggcgtcagccaccacctacctcagccaagtcacctgtgctgaagcccgggaagctgcctggagaggggacgttcagggagcgtgtgggtgcccccgagagactccggccccgcttcaaagccaagtgcccctcatccaaagagagcaccggagagggtcctggaggctccaccacccctagggtgctatctagggctcactcccagaaatcaaggggggagacggctgctgcaccgtcctggcccactttctcacccgcagcttctcccccacctcacctcactgtttcaaggttagacccagatcttctgaaacattctcaaagaaagagctgacccttgtgcagaggcaaaatctaggtgaggctggtcacctaagcgagtacagctgggtcaggccaggctgcctcagccccgggcgttaggaaaccaccggccccgctgagtcaccgcgacacagcccggctctgccgtgacacagcacattcaaggcgccgcggtcccccggggtcagggacacgcgaggacaagctacagactgctcggaactcaggacagggcgggggagccgccgacgccagggaaattcccgtaccacgcgggctgagtgcaggcgggccaggccaggacgcaggggtcggccctcccccgccccgttcccctgccctctcctgccccgctccgctccgctctcctgccccgctcccctgccctccctcggggcaccgaccccgcctagctaggggacgcaggcggcccgagcccgcgctgggaagcggcgagcgcccggcagaggcaggttccgagaaggcgacgccttcgcctcgctccgggcctctgagaagcccgggcccaccccgcggctgtcacacccggctccgtgacgcgggggacgcacctggcggggggcgcacctaagggagggcccgctcctgaccgccgagtaacgagacccgcaccttggcggcgcacggctgccacgcgctggggccgccgccaatgctgactcacggtccgcggccgccccgcgccgccgccggggattcaaacccggcccgcgccccgccccctccgcgctggccccgccccgcaacgtgactcggccccgcccccgtcgcactggccacgccccccgcgctgccctcccccaaccttccccccgactcgggcgcacccggtccccgcggctcctggctacgagctgggcgggcaagtgggcgcgggcagcgggggccagaggtcttcaggcagaaagccccagagctgccccgctgcccggctcctcctgccctgcccacctgcacctgcagctgctccgggcggactcaggtgaaacacggtcgacccaacaggggcgctcgcggggcggggcggcgtgagctggggccgctgcctgccctgcaggaccctcctccctcccaagtccgcgtgcctgcccagccccatctaaacgcggggtacggagctcgcaggtctctcttaatctgaaacctgttcctatgaagtgtaagatgaaggaaaatggaacctatcagatgggtctgaaatgatcccactaaaaatcccttaaatacagaatccgctcatttcttctattccgtgctccagtcacagtacacctacaacctgaaggaaactgtactattaacacaaggaaaaaacgacccagtctacacaccagctttgtccaaaaccctctacaacagctaataaaatacacacgcagccaggcgggcctacacctggggccagacagtcccgggagccatgggcagggagtccctgagcctggggcgcaggagtgccctggggtcagcgggcaggacactgcctccagtgcctgtggctagtgcagggatgtaactttacagcgatgtctcagacatggacagaggaaaaaagtgaggctggcactgggtggcaaagctcacaatttcagccgcagcagcagcaacaatacattgcctctaactaaggcagtgtcgatcctgaaaaaaaaaaaaaatccatctcttcacctctgagtagctggttcaggatttttttttttttttttttgagaacaagtctcgctctgtcacccaggctggagtgcagtggcacgatctcagctcactacaacctccgcctttgcggtccaagcaattctcgtgcctcaaccacctgagtagctgggattacaggagcaagccaccacacccagctaatttttgtatttttggtagagatggggtttcaccatgttggtcaggctagtcttgaactcctgacctcaggtgatccacccgccctggcctcccaaagtgctgggattacaggcgtgagccactgctcacggctcaggaaatatttaagtaaatgaaagagtgtgcttcaagatcgcgagtgacatactaaaacaggtcaaaaacgtacctcagatacgaaagaatggttggaaaaatgactacaaatgtgctaactccagtccatctgaaggtcagctacgcggatgcagccacgcctctgtcaagcacacaggcacctgggtcgactttccacccgagtgagcacagtccaagatggtctctcttgtttgggatttaattttcctaaatatttttctgctatgctcaaattctagcattactacttttaggttggggaagagaaactttatttaaaaagaatgtgtgcttatttgtttaaaagaaaaaaataagtgaccgggtgtggtggctcacgcctgtaatcccagcatcttgggaggctgaggtgggcggatcacctgaggtcaggagtttgagaccagcctggccaacatggcaaaaccccgtctctattaaaaatacaaaaattagccgggcatgatggcacacacctgtaatcccagctactccggaggctgaggagggagaatcgcttgaacccggaaggcagaggtggcagtgaggcaagattgtgccattgcactccagcctgcacaacagagcaagaaaaaaaaagaacctgctcagaggccagaccctcatggagctttagccactgtgtagacttcatccctgacctct

SEQ ID NO: 1243507 - DNA, 4001 bp, Homo sapiens
caattagctttactttatcgtcatcaatttagtttgctgggtatggtatagttaaccttctttgtaattttggcctataattttccaaaaagtaaacttttaagatatatgggcatagcaattcaaatatgaataatctataattccgttaccaagtgagattttaggtgttttccaaccaaatgtgcccaaatagtaactctttgttggtaatttttttttttttttttttttgagacggagtctcgctctgtcgtctaggctggagtgcagcggtgcgatctcggctcactgcaacctccgcctcctgggttcaagagattctcctgcctcagcctcctgagtagctgggattagaggcgcccaccaccaccacgcccggctattttttttttttttgtatttttagtagagacggggtttcaccatgatggccagactggtttcgaactcctcatctcaagtgatccgcctgcctctgactcccaaagtgctaggattacaggtgtgagccatcgcgctccgccggtaatgtgcttcttaatcgtcccattcaaatcagcaaattatcctagtaactgtcatgcaatcttctaaattattttgttctaataacaagatatatctaagtttattctcctatataaagtgctaaaattagacacataaataattgctttcaagtttactgcaatttgtttactttgggcctctccaactgttttctctgagctttttctgttgcaaaatagaatggagaaggaaatgttggggtcttttgccaatctaaccgtgcttccctccaagggtaatcactggtgtgtctaggtatacctggaaggttaatgcaattacagcctaaatcgatatagcccacagcacatttatgtaaacataaagcataagaacattccatgcccaggtctggtcttctgcatctccatctaggggggtttctcaacacaggtactactactggcacttggggctagataattctttgctgtaaggcgaagtttagcagcatccctggcctctccatgccaatagcaccctccttacaagttgttgcaactaaatatgtctccaaacatcgccaccggttccctgggggcattctgtccctcgctatgattttttaagtgttcccccttacccctcttaataaccactgtcccacagtgatataaccctgatgtgtgagttttccccaagtgacagctatgtttaatttaggcttgaaggggaaacttaattaaggagcttttgaggacaaacagagacgtcttggaggaaccgtctaacatacgatcaagaaaagcaacgttagactactaagacaccatagtatttaacaatgaagttccaggtactgtaataagtgttctatctgcattagctcctttcttatacttttattcgctggggaaactgacgctccgtgataaaccaaggagcagaggctgcagcggataaagtgaaggtggggggctaagtgcgccgtcctcccgctccccctgggtttcacggtctctttctccagcacttgagtaccggagtgaccttcagaagtctctccaaggactcgcttcaactccgctctcacgtcctgcccctctcttcaggtttcccggtgttaggtctcttgtgctcacagcatgagctgggcctccaaagcctgacccagtctgcagcccacttggcccgcagggttcagctgaagggcagaccgaatcccaaggcccagaccccagaccagacacctccgcctcgtatcaccttgtcgacacactgctccccagccctttcccaaacccgccacctgagctcaccgagaaagagccggctctggttagtagcttcatgattcaagattgttctgacacacggtcactgccggattaaaggaaagcaagatggtggcggaggccgggagtttcccagcgttccccgctaacactttcccacgtccccttcgtgaggtactctctatactgccgcgctctactgctctctttataaggttggaccagtccaattcctccaagactcagaatagggagacgcacaatttcccaagtaaatatatgcagagaataatgtacgtcactgctttttgcgttcttctcctagcctgaatatccagtatgcaccccttttctaagtacgtctgcagcagcctgtcacaactccccccgctatcttgggctcttccgctcagcattgtccaatgggacgcgcctctcttgggactccgcatgcgccctccgggatgacacctgcactggaggccctgggtttccgcgttcctggacgttggaggcttcaggagattcctgccactccacctttctgcagaggtattgggtatcgaagcccggcgtagttgcctctcgctgggtgaagtccttactggatctttagctccgtgaaacaggggcctcgttcaacgtattcgccgctgtgtcccccagagcaggcccgggacacaccgggagggtcagcaacctcggggaatcatcacaaggcttttggtctcgtggaatttacgtcctaggctggggctacatagaatataaaaacttagctatagtttttgtgttaggaaaatagaaatgttttggatagtaggtgtgttatgtgagccgaaaccggcagttggagaaagtcagtcacgtgacgacttggggcgggggcgttcactccggtcctcagcgagtgttaacccagaaagtgccttgagctaggcactatgccaacgcgagaggcgtggtccctgccctttagggactttagagtttcgtaccttgctacgttgcttggttgggaaaccgacagtatcagcatcaatatcatttaggagttgattagaaatgtatgaactccaggtcccatattggatccgaatcggtgtttttacaagatcctgggatgacttcgtatgcacaatagtttcagaaaggctggtggtgtagacgttacaaggcataggcaaatgtactttctttttgccttgtgtctgaattgctccaggcctacaacggacttgggctctctaattaagatctgggcattaagaacctggcaccaacccaatttctgtgcctgctggggacgccctcaacccaattcataccacacagtttccccacatgtggtagatttaacactagtggtgcgtgagatgattttaagttggtacatagatgaacacttccattttttccttttaaaaatttgtataaatttaaggggcgcaagtacagttatgttatatggatatattgcagtaatggtgaagtctgggcttttagtgtacccatcacccgaataatgtacatggtacccattaagtactttctcatcgttcacctctctcccacccctccacctttcggagtctccattgtctgtcattccacactctatgtccatgtgtacaccttatttagcactgttccattttaataatatatttattttgattatggcaagcaatgctagtagtgaatttcctctttaagtacatttataaaataataaaagttggtgtaaaaacgttaagtaacttgatgatacggagatacagcaaaaatcatgaatgtgttatacaggtaccattgagtgaaatctgggaagcagtgctctgatcaagccacctgcctgcttaaaattcttcaacgacagccacgtttttcaggataaaattcaaattcattaacatggcatacaaagctgtctccagtacttcaaaaccccaattcccaagttagctagctgcacccctgagtccaatcattgtaacttcatcattcaacagttcaggtcaggtaggaggaacacaaaagtctccacactcaagtgcacacacacacacacacacacacacacccacacctgcttataatgtcctctcattcttaggttatgacccaatatcagaaaggggcaaaaataaattctgttcaaaatgtggcaggatttgaaacataattcatgat

SEQ ID NO: 1243508 - DNA, 4001 bp, Homo sapiens
cacaccacagtctctacctcccagggtcagtcaatccgcctacctcagcctctcaagtagtgggaaccataggcgtgtgccaccacacctggctaatttttttgtatttttggtagaaacagggtttctacctgttgccgaggctggtctcaaacacctgggctcaagtgatctgcctgcctccgcttcccaaagtgctgggactataggtgtgagccacctggcctagccagtgctacccccattttagatttgaagaaactgaagctctgagaagtctagtatcttataaagggcacccagagtagtgggcagcggagtgaggtctgactctgaagcctgggcattttttgtcttccacctgctgatcagagctagggtgggatttgaaccttgcacacccagcgtacccagggccctctcagaaataaagtgcctggcatgaccttgacaccctgctccagattctcctttggtcacctcctcgtgaacagggagaatattatacccagaggtaatacacattttaggctacgaattcaaaaccaagatgacagaaaaatccccagttcttgaaacctgctctttctctgctaagtcaatgactttcccaccaccagtgttagaggtttctggtttcttccttctagttggggccagattctgcccttcatgaggcacctacgggtctatgggtcttggcaacttgcctttcacacatcactcacatggtacatagacgtgggtggcccagttgcctcgctcgtgggggaaggtgcgcacccgtcccccgtgttttgtgctgtcatcttcaggcccctcctcggtgcccgggaacatgttcagcacactgtcaggtactggaaatctctgcctgggaagggggctctggccactgcaaaagaaaaaaagaaaaatgagtacatttatcctgttagcattctctacctttgtatataccacaaaagttgtaaccccttatatatggtggctctgagtgtgtgtttccagcctggtgctggaagcagcttctagatagcgaaattgtttctccagtattgtctcattggggtctccaactctggggcacaaggtccccatgggaaacaacagggcatgcaacaatgtggttcaggggtcacatttccaagctggacaggctgcagctggagtagcactttctagctctatgaccttgggcaagtcatgtcccctttctgggcctcaaatgcctcatctgaaagtatatgtctacctgatagagcaattgtgggatcaactgagctactgcttgtaaagcactcagcaaagataaggcctagcatttaagaatctaagccccaggaagtaaggccgacggttttgttcaccactgaattaccagaccccagcctggcagggagtgggtgctcagtgaatatttactggatgaatgaaaaggctctccctacgctttagcaagtattactatcgcaattgtattcaaatcaggaaacggacctaggatggtacagggatgtgtgccaggcgatagagtgggccagcgcgaggctggacccgaacccaggtctggcctcccaacttggccctagccaggtggggccactctggagctttgtctggggtgggggggaggggtatatcttctggatcctcctttcttcctgcgtccccttttccttcccagagccgccccgcatcctccctccccactccacccccagacattcgggtcccgtctggctctagggtgaatgcgcgcgccctccggagagacttcctcactcctcaccgacggtggctcccatcccccggcctggtccgcatcccgtcctcggactcatcctcggagccgctgctgctgtagcccaccaggggcgccgcgctcatggggcctcatccaagaccaccagagcaggtccaccagcaacctcaaccggcacccggagttccgctgtgccggaagcgccctcccaggggcggggcctgggctggcaccgcctcggggcggagccgggaggggcggaacccggcaggacagtggtgaagattcagcccaccgactccaagctgtctgccggctgcgcacgcggatctggtcacctgcagcctcccggcaccccgctgggacctccccagccttcgtgtacccatttcatatatcgctcagggccctcacctttctgcccgctgctgtctgcagccacccgggaccagacataccagacacgacagtcccgggtcagcgcactagacccagcggagacccctgcctgccccgagcccggccaggatcagaggtcctggagccccctcctcaaaccagcccaaagtccaagcccctaaaagccaagctgagcagttaggggcggatcaattgtggcagaccagagcctctaggaggcccctcctctcctgcgcagagccgggccgagggcggtcacccggagccccctcccctaagcccgagcggggtggccggaagcagagcgcccttcctcggttagtcgaggcgcccaggcctggcgactcgaaaaccgcccggagcacccggcttgtccgacctggcccggccacggggtccccggcagggggcggcctcgctccgcgccgcccgctcctcccgcattggccgccgccgcccgggatgccgctcctcccccggccccgcctccctggcccccgcgccgcccgcccgtccgcccgtctccgcaaggccatcggtccgtccgcccgccctcccggcgctcctcgccccggccccgctactccggcagcgcgcgtcgcttcctccgttccggccgccgctagcccgtcccccgcccccggtccggccgcagccgctacgcgaggccggggattggcagcgcgcgtaggccgcgccgccgcggatggagccggaataaaggggcggccgagagagcagctggtcgccgctcgccccgcgcctgccctgcaggcggcctggagcaggtgagcggcggggcgcccggggccgcatctgggggccacccccgcgcccgccgcaccccttcctctgccggcccggccgcccccccgcgcccctccgccgcgacctagcggcctcttgagcttctgggcggcccaggccgggcctcgaggcgcagccgcttcctgggcccggcctgtagccctggggcctttctccagcccggccgccctcggggctcgccctcgggtcgcagcggccgggccatcccggacgagggctgacaggacgcagcccagctgggcctgcaggcagggccggcgggaggtgatcggctttcattcggtttctcagggaggaagaagagacggggtggggcgcaggtggggggcctcccctgcctctccttgcctcctctctcccctttgcggagtgatcacagaggcttcctggctgcaccttgctgcaggagggccagggtgggcagggggtgctgcagaccaagccaggggacactgtctgacagccattcatgccagaaaaagcaaacaaaacagtgggttggcacagcggacctacaggcgctcagagaagcccaccttccccctctctgtcccgagaaggcttagagtggtacctgcttgctcaagcaacctgctgcctccacccagagcagccgctcctctcctccctcccttccggaagatgctgaggatgacagcttttagcctgactcttacatttctttggcagagcagttagaggccagactgtcctgtgaaggcttctccttccttcttcctctgctcaggagaaaacttacaaacttttaaatgtaagaggcagatgagctgggaacctggaagtgggttgcatctgactctgaaagttcctccctctcgctggcattacctcatgctgccacaaagtggtgagttagagatttgcctgggctgggtgggctttaccttccaacaattacccagaactttataggcttggagtaagggaatggagttgtctctagagaggtgatgagaaatgctctgtg

SEQ ID NO: 1243509 - DNA, 4001 bp, Homo sapiens
aaaaaaaaaaaagaagaagaaaattatgagaaatcaaactatttcctttgctactttctccatgctaaaacttaaaagcatttaaatcatactttaaaagaataaacccaaagtgttgctaacatttacgttccgccaacttttgctactccaattttctaaagatgtgtataacgctttagactgttgtataaaacgtaaatactgggacaatgaatgcaaacgaaattacaattaagtttacatattatccatccccattaattaacatttcaatcaaccttgaattgtgattgatgcttattaaataaaggaagtgagctatgcctaaagatgctttcttcatgtcaaaatcacaaggaatattacacattaattcataatgagccttttacttgttcataccaattctaataagctagttaattaggatttaagttgagaaaaaagcaaatatcaaatctttttttttaacagaaaggtctaaacaaagctaaatacaccaaatctcttaaaatctttgggctatacatttgtaaaaattattcaactactgatcccttttttggcgcaaagacctacactacttacaaaagtaaatgaataagggaacaaaacgttaaagggggaaattctgatgcaaactaaactacagctaatttaacaaaattgaagcttgtcgtaagatctaattttttaaaaagttttcgcattttagattccacaacacgcattcattacaatagttccgaaaatcatgtttcaaaagaggtgtagtcagattgacttcatctgcagaagggcaacaaaacccaattgctcatgaagggttatgattttactcgcaatcagtttcccgaatggctactttgtttcatttccccatatttaatacaaatacacaatgagatggtttaaaagtgtgcaacaatttatagggaccagatgtcaacaaattagcagtctaaagcaaggctgacaaataatacatcatgccgatttttgtccagaataattataatggcggaggggggagaagatgtgagagaaggggtgggagaggggaataagagcttaactctacacgcacatctcccaaaaagagctctttctttccaccacgggattattgtaaagggcccccaagctttagctactgttcaggcagggtgcgttagttgtcagcctggctgggatggattcgtgcaagggatgtcactcaaacgcaagtgaaagtacggtccttgcgacttatttcgagttttctttgcaacagcagcccaaggccgctactctgctacttctatctaaaaaacagaaaatcggcaacccccgcatcatcaatcaagctgagaaaggaagctcttggggcaaaggggcaacagggcacccccaaatctctgaggctcgctccaggcagaggcagcaacctgagctgctctggggcccctgcgctccaggggactcccggagcccccgggccgcctcccccggccggcgcggcggggagggccccactccacaccccgggctcgccccgcggtccagccccagggaggttaaccccttcggcgccctccacgccctccccaagcggggcccggagcccccgcccttcgacctccccgggactagggggtccgggtggctcaggggacgaaggcgcggcgggcgcggaggcggcgggtggctccggcctaggcccgggcagcgtgtcccagcgccctcccccactcccacacgctcgctccgggcagggcgcggacgcccgcccgccgcggcgtccgcccgcccggggctcgggccccttccggccgaaggcgcagaccggcggctacctgcgggctgtggagggccatggctgcccgtttcattgggactccgcgatcctccggctgctcacgctgcttcccccgccgccgccatcttctcgcccgcacatacacactcgcatcggccgccgcgcctgcgcactggccgcgcgccgcggggcgcggggaggccggcccgctgctgcgcctgcgcggccgacaggtgggcgtgcgcctgccgggccgcggacatcccctgccccgcctggagcctgccggactctgagccccgcgaccctcgggcggaagcggccgggcggctgcacaccaggagcccgccgaggcctggctgtggatccggaaggggagagggcaggcaggtagaggtggcaacgccaaggcgccggcgggcccggctcctcacctactgggggccacctgggcccccggagcccgggagtcgcgggctgaggtcggcctggggcccacgagccgccctcagcgtacctgggcccgggcctcgggagtgttcgcattagatccccgaggagggtctggtttatgaagatcccgttgccgcgcattcattcatttgttcactcttcattcactccccaagtcctgcctgggcgcctgggccacgcctttggctaggcattaggggaaaaaagcaaaacagacaaaaacaaaacgtagggcataaaagcacgcgtaaagtgcttgacatgaggcctggcaagtagcaaacactcagcaagtgctacgtgttgcacacgtgcgtgcgtgtgcacgggcaaaccagccttgggggtcgttggttcattcattattaagaaacaggggcccctgcctaactgcactgttttccagccagtgggtccacccttgggttttggccccttttctagctgtgatttcagacaagcgactttccttccctaagccttggtttcctcacctgtgaataagacaaatatgtcataacgcgtaagatttctgtgaggttcaaattagattaacgtgagcacactggccaagagaatagtcaataaaaattggctactgggattgttattaataaccattactattggtttcatttattcaacaaacacctacagagagtctgctcttgctagaccgtacactgagcagaggagatgaacaggaagatccattcccacgttacataaaatagggagcctggtctcttcataaatgggatgccatgaaaaatataagtgggccaggcgcagcggctcacacccggaatcccacacattgggaggccgaggcgggcggatcacttgaagtcaggagttggagaccagcctggctaatatgatgaaaccccaactctactaaaaatacaaaaattggtgggatgtagtgtggcacaccaggcgtcccagctactcaggaggctgaggtgggaggatcacttgaaccccggagacggaggttgcggtgagccgagatcgtgccactgcactccagcctgggtgacagagcgagtctctgtctcaaaaaaaaaaaaagaaagaaagaaagaaagaaaagaaaagaaaaatataagtggtagggaggggttgttccaaaatagaagagctagaaaacataaccaaatacaatgtgtcatcttgcttggatcctgatatgtcttttaagctggttttactatttgttgacaattggagacatttgaatatggattggatatgggtgatcttcgtgaattattggtaattttatagtgtaataattatactgtgctcactgagagaatgtccttattgtgaggagatgcattctgaagagttgaggagtgaaggccataatgcctgtaaactattgtttaatggttcaacaaaagataaaatcatgtacacacataaacattcagggagagacagcaaatatggcaaaatgtttactattgttggctctaagtagtgctatatatttcagcttttctctatgtttgaaaatttttataacaaaaaattggggaaaacaatacaatatagtgtctgtgctataattttaaccatggaaaagcgatatctgcacttggatagaaactgggggacgtgaaaactcactagtgatttatggttgtctctctggctcggtgcggtggctcacacctgtaatctcagcactttggaaggctgaggtgggtggatcacc

SEQ ID NO: 1243510 - DNA, 4001 bp, Homo sapiens
tctaattttgtatttttagtagagatggggtttctccatgttggtcaggctggtctcgaacccccggacctcaggtgatccacccgccttggcctcccaaagtgctaggattacaggcatgagccactgcgccccgcccgattccatgctgtttaataccatattcatgtcccacctgaaagtatcccttacacaatctcacatcatgttccccttctgcttagagtaaccgcccaatttcttagtgcatcctaaatggtcccataccatccggtcccagcccaccactcggctctcaaatctcaccctctcactacacttgcagccccaccagcaaacagcaaaggagggcttggccaagggccatacatacccccagggatgtatagctcacccctgtaatcccagcactttgggaggccaaagcggggagagtggcttgaggacaagagttcaagaccagtctgggcaacacagcaaaacccccgtctctacaaaagtgttttaaaaataaaaaataggtaggtatggtggtgtgtgtctgtagtcccagctattaaatactctggaaggtgaggcgggaggattgcttgagcccaggagtttgaggctatgtgagcactgcactccagcctgggcaacagagcaagaccctgtctctaaaaataaaataaaaataaaaagtagcctgtcagcacatcaatcacagcagcaggtttttctttcttcaaaccactatctgatattatctcgttaacttcttcaagtctttaataacaaaaataatagcagcaaatacacatgatatggaagtattttacttatcaggttgaaccctataaaagtgccaatctgtaaataaaaaacggttaaatatgggtaattccacagtgttcgatttaatatattaacttgtttgcagctcacaaccaccttacaaagtaggtcccccagatgaagaaactgtaagaacagagaggctgcttaacttacccgacgtcacattgctagtaagtggcagaaccaggatttgaacccatgctcaacactcccaccccacaaaaatgcaagttccatgaaggcggatagtcttgttcattgcaacgtcactcccattgcctattatcacagagtatgggcacgtatgtagtaagttctcaataaatacatgtttgagtgagtgagtgagtgaataaatgaatgaatgaatgaatctccttaaaatcactggtcgactgcccagaccactcggagcaaccaatgcagaagcctgccgggccaagaggaaccgagggaaggaagacctgggcgggcaggtgccccaggggctcggggtgcagtgggggcgcggcggcgcgcgggctcaccttgaagtcgcggctgtgctgcggggtgtactccagggtccagagggcccgcaccaggtgcgccagctgctcagtgacctcgccctggccctgcgcgccgcggcccgcaggctgctccgggtcaggcgagggctcgggccgccccgcccggtactggcccagcgccaggtactcggcgaagagctcggtgttgctgaggcactgcagcgtggcgttcatgaagcacgtgttgccgtggttgcggagccccgccacgccgggcaccggctcggcggcgcaagcgggcggcgcgggagaggcgggcggcggcgggcacggcggcggcgtgggcgcggcggccggcccgggcgggaagcagctgcggaggccgccgcggtctggggcggcgccctcagagctaaggtgcgagagcgtggacagcgtcttgagaacgcggctcatgaagctgcccaccgagcgtgcagaggagggcgaggagggcgaggaaggcgcggccggcccggacgccccggggccccccgcgccgccgccgccagcgcggccgctccgaaacagccgcttgctgaaggagcgcttctccttcccgctcgccgccgccggcggcccggacccaggcgccgttaccttggacatggcggcggccgcagacactcatcaccgcgcccgcccgcccggcccgcggccccgccacggccgccgccgcatcccgcagcgccgcgcctcaccgggcccgggggctcgacgccccacacacctcaaagcgcagccgagccagcgagcgagcggcggccggcggggccagcgggcgcgcgcgcggtccgcccagctgagccgctcacgtgacgtgcctcccggcgccgcccgcccggcgctgaagccgcctcggccgccatgttcactgtgggacggtagctgcctctccagccggacgcgatgcctggaggctgcgggcgcggtcctgctgcgtgaagcccgagggaggccatgtctagtgtgggcgccgtcccggcttggaggaaaaggctgggctcccgttggatggtggatccccggggtgggtctctgtctttgctggtcagatggcagaggcgggaacgtgcaggaatcaggatgctgtcagttaccagaccgtgcaagagctggtggacatggccctgacaggtcctgggcaagtcagccctgtctggctcccaagggacgttgcagatacctaccctctgggtgccagcggagcgcagtcacagaccctggcacgtcccagcgggcttttcttcctggctgcaccttggagtcccagcgaaacgctgttatcataactactttccttttcattccagcctttaaaactcctccgggctctcccatcattcatcattccattcattcattcactcactcattcattcagcagttactggggatattgcaaagaattaaacctattaaattagaatcaaatgtcatatccccagcggattaaattagcacggtttctacctgccctcttgcagcttacattcctactgggtgtttacaatagctgttgtgttccacacattatgccaagcatgcaatattttctttaatctttaattcaccgtctttgagattggtacagttcttatctgattcaaacccaagttttatttacaacccctatacttgacctctaaaccaaaggtcacgaatccacaaatatcacaggtcacaaacccacaaatgagtgaagaatcctggtgtttgaatcatcatattgactttcaagtgacttgggtctcagtgttgggggaaatataaggaatgatggggactatagcagacttcaaattaacatctttctaaagaggtggctgccactcagctccagccagttgttcccatgtgagaacaggagctcagcgttaccagatcatctgatgttttaagagaaggcagaaatcctatttttaaacgttggttccattaaaaaaaaaatagtgcagggagcaaaaaatagtacatctttgggatgcctttagtccaaaatcaactagtatatgacctcctctctataggctcccctctgctaaaagggctagtctgagtcctgaggcagaagagagaaatcagagaagggagagcccttcctcctttttaaaacatgaaggccaccttacaccacgtttcaaagtaaatggtttttacctttgacctccctccccaatgtaagtagggctctatgatgacatctccagggtgctctgcactgtccctaatcggctccactctcctcttagtcaaaattcttatctggacaccaggaagaaagccatctgattattcacactaaaatgtgaatgcaatggccctcaacttctgggcagtttgatctagactcgagggcctttgctggagccgttccctctcccttgaacctttccttagctaacttagaacctttctacttagctaacttcccctcatccttaaagtcccaccttagatatcaccccctccaggagatgtcccttccacaggccctcttggcacctctcattcatgacactgacttgaccatattgcaattcagtttacaatcatcaccttcactaatatgtgggcttcaacccagtagagacccatcttactcattat

SEQ ID NO: 1243511 - DNA, 4001 bp, Homo sapiens
agtggtcaaggccagtggctgtgaaatggcaaagggccactggttggccaccgagtacataaggggtgggtcccggccaccaacagccctatgggtgtccaagcagccaccaaggtgattccagcccagctcccaggggcaggagatcccgtttttaaaagctcctcataaatgagttagttccgcaagaggattaaaattttaattaagacatggtaaatccctagtccagaagtaaatgatgaaagcacaggatagccacacacacaagaaatctgtactagacttctagaaatagcctaaacgataaggctgccttcttttattgttcaagacagatgtacaacattggcatgcacatacatttactgccatgtaagagtgatgtaataccaagttttatatgccaccttttcggaagtttttaagacatggggactgatttggccaaacacttgagctaaggcactaatttttttttttttttttttgagacagtctcgttctgtctcccaggctggagtgcaatagtgtgacctcggctcactggaaactcctgggttagagcctcctgggttcaagtgattctcccacctcagcctcctgagtagctgggattacaggcacctgccatcatgcccagctaatttgtctgtatttttgtagagatggggtttcaccacgttggccaggctggtctcgaactcctgacctcaggtgatctgcgcacctcggcctcccaaagtgctgggattacaggcgtgggccaccatgcccaggctatggcactatttttgacacaaaattatctcaaataagactggggacatgtttggcaaacacaagtgactatgtgcaatgtcaaacagacaagccctggatgaaaaacgtctataggaaataaagcaattaccatcccataatacgcatatcccactcagaaatagaagacagtctccattattggtgattgctaggccttttaacgcaatatgtatatgaaaaggcagaaaatatgtttttgaaacaccaagtaggctccctggctagttccagggcctatattcccacctgctctactgggcacttaatgcctatacccagctttcctccccgtgaattccatttgtgatgtcataacacagaactgctaccccaccagagaacacctcccaatcgctatggaagttacgtagaccacttcagcacgcgaatctaacccctgagataacagatcagaataagcaagattccaattggctggctttcatattttctgccacttcacgaagatttatcaatcctcccccaaaaagctggcagggggcgggggtcgcgaacacaatacaaccctggtgtgttgaaactaagagtccatgtcctgccaccaggtggtgccttgtccatgaagacccagctcggcctctgagccacaggtgtctccactcagccccccagatccttccactagtaacaacctagtgatcaaaactacagctgttattacggcagatacgcatgggccaacacctggtctctgggtggctcacatggcgccctacagcccatctcaccccgcccccatcagttcaccttgaactccctctgggttctgcatggtcctctcttgacctctcatctcctctccccacaatgaactcatttaaatatatgacttaaaatagaggctacagaggtaaactagaaagcagtgatctttatataaattttactgatacaatgtctagatgtatagccccaaatatacttcagaagtttggctgagacatgtcagtattggttatctccatccatcaccagcataaggagctcaacctgaaaacctgactcaccttccagcccaagcctgtggttcccagccatctctgcatggctctgcagtggcctctgctgggggatgggggaggttctctcacccacatcagagtgactgcatagaatctctaggagctctacctcagcattcttttttattttttaaagcatcccacagaagccttgtctttaggaccagaaacattcaagcaacctcaatttagataaggcagtccaggaacagaagaggatattaatggaaaaactggtgaaactctgaaagaatctgactttggttaacaacataccaatgccagttccttggctgtgacaaatctggtttaaaacactgtatcaaacactggtgatataaattgttaacaacccgagaaagtcgctggggggcacacaggcgctctgtcataattttgcaacttttctgtacatctagaattactccaaaattaaaagctaattttaaaaaggcaaagtacaatgccctctcagcctaacaagcaggaggaataattgatgtaagtgaaaaatttcagggcaccttaccacacatcagtaatcccaggcacttaggaccctgaggcaggaagatccctttagcctgggcaacacagtgagactctgtctttttttaaaaaaaaaaggattaacacgaaacaacgtgtataagacaagcaatctgggccaggcagggtggctcacgcctgtaatcccaacactttgggaggctgaggcgggcggatcacctgaggccagaagtttgagaccagcctggccatggcaaaaccccatctctactaaaaatacaaaaattagccagacgtggtggcgcatgcctgtaatcccagctactcaggaggctgaggcaggagaatcacttgaacccaggaggcggaggttgcagtgaactgagatcacgccattgcactccagcctgggtgacagagtaaaactctgtctcaaaaaataataagttgggtgtggtggtgcacacctgtaatcccagccacttgggaggctgaggtgggacgtaaaggctgcagtgagcaagggctgcaccactgccattccagcctgggcaacaaagcaagaccctgtctctaaataggctacaaaaaaaacagaaagggaaaaatgtcagcattatgcacctaaatagagcatggcttaaattctcaagcaattcaaggcagacaaaaaagcagtttgggagatgaaacacaaaacacttcccacacagaagccaggagacaactggacaagagaattgctcaggagacctgtagccagtctggggagcttgcatctatgtgggagcaagagggggagagaaaatactgaccacgtgagaaggaactaccatctgcttaagtatttcatgaatcagtaactccaatgagcccctattatgtgccaggccttgtacaattctcaggtaatcgtcactggccccagggtaaggcagggcagaatatcctccctatgtcaccagaccagggtcacagctggactggcaaaggcactgccacaagaggccctaggcaggaagaatggaaaagtcctgagcaaacaggcacgacactccgagaaggctgaagttctttgactacatatgcttttaaatatggatattcccaaaataacctggattcctgtaggactgctactacactatactatactgacttgattaaacttttcttgattaaactttgagataactgtagattcacacacagtcttaagaaataacacagtcaaaaaaaaaaaaagaaagaaagaaagaaataatacagtcaagtcttccacatctgtggattcaacaaaccgcacatcaaaaacactcagggggccgggcacggtggcttacacctgtaatcccagcactgtaggaggccgaggcaggtggatcacaaggtcaggagatcgagaccatcctggctaacacggtgaaacgccgtctctactgaaaatacaaaaacttagctgggcacggtggcaggcacctgtagtcccagctactccggaggctgaggcaggagaatggcatgaacctgggaagcagagttgcagtgagcggagatcgcaccactgcactccagcttgggtaacacagcaagactccgtctcaaaaaaaaaaaaattggggg

SEQ ID NO: 1243512 - DNA, 4001 bp, Homo sapiens
tccgtctcaaaaaaaaaaaaggggggggggggcaaataccttgaaatttgtggacctggtcattttcccaaagatacaggtctgtaacacacatgctctgcagtaatgtctgtttattaattctcactagtgtccaaaaacacctggaaagcggtaggacaatgtcatgggaaatccatatgctcgtgttattggatatttgtcttgaccgggtaccatttgaaaaggaaactgaaaagcaaccctcttttatgttttagatgggctgcaaaatacagcacaaaaggaatacacaaaattccctcagtaaagtacttcttttcagctatttggtttaatcacacataacaggcgctcttagttgctgctttgctggggccaagtgaaacagataacccagtccttggcgtggactccgctcttctgtcccccattactgccattgataaataccactggggagtgcctactgcagaatcccagccactttgtcatttgcaacctggccagccattttttcagtgactatccaattactggaagtaagttattctattcagaggtgaacaccagtcacgcttaagtgttcccaccaaccggtgtgcagcgccccacacttggagccaccgcacaggacaaatactgcttttcctgagctcccctggagcttcattcattgaggcaacccaagatcccttgctaaaagcaaaactaaagcattccacgccgttttcattcaggtggcctccatttgactcccgacagcctgaactcgtcacgtaggtaagaaaactttttaaagaccatttggactttgctttgtttcagtgaaatgggtcgtgagaaaaagtgccttccaacgaccaactccctaaatccaacacccttctctttacagcgtcttcacatccaacctttacaaccaagactctatacctcaaactacagtgccttggaaaattactgccacatcggcagaaaaccgagttacctttcgagtcaggtttgattctgatgcaggcagccatgtgcggcagggctttcgcacggttgcaagcgcacacctggccggatgctggctgcaccacacactgccaagtacaaactccccgaaaaacaggtggattcggaaaccaacagcgcccgggtcagaactctgggccagtccaaaacctgacaacatctgcgttccttgcaggtattttcgaacgtaagcccgacgctaggcagtgctgttagaaagtgatttggaagagcgcttccgagccacggcgcgccctccgggggagcgcaccggagcaggtgcgggcgagccccgcgcccggggaggtcaggaattccccagccacaccagatccaaccggacgccccagaacggggacggtccccggagtccgcctcccaacctgggtgagaaaacacctccgtccctccgctgcctgagcgctcgaatttacaactcagggcgctttgtgccgcggaggcccggcggacgcgaggtcgggacaatgcacggggccggggtcccggcggccgcccctcgcccgcggacccggcatgactttgcagcctcgcaggccggggccgggaggccaggccgaggcccggcggccgcccggggcctggttaaagatggcgagcccctcgcgtggctcccgcggctcccccggccacaatgaaaggcgccccccggccccgccgcggccggccctcgggcctcaccttccatctccatgtcctcgggctcgctcaactgctgctcgcccgctttctgctgctgctgctgctgctggtggttcatgtcggccgcggcctgggcctcgcctgcggccgggggccggggctgcgagcccggcgggcgggcggcggcgagccggggcggcggcggcggcggcggcggcggggcggcctcctcctcctcctcccgcgcgtcgtcggcgacggcggccccggggcggcccgcggcgggcggcggcggcggcagggagacgcgcacgtacttgctcgcgattcgcccaatctcggcgccgaggcgggcgggcggccggcgggccgggccgggcggcctcgtcgctcgctgcggccgccgccgccgccgccgcggggcccgcctcccgccgccggggccggggccggggctgcggggccgcgggccggccgggggcggagggcggccggtcgggggccgcggagtcagccccgcctcgggccgggcgcggcggacgggaggcctggccggccgcggcgggcctgcgggccctggggccggcgggagcggcggagcgggcgggcgacgggccggccgcgttccgagagccgcggcctccgcctcctcggcgtcgtcgtcggggctccggcagcggacgcggcgcccggcagctcggctcggctcgctctcaaaatggcggcggcgtgaaatgtcacatccgcatggggggccgcggagcgagcgagcgagcgaggagagcaagcgggcgggcgccgagccggagggcggagcgggagcgcagggcggagcacgggaggcggagcagggagcgacccgcctgccgccgccgccgaggcccgcctgccccgcagcgccgcgccccggcaccgcctgcgccgcagccccgcggcggaccctcggcgctccctgcccccgggccctgggggccgaggcgggccgcccggtgacttagccctgcggaggtgaaccggaatccttcccatcctggggagccggacaccccgaaagacccaggagcggcaatgaggaggggcccagaagccacccggcagccggggttcaggtcccagcctagcgcgccggggcgagcgctggaggttgcccggggactgctcgggatagggcccggaagggagcttggggtcagcgcctagaagttcctgttattgtcgttacttacccttgcccgctgacgtgcactttttcacccagtatctaccgtggaagaatttattttctcactgtcagcctaatctggcaaagtttggctcctcaagagcaaccccaggcggggcgcagctgctcacacctgtgatcccagcactttgggaggccgaggtgggagaatcacttgaggccaagagtaagagaccaccctctctacaaaggttttgggttttgtttttatatttttgaaatgtatttttaattagccgggtgttgtgcctcctgcctgtagtgacagctacttgggaggctgaggctggaggttcgcttgggaggttgactgaggctgcagtgatcaaagatggcgccactgcactccagcctgggcaacagaatgagaccctgtctcaactaatagtgataataaaataataatataaaaataaaacaagcccactacccttcacatttggtattaatttacttccttcctatcaacccagtctgggatcattcacccggggcctccctattccaggagacatttggtgaatatatctcctgtcctgtctcattcagtcattgacagactgatgattagggtctcaacttttccagttaatcaaggcagtgtgggtcaataaaaatggagcaaaccgatatacatttctacacatctcaggggagaatagaatttcaccctaacaaggccagaagattgtggtacctgtcttctctccatctccctatacccgctttccctgcatttttctcccatttatgtactgttcatctcccttccccccgaaagaatgttttgctcactgttgtatcacaaatgcctgggatacacagcaagtgctcaataaaaattggttgggccaggtcggcgcggtggctcacacctgtaatcccagcactttgggaggccaaggcgggcggatcacttgaggtcgggagtttgagaccagcctgaccaacatggagaaaccccgtctctacttaaagtacaaaattagccgggcgtggtggcgcatgcctgtaatcccagctactcaggaggccgaggcaggagaatcacttgaacccgggaggtggagggtgc

SEQ ID NO: 1243513 - DNA, 4001 bp, Homo sapiens
tcctgagaagcagagtgggtgagggacaaaactaggtgtcaaggcaacttcaaagccaacaaaaccccatggacacggaaccatgcctatatatcatttctgggtccctctattcagtatggcaatgtgcaataagacttgctagcattcgtgagagtcaggcataaacaaaaagctatataaaaggagcagtcaagaaagtggtgtctgatgagagaagcagctagatggttgtggacatactgagtatgagagctgaatggaggcagggtgggggatttcttatcaaggtccgaaccctttagtttaggaggaaactaaaatccaaagcaacatttgatttggattgcaagcagcagttgtcaaccggggcaattttgctccttcaggggacatttagcaatgtctgaagacatttttgattgttacaacggatggagtgctactggcatccagtgggaagaggtcagagacgctgttaaaaatcctgcaaggcacaggacagcccactacaaccaaaaatcatctgccccaaaatgtgaatggtgcagaggctgagaaaccctgagttaaggaatttgccccaggttaacgaatgaatgtcacaccacggaatagattagagcagtccaatagagcattctgcaatgatggaaacagtctataatctgtgctgccctatatagcagccaatagctacatgtggctattgaacacttgaaatacgggtagtgtgactgagaaactaaagtttaatctttaataatttaaatttataatagctacgcacggccaacggctactctactggacagaacagaaatacaattcaccttttctgactcgcagactggtattcttccagtttcacagcctgcttctttccaattttctgaaatcactcactcacttgactttaacactaaaatgtgactgggaaaaaacccacaaaagtaaaataatactgcagaaaaaaaaataaataaaacatccccagttaaactttcgctgttttgtacattgggaaataaagtaaaatatcagatcattgttacacatacatgtaacaagactgcagaagcaagaaaggtcaaattatttctacttccacttgcagggaagggtgttataacacagataaaacaaaaaactctctgagccttgagatcacgagttttccgacctgatttctctacttggtcactaacaatctccttcacttctcagaagctgggtaagaaaccaggctggtcagcatcacctgcaaattctccggcttctgacttctctctcaccacagagacaactctctgatttgctggtttgggtggcaccgcaccgaagactcaccatgtgccatgcactgtgcaaagcactacccatacatgatgtcacttcattctcactgcagccctttgtggcaccgggaggttaaaaagctgggaccaaatcacacagccagtcaggagtaaagcagggactcccagatatggctcccaatctgctcttaaacactgcgctaaggtaagggcctaaaacctgggaaagtaaccctggctgggaaggcgtgagaagtccccctggggagcagagcagtcaggggctgcatagccagggaggggtcctggcggctcttacttctcgatctccagcgctgccaccttccgcttttcgtacagcttgtcattgagggcgcgcacgatgttaggcgtgagcggcgcgaaatccttctcggggttcatggtggcagctgggggaacctcgcgactccttagcccgcggctgccggggccgcgccggggccaggggagtctgcggctccgctctgcccccggcgccggcgcatggaccacgccgctctaggcttgcctgccacgctccgccgcctcgccctggaacccgggcccggaccccgctccagcacacctgaccctggccgcttaacaactcccgcccggcactagcgggactcacgagacagcggccatgttactcgagtcacatgactctacagcacttccgccttccgtcgcgagggcccgcccctctccagccacgcccccaccgcaggccgcaggtggattggccacgccctcggaaggctccacccacactgcacacactatcgcgctgcgcgccaggtagctggagtgtggtttgagacgtgctttaatgggtgtgtagctcacgcccaactgatggcacgtggtgggcttctgtagacgttcgtaagaccgaatgggttcttggagtctgattcacttaacataatttattcaatagtcaccgaattcactagttcattcagtagttggtcacttaccaatttcctagatgcagacgtttccctaactgcagtaacactgtcatcactttcaccatattctagccacttgtattatctatttaatgttttcctcaaatcaactcactttaaaaaataccttaaatctcttttagctttgcttatgccctaaaaccatgagtttgaataggtatattttttctaagacacatcaaaataaattctcaattaaaaatggcactacctgtctaccacctaagatctcaggtaccaccagtgtctgtcactccaccatttgggggtgtgtttaacatgctctgatgcctaggagggctggttacagacagagagaaaggccccagatctgctgagtgcgggtctctagataggtcccctggaaagcagccccttcagctgcttcgggaatcacattacatggtgagacagaaatcccaactatgtggcaaaatatttaaaagcaatttatggccggagtgtggtaaacatgcagttaacagggaggtgcatcagcctttcctatcataagctttcagagtgaacagggacttaggacaagggctagattacagtggagctcaaagaataacagtttcagaatgcatggtgatacttttctttaatgaatgaaaagtgcatatataggccttataacagtcttgaaaatggagtattttcctcaacagaaacagggacgcaatgagtaaagggcaaaagtaggcagaattctaggatgacctccaatattcccaccccttcgtgttcatgccctgtattatgccctctttcagcgtgaacaagacttgtaaatatgatgggctatgcatcactcacatgattatattatgtaatatcgcagaagagattttgcagatgtaattaaggtccctaatcagcagacattgaattaataaaaagagagattaacttgagtcggcctgaccgaatcaagtgagtacttaaaagagattagaagaaatttgaactggaagagagactctcctgtaaggagtttagtcatatggccacaaaggaatgaattttgccaacacattgagggtccttggaagcagatctttccctagttgagcctcctgatgaggatgcagctggccagcaccttgatttcagccttgtggaaccctgagctgagaatccagttcacactgggctctcaacccatggaaactgtgagataataaatttgtgttgttttgctctcctagttttgtggtaatttgttatgcagccatagaaaatgaatacaaaggctaatccaaaactcggcaagtcatggatatatcatgtctagaaaaatccataaaaaatgtattctcctatacaggtggggttttcatagttgttaaaacctttgctgacacaatcctatgaatgaaggtaggtgcgctaacaagtagtagtagtgctgccaaggacatctccaaatgtcttgcaaagtttggttttaggattttgatgatggttgatgaaaaacactgaaaaaatgtaaatcaatgggaatgatttggttctatttctccaatgtgtgtgcatttccacgggacgcatatctaatatatttcatgtttcttttgctttttggtttggctttttcttagaggtgaactgaatttcccaagggtaatgatacagtttttaataattcaaacaataagga

SEQ ID NO: 1243514 - DNA, 4001 bp, Homo sapiens
acctctgctcactggcaggactggctgtctggcctgctgaggtgggagctccctcctgggctcagcagggccctgctttcttgttcccagaggctgcccagtgttgtgttgggacccacttataagcccaggcaaggacttaattttctgtacttgggacttgtcccagctcccccggggctgtcagtgggggtgacagtaatgggagctaggagccgcggacccatctcctgcccggggcatctcccttgccatctccctggcccctgggctgcgtgccagaggggccttcctcgggtaagcacaggtctgggcagtgtctgagaggctccttatgctgaatcccattctcccattcccagaatatggagagagaggtgccatctggacaaatgccctgggaccccagcccccagccccatccccatctgaccctccggacccacaggtagcaggacagctgttccaacgtgcaggagacaggggcggggtggggacaggcagtgcccggcccccaggctggcatgtgtgtgcgcatcctccctccccaggcccaggggaggctagataatggtctggaggggatccagctgggctgctcatcaccagagcctcttcctgcctctgacactctgtttacagaagctccaggccaactcccctgggagaagagagtaaactcaggggactgctccccatcccccacccgcctgccccagctctgttgggtttttgtcaatagctgggcccatcctggactttgctgccccctggactggccctaatggaccctgcttggaaggtcccagcccggccacccctctatgccctcaacacccaaagtacagtctagtgtgaagggaccttggagattttatccaatccccagccctggaggctctcagcctggggaagggggctctaggtcccgctgcctctctccagagcctcacctgtccttggtgcaaaaggcaggcatggggacacctagacccccaggacctcttccttccaccctgcacactccacccctgggccacagcaggggaggcggtcagtgaccctggtgtggcaatcgttaacgaatgggggagaggcagaatggttggcaccaatcggctggcctgccagtgaccacaggggacctcagcagtcctcaggccccagcactgccagcccagggacacaaaggactaggctggctccaggccactgggtttgcagcccaagcaaagccccttccctggcagaggcagagacccggcaccctgcctgatacccgaagctctaagggccctggccagtacaggtccatcccccacctggagggatgggcatcggacgcccaccagccactccccgcccctccctagggctgcatatctgtagcccccagctgtgctttgagtgacaagggtccagaggaccccgggcagcccttctgcacagcagcacctactgccggaccccaggagggaaaagtgacccaagcctgtggcttggctatccccctcaaaggggtttgattcataaaactggtcatgccggaggcccagccgtgggaggaggaagcatgggacggggtgtttattttgtctgcttgcagcctcgcgggctcaccgcacactcaggcgcgcaccctggccggccgcggggctgtcggcgccccaggacggcgggggagggagcgtacagggcctgcccgccgggcggcccaggtgaccgtgtggggctggggccgcggtcccgcccgagagtgcgtgtgtgcgcgcggcggcggtccccgcgcgtgtgcacagcctggccgtggcgcccccttccccgcccgcagccccccagccccacagaaactcaccgggaggcggcggcggcgcagggagccgggcggggcaggccgcggcctcagtctttcctggcgggtcgggcccgagggggtcctgggtcccgaagcaactgcgttcgagtccgcgtccacccgccccgggctcgggctccggagtcggctcgctggaggcaggtcgcgccttaagagtcccggggggcgggcccgccgcggcaggggcggggcctctccccattggccggggcggagccgcgtggagacacgccccttccccaccgaggggctcgtgggccgggttgccctggccctcaccctgcggccacctgacctgcgcggggagaccttgcccgtcgtgggtttgccggatgacactgggcaggtttctgctttttgtgtaaaaagcgagagactatttaggaatcctaagcgtcacagcccagatgcctatgaggcaccaggcaggtgacaaatgccagaagtccaccccagggcctctgcggccctggagaggcaggatggcgggagtggggctggtaagggctgagtcctcatgaccagcccgggccagctagagctttggatttttgaagagaaactggaaatccagatttttaggtgaaatctctcaatgtgttattgttggtagctaatcccaatttcaaaaaactcctggcagcccacacaaagccctttcaagagcctcctaagtataaactccaatgccaaatctgagctcagggtcctcttagccacgacagccttaagagttgtgagcagccctggactctcttccccaccatattatgagatgaaggggctgtgtcagggagggcagtggtggtctgcccacggccccacagttactggcagcttcaagcctgagctgtggaggcataggggtggtcaccgtcggtgggtggggcctgggctgcagttgacagtggcccttgattgggcaggaggggcgggtgccaggggccggactagtccagaaaaatcccctgccttggaggattccaggaaaacactctgccctcctccccctccgcgtttgtggtcagtcatgcctcagagcctttgggggcccagctcagctcctgacttccggagagccttgggacacccacaccccctccagcccggcctgtagccaaggcccttggctgggctagctctagtctttggggggcctgaaggcttatccctgggaggctgggccacaccagctggagggtttcctagtctctggaggactcagttatctccagaaggcaggatggcctctgtgtctagccgtcaagggctaagcagggcctggctgggacagtcaccttctggacctcccgtccacagggccctctccccacagggcccctttccagggctggcagggctccacaacccatacgtttctcggtctacatggattagggcatggcttgcggacctctgttcctgggttggggctggcctttgggtgcatttagtgcaggctttatgggagtttttacaactttgaaggcactgctaacattgaaaaatcaggtggtttcatattaaaatggggcttcccagcttgcattgaacaggaactctcagctggggctgagtggcggttgctccctctgccaaaatgtgggctcatgggtcaccccagtccccaccactccctgctgcctcctgccaagctgtccactcacttgagtttcctgcccggccccagaaccatctgagtttccaatcagtgctgtgcagcctcttgtcggactgtttccctgcctcttcccttggccctgtgtcctctgaagccctcagaagcatccacagatgcccagggtcaggggtaaagagggctccaagagcctccagcctggctttcctcaaggaacaggacctcctgatgtccttgaagcttctcacctctgtggcaggttcttgtagacggagagaccccatctgcctggtgttcaccccctgccccaatcctgtgccctggccttacacaggtccccacttacccagaggctcaagggaagcttttaggagacccctctcagtttatccaacattgccttgtatggtttcaaggtgccacccgcctttagaacctggttaccagcagtctgcacacagcgggggagctaggggctgtgggggt

SEQ ID NO: 1243515 - DNA, 4001 bp, Homo sapiens
ggttaaggaaggagagttctaaatgcatggttttaattgtactaagcaaaagctcttccaccagcaagtaaagaaaaataatgacccaacaatcctcctccgagctctttcctcaatccattcattcagcgataacttatttaggatgtgcagtgggccaaacagtgtggggtgggggagtgggctggtctttggggatttagctgcgaaagggcagatataagctctccttctgggatcaaacaacttggttcaataagagtttattgtacaggatcccccggtttgcaaaagcctcttcccttacccggaattccccacagagactcacgagtcgtgttcagagtcaaacctgaccagctgcatatatgagcagcaaggcagggatcagcggctgcttctcccactagctgctttctaatctggccgatgaaacctgcgtctgttctcaaggtggtgaacgggaggggaccctcgtttgtatttctcgtgcctctagagaggtccagatattgggtttctgatctaacctagaagctcgtgagctggctgctgctttggagagcagtatgtactggggggctctagaaaacagatgggaaggaataggctcgtctcaccgtgattaatagcaagttccccttacaagtttaacatgcaaacctagtgttgggtccagtccgcctctgctgggtaagctcttcccagaacttcagggaaattacagtgcccgcacacagagaggcttaaactctccccgggaatttcagctgagcgtgagggcctggagaagttcccccagggggaatggggaatagagggcagcttagagagctgagctccttctgagatgggaccaggaattccggggagactgatcagggttttttcccctctcggagaaacagaggatggagaggggcatggagggggttgcgctgcagccctggtctccaccctcaccaagcctgggtgcaaggtaccgaccctcttccttcctagttcctttccccgtcaggctacggggaaggaagtgggcaggaggcgggatccagccctgcaccctgtcccaggcccttcaggacaacagcatagaggtgaaaaaagatcatgtatcaaattcccggccaagccacttagtggcagctgactgatcttgggcaaatcactcattctcgctgagcggcggctttcttacctgtaaacggatcatgatggcacctgactcattaggtcccaggaagtattaaataagatcgcacgtgtaaaactaccaacggcggctggcacacagtgggcttgcggttcttaatacatatatttttaattctgttaagcatcaaccctcccgtgcgaaagctgagttgtcctctcagacggagaactcccgtagcgcaatcttccagacccggggtgcctgggcgccagcattctccccgcgcccaggagctcacattctcctcccgtcacccctagatctggcttggggaggccgcccctctgcatcctccccagctttggcccggggaggctctgagacccgggtgagggcgcggagggggtgcgcgcggcggttctacccgggcagcatcccagccgcagctttcccaccccctccccagcgcccagcgcgcaaaaagagagaaagcgagaaaggcgcggatactggaccaggctttgacgcggatcttgagctcgccgtcctgaggctcgggcatggccttcctgaagagccgcagcttgttgagccccccgaagccagccagcaccaccgcgcgcatctcctgggcgtccccgaggcggtgcgagccgtcgccgccgccgccctccgccggctccttgcctgcctccttctcgatcatttgctccgtctcctccgccttctccacgccttccttggccatggcgctcgagggcgcggggcgcacgggctgcggtggctgcggtggctgcggcgctgggggagtggggctcctctcccgcgggttcctcctgttgaatgtgggatgctcggctgtgcaatggctgcagcctctgcgagcgccgccgcggtccacagcctccgccgtaatcctcacaagagccgtgccctaagcgcttcacccccgccccacccttctttcctgtcccaacgaagcctcaactccagttcctgaaatagtcccaagttagggtcgggatcgcggccctaaacccaaatttgccgaagatctgtgactaaaacgagcctagagagaccaccctgtcatcccccttcctgtgggcccagtacttggttatatacggcacaggctcgggtgccttgaaatggaccgagactaatgtctgggcctggaggatgccttaccgcgacaaggttgccctctctccctcccatcttcgaggctgggcgggatagtcgggaaattgggtcgtttctcaaacagccagttttgggtggaagggcggagaggtttgggaagcagggaactagagatcccgctcactgccctgaagagtccagtgcagggtcttttcactccagacctgcagggtcagccgggatgctctttgctgggtatcaccaggggcttccttacgacggcgaattctcaccacccacaccatttcgggctattaaagaggcttcagacaagaatcctgtaccagaaaggatcctgttcgtgttctgatccccggaagaccagtgtgtacccgctccccaacatgcatgcacatacacagagtagtaactggcgttttgttttgttatcaggctctttgagaaaaacagctcatagaaaaacttggaatttctgaaataaaataatggggaaggacgtggttttcctaggggcagtttaaggaaagagatgcaggtgaggaagtaggtctatattctattatagttgctatgccattgccagccttgagatcttgggcaactcattcaaccttcctgagcctcaacacactcatctataaattgggtacattgatttttttttctatattgtgtgaagtgctggggtggacatgatttcagtgagacatggtccttatattggaaaaggtcaatttcagagcatgaggcatgaaggacacagtcaacaaatgtggtacaatgaatgatgtaagtgctgcctcttctctcccctcattcttcctgtgcctcactgctttaaatgcccttgtcttctattccttaaaaaaaaaaaaaaaaaaaaaaaagacgattgccattttccctccttccacagggttctgcacctgctgtccccttggcctggggtatgtgttccatctcctttatctggtgttaactcctacttcgttctcacctcaagggtccattcctgttgggaggcactccaacctccagattggtgtcctccctgactatagacacttatgtccctttgtagccaacttttatatgtttacctgataatatctgtttcctttatccaactgtgaacttcatgtgagcaggagctatttctacttttatccagcgtggttttcccagggcttaatacatgattggtacatagtagaatatgcacagaggcagcctgttgaaaaactggtccagagagttggagaagttctcatggaggagggaacatttgggctagaccttgaaggataaggcaggttcttctggcagaaaaggtcgcaagctcattcaaataacacagaaaggtaacaggtaaaagggcttttgagattctggtttgttctatgtaggcagaacattggctgtatttagcaatcattggagatgaggctgaaaggtttattgggaccagcttttgaaagttctcacataccaggttataaaatttaagacataatcacagaggcaattggtgccataaaggcttaaaaaacaaaaacatggggagagcattaccagaactgcattttaggataataactttgacagtaagtgggtgatggattagatgatagagttactggaagcatcgagatcagttagagactaagtgcaggcaaaa

SEQ ID NO: 1243516 - DNA, 4001 bp, Homo sapiens
cccttgggcagggaggcagaggttgccatgaactgagatcacgccagtgcacactaagggcatcctagacctcactttgggcaacagagccagaccctgtctcaaaacaacaacaaacaaaaaacctggggacctaggatgtctttaagggcccttcagcctctaacagtacttaaaccaattaaaagactcctgttagttacctccccacatccccacccgcaggacgctccgtgatgagcagctagctggctgtcagctgtgtggatcaccaagattgcatggagtggggctgagctgaccaagggggatgaggggcggggcggggcgggcagggagggggcggagccactcacctaacaatagctgtagtgtgtagaagatgcaaccgaatatgctgttggattgattgaggatgctgtcctgtcccagcacatgctccaccagcccgaaacccctgccccacctggcagaggggtggggtggggtggaaccaggttaggactgtcaacccagtgccttggaccctgcccgagaaaggtgatttccaagaagccacctgggctatcctctgttccccgacctcccatcctagtccaagggtcgatgatctcctggcaccgggcacctttggccacgtcaggattccatgtcactgaccctatcctcccctctccccagaccaggcccggacgtggctactccgtaggccctgcttttcatcttagaccttaagtaagtctctttttttttttttttttttttttttttgagacggagtctcactctggcccaggctggagtgcagtggcgcgatctcggctcactgaaacctccgcctcccgggttcaagcgattctcctgccttagcccccccgagtagctgggattaaggcacccgccatagcgcccgattaatttttctatttttggtagagacaggctttcaccatgttggccaggctggtcaactcctgacttcaagtgatccatccgcctcggcctcccaaagtgctgggattacaggagtgggccaccgcgcccggcccttaagtaattcttaaaatggcaaggctggtataacggttcactcggttttgcatcagagactgggagtcgggggcagattatctttgccctggaccccagaatctccagctccctggccactcactcgcctcctctgtattccgtcattatgctaacgcctggccatcacgcacagccagaccgggccaccttgttcctgggcgcagccatcgccaacaccccccttcacctgcgcgccgtccttgagaccatcgtcaatctctaccgccatcctgcctccccgcctttcctggtcaccgttattccttggcatccaattcacgtgcgagtccccggaataatcccagtccccagcactgtctggtcccttgcctcgcactcttatttcgaacaccagtatcgctgggtagctcagcccctgtgcaacgaccccgcgagcagtccagccccgtgtccgttccccgggcacaccgatcccagactccagaataatcatctggcatcctggccgccctgctccgaggccccacgcctcccactcccgtgcacacctggaggagaagacgcgcgaacagctgatggcggtgcccacgtcgcagagcgcgcggtaatcccggtcccgggcgcgcgccgccttcacgtgcagcgcgtagagcgagagcactaagcccgtcaggcaaagagcgagccgcacccagccagggctcccccaggtgctgcccattatctccaggttccgcccgaggcgcccgcggagaaaaccagccacggagcaggggccgggcggcgaatggccgcgcccctcctggccctctgactcggcgattggccggccgtgctcgcactccacgacccaaatggctgttccagggcgctagtcaagcgggcgagttaggaaaacagcgaagaatgccgggactagtgaagcgggtaagggacgtgcggaatcgcggccccagcggctgccaggcatgatgggagttgtagtcggcgcggctgcaaggcatcaagggaaatgaagtctccacagatttaaaaactgttggccgggcacggtggctcacgcttgtaatcccagcactttgggaggccgaggctggcggattacctgaggtcaggagttcaagaccagcctcgccaacatggtgaaaccccatctcaactaaaaatacaaaaattagccgggcgtggtggcacatgcctgtaatcccagctactcgggaggctgaggcaggagaattgcttgagccggggagccggaggttgcagtgagccgagatcgtgccactgcactccagccaggccgacagagtgagactctgtctcaaaaaaaaaaaagaaaaaaaaaagtgtgttagtgtggttaacagcatttgcgcttaccctatgccaagtcctgttgtaagaattgcagcatccgggacctagagaccagcggatcaggggatccagcgaatacggcgatccgattcgggaaccaagcatttcccctgaaactatttcaggcaccattcgggctgcagcctcccatcctcccgggtcctgcctcaccagtgcttcctggtggtcggtctccctttctcccatacattcacagaaccactcctttggccacacacacccttgacagtatcctaacctctctactatcatggcgcccgcctggcaacacctgagcttgcatcaactcaacagtcagtctctcctttccaagctgtgggccagatgaggtctctccttcacagacgtcccatctgatggtgacccatctctcctacaccttcaacctctccatcctccccatctacactgcaacttgtttctctttcccatctcagaaacagcaacaaatctcccttcactaagaggtccttcaccagcctcctctcccggcattatcccatctacccctccacattcaagtttttggaaagattctacactcccagtctctacttcctcacttcttccttgctgcccacgccataaactagctgctgcctccagcattgccctgacacctagtggctggtgtcaccaagacgctagacccaatggttatttatttatttatttacttattttgagacggagtctcactctgtcgcccaggctggagtgcagcggtgccatctcggctcactgcaacttccgcctccagggttcaagtggttctcgtgcctcagcctcccaagtagtttggactacaggtgcctgccaccatgtctggctaatttttgtatttttagtagagacagggtttcaccatgttggccaggcttgtcttaaactcctgacctcaagtgatccacccacctcggcctcccaaaatgctaggattataggcgtgagccaccgcacccggccaatggttgtttttcaggtcttctcttgcttgacttcccagagggatcccttactgttgcacctacccttctgggaactctcttcctctggcgtctgtgatatttccctctcctgctggctcctccctctccagatgctgtttctcacatctactctcttctagagagtgtggtagacagaataatggtcaccaaagatgtccctgcatgaatccctggaacttgtgaatatgataggttaaatggccaaaagggaattaaggttgcagatggaattaagctgaccaatctcctgattttattttattttattttgtttttgaggtggagtttcgctcttgttgcccaactggagtgcaatggtgtgatctcggctcactgcaacctccgcctgccaggttcgagagattctcctgcctcagcctcccgagtagctgggattacaggcacccgccatcatgcctggctaattttttaaatttttagtagagacagggtttcgctatattggccaggctggtcttgaactcctgacctcaggtgatccgcccacctcggcctcccaaagtgctgggattacaggcg

SEQ ID NO: 1243517 - DNA, 4001 bp, Homo sapiens
aatatcacgttaatgaaagaactattttaaaaatgatgacatggcatacattgacaactgaagtagagagaaataaggatgatgagggcatgacaacttcaaaatataatttgaacaccaaacggctctaacttcatttccaatacatatccccaagaatcctctgatggagcacactgaacgttttggcttcatctattagcaataccttttctttccacctggagaatttctttccaccctctttatagtctcagttcacgttacttcctgtagtccttcccaaaatccccaggcaaaactatccctccatgaccccaaagcactgagttgacaatgttagtaaagcaatccacacactgtattacagttaagttctacaagcgtgtctcccccagtagcctcttaagttcgacattggtacccagggccacagtccgtgacactgaaggcacacaagatgtttgatgaattgaagtggattctggaattttagggctgggaagggccaaaggggccgccaacacttgctttcggatgcaaaagtgcgacaccaagaagactaagcgagctgcctaaattatagacagtgactgtgaaagaacgaatactcaagtttcctttcccaataaaattcatgaggacaagactgtgtgtctggctgattgctcccaactggttcacccaacaaagaatcggagtgtgtaatacatcctcaattaagtgttttccattacaaaacaatataaatgtcaatccataaacgctggaaacacacaaatcctaaagttaaattttgcgccggtcttgtatcaattcccaattataaaaatcctgagaaacaggcaaaatcaccttgtacggcaacacgttatatgaaaatagtatttgtaaaacacttaatcctttctggcattaagacatttaaagtgaaatctgtttccaggcttacagatttacagaagcctatctacacagagtgagtaaggtaattaaagcggacatacagtatatactcaaaaaatttatttacacagtgcaggctatgttaaacgctaataaaatgcaagtgacaacttgcctttgtgggaaccagacacaaagattcacattttgaggaagttcaagtttaccggccaacagccacaccacgatttgctgccgtcatagacgggccctaaggagaagtactgcttccagcaagtcaaatacttggattttatcaatggcgagacaaaagaggcaaggtgcgcccaatgcacaaatgctaaagtaaacaatcagtctcctttgcgaccgtcaggattagaagacagcctgagtccttccaggaaattcatgtaagcaggtccccagaactcgctgacaaacactgcagccgaaggcgggtatgaggccaagaaaggccaaggaatcactgcgacccctccaggagggcgtggggacggccgagcacaactaggcacaaaggtagaaacgcaacatctgggcgggtcccggcgccacctccgagtctcagggcctccacgcgccccgggggccagacgctcagacctaggactaccggtcccctcgtggtaggcaggtgaccgattccacttaaaggaggccgcaggccttcatggaccccaaagcctacatgccaagtcaaccccacagagaggccgccccgtctctcagcaacggccgcagccaagagccgccgcccaccccggcccggatcagcctgcccgcggccttcctcctgctgtcccctatcccgcaggccaaatcgggctggtcttaatcccgaacggtctgtggggccccttctccactcgctggagtgcggggcggtgggagagagcaggggctacaaggagggtcgacccaggtgccactgccccctcagcactcaccatggcgactccccagagcctgcagcaagcagcacccgccccgcgcgtagcctcccgcggtcatgtgacgctgcggcccctccaagccccgccctctctagccccgcccccgggccctacaggcggctcattgattggcctacttctaggaacccgagtctcgcgtgcttattggccctgtcacttaacgctagatggacggacctgagcgccagccaatctcaccacagcgtgcgagagtgggcggagcagtgcagggcagtggggatcgcccggcggcaggcaggagacaacaggagggaaaggcagtgtgtgatgagtttgtcaagaaggaatggaaggagggggagccgacaagtccacgttcaccgcatctgcgttggcgattgcgctattgatgcgcatgcgcaaaaggaagaccctgattggtttgtgggacggtctcaacgtcctgtcctaaccaatccagatgcgccgggggtggggcctggctctcactggccggtgcagcctttgcgcgcgggtttcgttgacccgcggcgttcacgggaattgttcgctttagtgccggcgccatggggtcggagctgatcgggcgcctagccccgcgcctgggcctcgccgagcccgacatgctgaggtgagttcggccgcgcaagaccagggctgggcttccgcctcgcggccctgggccctcaggtgaggcccgcgcccttcccaggcgacgggcggcgggggagtgacggggagcgctggggccgggcggggtttagggcctacttcaagaaaaacttctcggccgtgagcttgaatgagatggcaagaagggcgatagcaaacggcgatggcacacgtccctgggaacagccagccctgtccgtgggtagaaaaatgagccagggagaactttccgttcattccgccaacgcctactgcagtcgggtttatagcggggaacccgacaacgaggcgcagaccccgctgtctgtaagggcgaggactgtgtagaccttaaccgggcaatgctcctgagccactgggcttggggtggagcgcggcctagcggctgcctttaacacaaagaaacaaacaaaactcggaaaagcaggcgccgttcccgctgaggccggattgatggcagatgctaggcgaggaaagatatggcaagagcagcccaggcaggggcgacagctcctgtaaaagcgttgagatgggaagcgggatccggggttcgaaataaagccattgtagctaaaacgtggagcagtcaggcgagggaaggcaaggaaaacagcacttaaaagatttgaagacaaacctgcaggactcggtagtcatttagaacagtggttctcaaaatgtggttcctggaccagcaacagccatatcatcttgtcacttgttagaaatacaaattcttgggtcccacctcaagcctgctgatcagtaactcggcctgggacccagtaatttgcaagtccccaaggtgattttcgcctaccatcaagtttaagaactactgatttaaaggaaataggaggaaaggaggaaccctggtctaacctgcctgtctctgatagttcgtgcttgttccagtaatggaaggaggaaagaagggtaatttttttgtcaaaatttaacttccttttgcctgaaagcatttgagcacagtgatgtttggagtcagtgctggttctgtcttcctctcaccagaggatatgaccttcattcccagccccagataaacgagccacaggagttaggcttagtgtgaagctaaccaggctgtattcattgtttaccaacgtgttgagcaaacttctgaataagttgtagcgaacacactgcccttttaaccaggaaagcagaggagtacttgcgcctgtcccgggtgaagtgtgtcggcctctccgcacgcaccacggagaccagcagtgcagtcatgtgcctggaccttgcagcttcctggatgaagtgccccttggacagggtaagtaggtcccaccgaatgtctgaataatccagtgcaacattgaagctcttttaacttttggttgaactaaaccctagtaaaaactcttgttttagaattgtcctgggtat

SEQ ID NO: 1243518 - DNA, 4001 bp, Homo sapiens
tggaggtgatgaaaatattctaaaaagtgattatggtgatggtcacacaaccatgaatatactaaaagcactgaattatacactttaaatgggtgagttgcgctgggcacagtggctcacatctgtaatcccagcactttgggcggccgaggtgggcagatcacacttgaagtcaggagttcgaaaccagcctggccaacatggtgaaaccccgtctctactaaaaatacaaaaaaatattagctgggtgtgatgggaggtgcctgtaatcccagctacttgggaggctgaggcaggagaatcacttgaacccaggaggcggaggccgcaatgagttgagattgtgccactgcactccagcctgggtgacagaatgagactgtctcaaaaaaaaaaattaataaaaacaaaaatatataacgggtgagttatatggtaagcacgcaagttataccttaataaagctgtgtttaggccagacccgtggctcacacctgtaatcccagcactctgggaggccgaagtgggcagatcatctgaggtcgggagttcgagaccagcctggccaacacggtgaaacccggtctctactaaaaatacaaaaattagccgggcgtggttgcgggtgcccgtaatcccagctactcaggaggctgaggcaggagaatcgcttgaacctgagaggcagaggctgcagtgagccaagatcacaccactgcactccagtctgggtgacagagtgagactccatctcaaaaaaataaataaataaaatttaaaaataaataaatacacctgtgtttgaaactgaaaaacattctcggttcacgggccataaaaaacctgcctgggcagacgggatctgcggcttctgctggtggtacggtgggatctggctatggactcttaattcctaacctggtaccccaactcattccatgtctgctcctacttctgccctcctccacctccaggtctctgaatgctactggaactctgatgtcccttcttccatgaagtcttgcctaactctcccaggcactttgttggctgtcacttaatggacacctactatgtgccagacatacaagaatgctttaccgtaattattcaatttaaagctatcatcacaacaacctagagggcattaccccattttacagaccaggaaactcgagacccgaagatgaaaaaaaaaaactagcccaaggtcacttgctggtgagtggcagagctgagattcaaaccccggaatgaggcctgagcatgttgatctcttctggccccgcaggactgacagcacctagagggtgggtcagttgttcacccaggtggcgccatcccagcaccaccctgcaggatctagggaatgaatgaagggtcgctggccgagaagaggaagtcgaagattggggaaggggccggggcttgttcgaagtgaggtcgagggacttccaggacccgggacaggagaggagggagcgagacaggagaggagggagcgagcatcgctgtctgaacgcccagccggaccccgggccgagcttcctgagggtgcctgtgcggctcgggtgaggctgatccccacggcggtaccggggcgccggctacacgaagcggccctggggctgggccagccgggcagggccggaaggcctgagggtggagatgccacccggctccgagcgcgtggaaacagacacgggcggaagcggcgagggggcggccggagcggggtcgcgaggccggggctgggaggcgcccacctgaccacccgcccgccgcccggctctgcggcccgcaggccccgctgccttcggcctccgaagtcgggccgggccgcacgaagtacctggagggttgacgttgtcatttcatctcctgggtccgccccacaccccgcggcgctgcttgcggcctcggtccggccccggggagccgaggtactgggtccggcgcgggaagcccggcggtgggcgctgagcgcggtgcgcgggcagggcggccgctcgcagcgggagccgagtccgagggcaagcgaggagcgcagcccagagcggtcgggcccgagccgagcggctgccccctagcgtccacggctcgcactgcaggcacctctccctgcctcggcgaaggcagggggcggttcgagaggcaggactgactggggacgaggaggtgggactagggcgagacggacagggggcggggacggggtgggtgggacaaggccggggcggggcctggcgggacgtacattctcggggcggggccaggggcggagcggggtagaatccggaaatcctgacctcgcttggaataacagcgcccattgagcagttttattctcacaataaaacgaacttatcagagcgttggtttctccatgtttaatatcgcacgatcataattagtacctgccttgtctggcttttgtggggaataaatgagctagctaatgtaaacagagtgtgccccacactggggctcaatccctggtgggatgccgctgactgttcaaagccagttttgttttgcttggattgattgactgattgattgatacggagtcttgctctgtcgcctaggctggagtgcagtggcatgatctcggctcattgcgacctccgcctcccgggttcaagcgattctcctgcttcagcctcccgagtagctgggattacaggcatgcacacctactgtgtgcagcgttgtgtgctagtttctggggatacaatgatcaaagcagttctagggctgggtgtactggcccacgcctgtaattccagcactttgggaggccaaggcaggaggattgcttgagccgaggatcaagaccagcttgggcaacatagtaagacctcgtcgctaaattaagaaacaaaacaaaacaaacaaacaaaaaaacgcaccagaggcaagtgatccatttgtccacaagtctatcctgtgagagaaaaaaaatggagggcaaaaaacatccaagttgaggctgggtatgggggctcatgcctgtaatcccaacactttgggaagccgaggcaggccgattgcttgggccgaggaattcgagaacagcctcggcaacaggtgaacccccatcgctacaaaaaataaaaaacgtatctgggcatggtggcgcacacctgtagtcccagctactccgtaagctgagttgggagaattgctggagcctgggaggtcgaggctgtagtgagccgtgaccaggccattgtactccaccctgggaaatgaagcaagaccctgcctccaaaaaaaaaaaaaaaaaaaaaaaaaaaaaaaaaaaaaaaaaaccaaaaaattggcacaccttaatctctcttcacaaaatgctaattaaatacaaaggagaggccgggcgcggtggctcacgcctataatcccagtactttgggaggccgaggcaggtggatcacttgaggtcaggagttcaagaccagcctggccaacatggtgaaaccctgtctctactaaaaatacaaaatattcgccggccatggtggtgggcacctgtaatcccagctacttgggaggctgagacaggagaatcgcttgaacctgggaggcggaggttgcagtgagccaagaccacgccattgcactccagcctgggcgacaagagcggaactccatctctaaataaataaataaatacaaaggagaaaacaatgaggacattagcttgactacgcgaccgaagggaacacccctggtggtgggatgcgtggccctcgtgtgtctctccacatgataccctgaagagagcatggcatcgtggcatctctgccaagagtgtgtgacacagcctggttgtgaggcaacaccgaatagagccagctggagagctgtgctgaacaatcaaagccttgtgctgagactcaggcacatgcgaattagagtaaggccgaggaacattccagactgaagaactgagacacgacgacaaaaggcaagaaagtggtattggccaggatccaagg

SEQ ID NO: 1243519 - DNA, 4001 bp, Homo sapiens
tacaggcgtgagccaccgcgcccggctggctgagccgtacctttagtggtttccacttcttctagtaacacctgggagatatagtggatgctcctcaggtattccgtgtatgcctcctgtgtccaggaaagagaaagagtggggtcaggccagtggagggaagtgactccattattccggccaggtgcccttgtgggataagcaaggaacaccaccacctgcttatctctgagatacacccagagacattgagcctgcggtggttagctgcagccggaacacggttttctgcgcagggcacaggcagcatcgctgctctccagacttggaaaagacatcaggacctgagagagagagagagccagggacgagctggacctcattttctcctctgactgcctttctctccagcacaggaactgatattctcattcagtgggcctggggaagtgacctcagcagtttgctgtcatttttcattctatgcaatgtttccttcttgtgcaactcaagggtgattcattcagtggcttaaaaaaatacttttctgagaggataaagggagtgatactggaagttttcaaatcacttcccggtttaagttccgagaaatccctttcccagaacctgcgagttacgtatttccagtgcacacaggagcctagaactgttacctttcaaggctgtgtgacccctctgacaaggcacaggtcattggaaccacagaatggtggtttgttttgttttgttgagacagagtctcactctgtcgcccaggctggagtgcagtggcaggatctcgagtcactgcaacctccgcctcctgggttcaagtgattctcatccctcagcctcccaaggagctaggattacaggtgtgcaccgccacacccagctaatttttgtatttttagtagagacggggtttcaccacgttggccaggctggtctcaaactcctcacctcaggtgatccaccgcctgggcctcccaaagtgtcaggattacaggcgtgaaccacagcgcccagcaatatgctatgtttttttgttttatccctagctgttaagtttcctatctttaagtctatgcctcagagagaaagacgaaatataatccaggcaggatttctgacttgcgggggcacctgctgccctaaaaaccaacttggggaaagcagcagattcaggaacgaggcttctcctaggcacaggcaggctccttccctccttgggcagccgggtgtggctgggccagcttctctacctggtcgccaaccttagattcggccccatctcaggaacgggccacacccctccggcctgcttttccttcctaagacgactgcaaacagcatcacaaatgagcaggtatgtggccttctctgcatgccgtcccctgtggcaaccggattaaatctaccatctctgcccagaaaaatgcacgaacgcacggacctgcccgtcactcggattttggaaggtggcctggcggaccctcctgctacatctcctctacaggtggagcccaggctgtgatgcaccggctcagcgagcggagtggaaagccaaggtccgcaggatctgagctgtccaaggtcactgcacgcccggctgcgccccgcccccgtcctcgcccgggaaccgcggcccgggatcccggctggcgcccgctcccaagtctccagcccgagccggccccgtcctcgccctccccgggcgggggtccctccaggggccaccctcagcggccaagccccgcccccgccccgcctcacccggggccggttgccggtgtccagctcgatggccccgttggcaagcttcatggcgctctgcagcggcttcaccgtgccgtccccggccgcagcggccatggcgccgagcgggggaggcggcggcggtagccgaggggctggacgggcgaccggaggcccggaacgcagccggcgctggtgctggagccgcccgagcagcggaccgcaggaagggacgcggccgcacttccggcgacgggccccctccgcgcgtactgcgggccccacgggtgttagtggcgggggcggcagagtccgggtgggttgtcgcgacggagccgggcctcttcgccgtcttgagacggggctggcgagaagggcccctcacggagttgccatgggcgtctaaccgcggcagccaggcccctctctacgtgagaccccggcccccctcccctttctgcagcccgcccgccacctgcgcgccgcgtggcctccgccggcgcctgcccgccccgcgcctccgtctcccacggtaagaggcggtgagggccgcgtcgcctctccctggaggactcgtcgtgaggtgtcggcgagcccctccgcccaccgccccgccccaggccagcgctccattggcgacagaggcgggcacggccgccctcgggcccgagaggggagcggtacgagcgggggcgctggcaccgcgggtggaacctcggccggcggggtcccgcccctggcccctggcccgccccgcccgcctcgctttgcttctcgctccgcccctcccccgccccgcctcgcttccagcgcgccgagcggagcctaacgccgggtcctctaggaacctcgggccgggcagcacccgcgggattctgctggcgtcctccgctgccatgaagcgggaccggctgggccgcttcctgtctcctgggtcgtcccgacagtgcggggcctcggacggcggcggcggcgtcagccggactcggggccgcccttcccttagcggtgggccgagggtggacggggcgacggcgcggcgcgcctggggcccggtggggtcctgcggggacgcgggcgaggacggcgcggacgaggcaggtgggtccgcggcccgggcgtggcgggttggggtcgcggcaggggttgctcgtgggaggagccgcactgacgcccggaagccggcgcggcctctcctccacccggccaagggcgtagcggactcggggctgcgtcgggataggcgctgggcggccggctcggttttcctcgcgctccgtgacgccggcgtcgccggcccggcctccccggccgcgggctcggccagaagggacccggcgtgaggagcgctgtcaccgcgggcaggtcgccctggggtgcccgcgcgtgggaatcgccctcccctgcttcgtgccctcgcggagccggaaaggaggcggcacctgcaattggcagacaggaaaccgcggcgtttcctggagggcgcagcgcctgccccgggtctcgcggtcgctgggaggagggtgcagttccaggtttcactcttgaagttgcttcgctggagaggccttagaggcctttgaaatttgaaagatttcttggaccagcggccacatcccccacagggcggcttgtcccgccgagagccgcgcgcccgagccgcttgctgtgtccgggagccgcgcgaagggcgctgcaggcgctgccctcggacctggagtccgggacgccctgtgctcaggagcctcctttgccagctgctaacacttcctgccgctctgtgcaggagcaggccgggctctcgccatgggtcactgtcgcctctgccacgggaagttttcctcgagaagcctgcgcagcatctccgagagggcgcctggagcgagcatggagaggccatccgcagaggagcgcgtgctcgtacgggacttccagcgcctgcttggtgtggctgtccgccaggaccccaccttgtctccgtttgtctgcaagagctgccacgcccagttctaccagtgccacagccttctcaagtccttcctgcagagggtcaacgcctccccggctggtcgccggaagccttgtgcaaagtacgccctagtctgttcagagcacgttcaggctgtcagtactgcagtgtgacgggtgttgagagagggacagggcgtgcctccgcgggagcctctgggtggggggaatgggccatgcccgggttcagtgccaacagccctgggactgttgtg

SEQ ID NO: 1243520 - DNA, 4001 bp, Homo sapiens
caaccaaaaaaataccagctaagacacagcaagtgagagactctgaataaagttgcaacttagagtgtgtgttcttgtgaaatcattaaattaaacagcctaataatggtttggcaacttgcttttctctttcaagtctttaatcttttattcagaggatgctttgttttctgggaagcaccaggataatgtggcaatgctttaaaaaaaaaaaaaaaactggctttacttcagcaagctttcctgggagactctaatggcagagactgttgaaatagaaatgcctcatgaacactggccgccccatagtgtctcacttccctctttccagccagtgattaacagctcttaatgaattcagaggactgcatggctagattctggggtgactggtgcaggctgatggagaaggggttgaactgcataaaataaacaaaacaaaatagtgctccagaaaaagcacggggccgggtgcaatggctcatgcctgcaatcccagcacattgggaggctgaggcagggagattgcttgagccaggagtttgagagtagcctagccaacataacgagaccccgtctctatataaaaaaaaaaaaaatacaaaaattagctgggcatggcagtgcgcacctgtagtcccagctactagggaggatggggtgggcaggtcacttgagcccaggagtttgaggctgcggtgagctgtgatcgcatcgctgcactccagcctgggtgttggagtgagactctgtctcaaacaaacgaacaaacaaaaaagtgctgaacctttggtttcttcatctttagaatggaatggggataacagtaactgacctgcctacttcaatgctgttatcaagaggatcaaatgaaattgagaaagtagaactgctttgtgaaatatgaagtactatacaaatgtagaataccataaaatatgggctgcatcttcaagcacttcagcatatgacacaaaaacaatcatgtgtttcatgaacatttatagagcactcactgcgtgccagagagaacgggtgctggggagatagacatgaacaggacgcagccctttccctcaggcctttgctcaaatgaaatcttattagagaggtcttctgtgagtaccttaactcaaacagcacctcctccacctggctttgtctttccccacagcatgtttcactatatatattcacttatttacttaacagtaaatacattctatatatttgcttatctacttgttttaaattttctatatatttagttatttactgtctgaacccccgcgcacccctcctacataaacatactagaagtagatccatttgggccgggacttagtaatgttcacagctaggacatttttgcataaaatagagtttagaacacagtagctgctcaaaaaacatttgttgaataaatgcactcagagcaggtccagagtttaggcaaaggtgagctgaattaccctgggaggtgattgcaggagaggaaaagaacaaccaggccatggcagatggcattttggtccaagggagagagggaaccttgattattgggtgaaaataataataataataataggagtctttcctgaatcccatttgctgtccccagggaggaaaccactcctcctgtggaagtcctcctgtcgctgccccttcacttggtcatatggagttgtcatggcctgtctcctagaccggctccatgacttccttgtctactggcaccccagcatttagcccaatgctcggcatgtagggagtggacacttcacaccccaagctccctcgatcttctcactcagtccagagcttagtatctggcctccccgacaccctctcaccacccctgtcaacccttgtgatgctcaccctcacctgtatttcttcatttatttctccatctttgggagaagggctcctggcactccagggccttacttctcctggatctcacttctggtttctccaagctcctccaagcaactcagcagcgaagcttgccctgcgggaatgtgttagctggtctccaaggtaacagactgcaccactgcagctcggggcagggaaagggaaaaccttcctcaccccagggaagaagtcaccagctgtgttgttgataaccacttctcccaggtcactctgcttttctccacctcacaaaaacctggaagcaggatttagacctcttttctaatttcagaacctctcagtcagcacagaactatggtttaggccagtacagccctggtgcgtgcctgtggccttcctgtggtaggaacagaggagaggttccagagaactctgccacatgtgtcaaaggtggtaactttctcttccttctcagattcccttgggttccctgaacacagtccctgggagaggtcagacagtcccctatccctacccggtccagccccacctaaacctggctaacacagccaagctcagtgacctcttcgcatcagaagagatcatctgccacagtggttcctaagcccggatgcccatgagaatcacctggattgtttgctaggaaaacattcccattcaggagattgattcagaactgtgaaaaggtgtgggaatgtgactttttaacaatggccccaggtgattatgatgtaactagtccttggcccatagctgggaatctctccaaacccttcttttatagtggtcaagagagacaaagtgatgtcaccaaagtcaaccaacttgtaagtcgctaaaggatctgtacttagtttttcatatccaggtcatttctcaaatcagttttcactttctgagaattttataagttttataaacttgtaagttttatcagttagaacatgaggttgggtggtggctcatgtctgtaatcccagcactttgggaggctgaggcgggaggactgcttgaggccaggaatttgagatcagcttgggcaacacagtgagactctgtctctacaaaaataaaataaaataaaaattagtcaggtacagtggcttgtgcttgtagtcccagctacttggaaggctgaggtgggaggatcgcttgagcccaagagttcaaggctacagcgagctatgatcgcaccactgcactccagcctgggctacagagcaagaccctgtctcaaaaataaagaacatatgccacttgtggtagtcatcatatggtagggaacacccttcagatgttgaccccagcagccatgcctataggccaggtcagaaacaaccaacgtgctcaaaatagaaactccttatcaaccactggtcactggggttgagagcaccatgtataagaccacagcatttgttatgtggccagcaccaataaggcagaaaatgaggaagatcagaaagaggtaagaaggtcataagtggctgtgagcaaccaatggctactcggtgaacaagagatgagggtccttgtgcccatcttgatggaaattttgggtggaaggggctggctaattttgacaacatttttttttttttaggcacgggagccccaagcaggtcgtctaccaccctcacacctttctttgcttcctgcatacatgggttttcaacactgtgcatagaagtaaagtccaacactggaaactctttgttcctgctttcttgtacttgagcctacacaacacacattctcaatagatctctgccaggtggataaagcagagtaaggctttcagactgtatgactcatcaagaggaaagctgtgtgggtaccatctttcttggctcccttcgggatgcagatcatgatggcatccatggaaagcatcagagcacaacagacatttctcctaccttaggctcttggaaatggatcagggtcagctcatctctggtcttttatttaggagctctagcgtggtcccatccaggaatatggtgggatatatatttcagatattaatttgttttgttttctttctttcccccatttcaaaccaggagcaggtgctttgggttgtgttgagaagcagt

SEQ ID NO: 1243521 - DNA, 4001 bp, Homo sapiens
ccccaacctcccaagtagctaggattacaggcgcgtgccactgcgcccagctaattttttgttttgtatttttagtggatatggggtttccctgtgttagccaggagggtctcaatctcctgacctcgtgatcggcctgcctcggcctcccaaagtgctgggattacaggcatgagccaccgcgccctgccaggatctgtcttaagtggcctgaaaattctctgaggcccctgagggctccgccttgtgcttcatacctagtctcctccaggtgaacaagggagagctggctcagggcagccatcggggagctgggcctgttaggaaaagggccccagggcactggacagcaaacccacctcctctgcctccctgggccaggaaacctggaagtcctggcagacctcctgctatgaggcagcctctgtagctccgacatgagggaagggagtcagtggctctctgctcaccacccaggctggctgggagaccgctggggctctgccctccctcaccccacacctagcctcaatttctgctggtctcatctcttgcctcttcccacttgactgccctggctcacatgccgtccagcccaacttgccccatccctcccctgccgattccctttccccctgaggaagccctctgggagtgatcctgagggcctctgatgcacggagcccttttccgcctgcatggacaggctgggcaccggcagagacgcccacctgccctgacctgcctctgtggcctcacccgagaaggtgctgacagagtcctttctgcggaggtcaaagcacttcatgaagccatcctgggagccactgagcagcacgtgggcttcggtggggtggaagcagactttgtttaccgtgcgcttgtgttctgtgaacagctggtcctgcttgttgcgggatggccggcccaggttccacgtgaccaccacgccattggtggctgctgtggccagcaggttctcatccatctggtgccagaccacgtcagcacagctcaggttaagcgaaggcttgcgccccacacgcaggttcagcttttccacgaactgttcctcctcgatggcatagatcttgaagatgctacggcctgccacgaccacctgggctgcgtcgcggcacacactgatggcattggcgggagcatccaggtggcagtgcatggtgcggcctgtcagcacgctgccacccagggctgtggtcacacgggacatcttctccatggctgcacaggtgatgaggtcaggggtcaggaggtcagtgaggtgggctggcctggtcagcctgggtgggtcatcagttcagaccttccacccaggttgggaccccagaactgcttggtcccgggctggtcagtcttagtgagccaatccagggctgtctatcagccaatcagcctgacaggcaagctcaaattcactggagtctgtcagtccagcccatcaccctggctgagcggtgaggggacttcctagcttcccttaggcctgtcagtttcatgtctgacttccacggaagactctagctggacattcccggcccaggccacctctcggtacccccatcagccagatctgggcagtcactaaacgctcggtcagtcaatcccagcaggggagcgaggagactcccgccgtccacactgtcagccctgagggcggcggggctctagggaggaacaaaagaggggagggaacagagggctagaggggcccggggactcaggcgatagacgcgggaagggcccagagggacgtcaaggaccgagctacttaaggagctcgaggtgtctggcgggaccggaggcaggagagaagccggcgaccccggagtacagggttcctgggagcggcgcagtggcgcgggggagcggacgctgcgggacgagaaccagagggcccggggcagcccttctcccccgcgcgaaccccaatcttttactaaaagcgcacggttgtccggaaccgccgcgccggaagccgctgtctttcccgtccctcgccggaagtggtcctcttcttacccatccctctcaggaagtgggcacaaactctcgcccgacaccacgaaagttccgggtcagggagctgcgttggcagaggccaggaggggcccgggattggggtctgcgggccgccctgggcgttgccattgcgctgcggtgctgtgcttgtgtgattggtttatttatttatttatttaaacggagtctcgctctgtcgcccaggctggagtacagtggcgcgaccttggctcattgcaacctccacctcccaggttcaagcgattctcccgcctcagcctcccaagtagctggcactacaggcgcccgccaccacgcccggctaatttggctaattttgtatttttggtagacacggggtttcaccgtgttggccaggctggtcttaaaactactgaactcaagcgatcctctggcgtcagcctcctgaagtgctgggaatgcaggtgtgagccaccgcgcctggcctgttttttaagtctcaatttcagtattttaatgccatcacctattttaatccccaggtccatcatgacatctggtcatccctagacaagttccgagtgcccccagtcttcccctccttcctcactcctcgacctcgggagcagcctcccaacggctttcctgggtccgtctttcccctttgatcagaaacccgcacagaagtcaggcaccaggtcttctgcctgaggcctctggcagctcccactatgctgtgaatgaaccccaactcctggcctccgccttcccctgcccacctccagccatggcagcctccacccccattcccagcccaccaagccctttcctgcctcagggacattgtacgtgcgtgcgatgcctcctccacagagcggacctccctgaccactgccctaatgggcttctccatcactgtggcctccacggcacttgtcaccacccattcgtttgtttactggttgttgtcggtcacatacgagtgtgaattccaccaaggcaggaatcacattctggctcaatccccaccgaatgcccagtgcctgacacacctgttcaaccagttgctctcgttcttttttttaaaaaactttttgagacggagtttcgctcttgttgcccaggctggagtgcaatggtgcaatcttggctcaccgcaacctccgcctcctgggttcaagcgattctcctgcctcagcttcccgagtagctgggattacaggcatgggccaccatactgggctaattttgtatttttagtagagatggagtttttccatgttggtcaggctggtctcgaactcccaacctcaggtgatccactcgccttggcctcccaaagtgctaggattacaggtgtgagccaccgcacccggtctctttaaaattttttgagacggagttttgctctttcgcccaggttggagtgaggtggcgcagtctcggctcatagcaacctccaccccctaggttcaagcgattcagcctcagcctccctagtagctgggattataggcaaccaccaccacaccctgttaattttttgtatttttagtagagacagggtttcaccatgttggccaggctggtcttgaacgcctgacctcaggtgatccacccgcttcggcctaagtgctaggattacaggcgtgagccactgtgcccagcctcagttgcctttttcgacctctctgtctctcctgggtgtgagccattgtctgctattggtgcattttgtaatcttttgcgacatccttgtccttgcctgttactgtgtatagaacagggtttatttctgcctctctggaagggtgggctagagtctggatatgttggagggaatattatgtgtagtgacttcagtgttgtctctccctttaaggaatgggaggtcctctgccttccatgtagtcactgctgtttccattctaccatgtcggcatccagcctctacccctttgttgcaagaaagaataaat

SEQ ID NO: 1243522 - DNA, 4001 bp, Homo sapiens
atcgcctgaggccaggggttcaagaccagcctgggcaacacaaagagactctgtctctacaaaaaataataggccaggtgtagtggctcacacctgtaatcccagcactttaggaggccaaggcagatggatcacttgaggccaggagttcaagaccagcctggccaacagagcgaaaccccgtctctacaaaaaatacaaaacttagccaggcatggtggcacgtgcctgtaatcccagctactcgggaggctgaggcacaagaatcgtttgaacctgggaggcagaggttgcagtgaaccaagatcatgccactacactacagtctgggtcatagagtgagactctgtctcaaaaaaaaaggtaaataaatttaaaattgaagagaatcaccaagacactgtcctaggtgctggggaagaggggatgtatatgaccggttcagagctacccactatgagtaaagtagtccaatgagctaaacaagggctctggggtaggatccagcatccaaatcccaatgctgtgtgtgccacacatcctcaacatacaaccacataaaatcttcactcgaggctgtgctcagtgaatcacacctgtaatcccaacactttgggacgctgaggcagggggttcgcttgagcccaggagttccataccagcctggacaacatagggagaccccgtctctacaaaaaaaaatgaaaaatttagtcgggcgtgttggcatgcgcctgtagtctcagctactggggaggctgaggtgggaggatagcttgagcccaggaggtcgaagctgaactgagcggtgattcacgcctctgcactcaagcctgggtgacagagccagaccctgtctcaaatgaagtaaaataggccaggcacggtggcccacgcctgtaatcccagcactttgggaggctgaggtgggtggatcacctgaggtcaggagttcaagaccagcctgaccaacaaggtgaaaccccgtctctactaaaaatacaaaaattagccgggcgtggtggtgcgcacctgtaatcccagctacttgggaggctgaggcaggagaattgcttgaatcccggaggcggaggttgcagtgagccaagatggcaccactgcactccagcctgggcaacagagtgactctccatctcaaaaaaaataaattaaattaaattaaatagaaaattaaaaaataaaatctttaagccaatcttgtaagtacgaccatctcccttctacaggtgagaaaactgacgtgtacggagtgatgacagggtaggggctgcgggattcgaactcgggcaacacgtgcagtgtcactcctatccactacacggtattttccagtatgatggcattaagaaccacttaaccgcgtagacgctgcaacaggcactttgcaaacagtgtttcatcgaattcaccccaacagggttacgtccacgcagctgagacttagaaaagtcccgcgacttgccttaagtcgccacacgcggctagggcctcgggaagccgtcacgccctcgctccgtaccctgattgtgggaagcctcccctcagcactcacgatgcgcagtctctgcctcagtgtcacaaggcggaccccactcccctacccgcgtagggagccccgaaactccgtccatgctcgccccgattgcccccgatggtcgtcttccctcccccgacggggcctaagaggtcggctaagccccgcccacctcctcagtacggggcctagggtctccccgtagccccccgggacggaagcagccgcgtgggggaggggaagcggggaggacgcatgcccagagggctccactcggcctctagctcacctgggagtcacggaactctacaaccacgttttcgctgctccatcgcgccgccatctcccccgcccggccgccgcggccccaggacggcgccctcccaccccgccgtccccagtatcccgggaccgtgcgccccacacagccagagaatcagccccgacacgccccgtgccctggttgctcctgagctcaagccattggttgacccaagcataggctccgccccttcttcctgggtcctccaattgctacaccgcgcctgcaacaaacaggcacgccctcgctcacttccgtcacttggtttgagtcacccacgctcctcgcgattgcgggcacaccccctgccgcgagctctgccgggagttgtagtccaagctcgagcaagcgtgggtgacctgggaagggctcgcaggtttgggtttgggtgaggtgaggtgcctgttgtcctgactagctcctcgctggagtccccagcattcgtccagacccagtctcaaatcaaaatcaacgttcggggcgggtgcggtgactcacgcctgtaatcctagcgctttgggaggccgaagtcaggagttcgagaccagcctaaacaacatagtgaaaccccgtctctactaaaaatacaaaaattagccgggtggcgggcgcctgtaatcccagctacttgggaggctggggcaggagaatcgcttgaacccgggaggcggagattgcagtgagccgagatcacgccattatactccagcctgggtgacaagagcgagactccgtctcggaaaaaaaaagaaaaaagaaaaatcaaagctcgtgcaaaccgaagatacctcttctcctgatgcctatcccatcgagatatttaaaagtctgaatgtgcaatttattgtttcatacaatacagcagcgcctcccgtaacaatgaaggtagacttaaatgtgagaatccagctgttttcttgatctgtagtccaatgctctacctgtgagctataccccctcctgcaatccagctgctttctttccttttctttttttttttttttttttttttttgagacagagtcttgctcagtcgcccaggctggagtgcagtggcgcgatctcggctcactgcaagatccgcctcctggcttcacgccattctcttgactcagcctccggagtagctgggactacaggcgcccgccactacgcccggctaatttttttgtatttttagtagagacggggtttcaccgttttagccaggatggtctcgatcttctgacctcgtgatctgcccgtctcggcctcccaaagtgctgggattacaggcgtgagccaccgcgcccggccgctgttttctgataaaccaaacattaaaacagatttgccagaattttttgttgtttttttttttttttgaaaatattgttctttttcattttaaaatgtattcatgtgaagggccttaatgtttaaatgaaataatgaatatattttttaaattctgtatactacatataaaagtttttgggggccggacgcagtggctcatgcctgtaatcccagcactttgggaggctgacgtggacggatggcttgagcccagaaggaggctgcagtaagctaggatcacattactgtactccagcctgggcgacagagcaagaccttgtcaaaaaaaaaaaaaaagtttttttgggattttcagtaatttttaacagcagtgtaaagggattccaagatcaaaaagtttgagaaccactgtactaacatggtgggtggtgattaagtttccttttcagtcccacactcttaaatgttgatttaactggtttagcttcagtttccctatagaagggaaaaatggcttacctcattggattgttgtaaggaactaagcacagggcctgggatgtagaaaagctcaactataaactattaattcagttctagaagccaggaaatcaataaaaataaaataaaataaactgttattgttgttgttaatattatcactatttgtatgtgcaagtcattgtatgaatagaggtaagaaagtgtggtctcttccctcctggagtattggctataagggggaagacagacttgttgacagattacggtgactaacttgttgcctggaccgtttcatgttttatttttatttttttggagaaa

SEQ ID NO: 1243523 - DNA, 4001 bp, Homo sapiens
cacaccactgggtcctttcccagccctgccctctcctaccgagccccacgcaccctacaggccttaacctgggtccccgctgaccccccagacccacctgcctcaggaggggaacagctcttctcaatcggcttggaaggcactttcaagctctcacttggaaaccttggcaggcagagggagagtcagtgtctgggggcccaagggccacccaccctcccaccaccgaggcctccctcgaaagaagcagaaccactcaccggacgtggatgtagcggtcatgccagctctctcccttgggcacagggaatgccatttcccgaggcataggagtcacgggcagctttgcccactgggccccagagatggctacaaggagcagggttgttccaggtcaagggaggctgtttagccacctgaacacagggcacccgccaaggcactgccacgccaccagcccagccaccgccccaccccagggctgcctctgggatgggttctgaccccagggctgcctctgggatgggttctggccagagctcagagacagcacagctcgagcactgtattttcccaagcaccctggacttgggcctctccagggctgagagcatgggtgagatatggagtggggagtgcaggtgcggccctcaccaggctcaaagcacaggtcactggtgtacaggttcctgaccagcaggctggcgcacagcctgatgctcttgagatggccgtagcaccggttcaggtagaccaggagaacgtcctgcagatcgagctgcaggcaggtccagcgggctccggagggggccaaacccaccagatctgcaggatgggcactcagggtcagcgcccaccctcctgacagcccgcgactcccagaactgtgagcttgtgcccccgccaggttgtcctccaggccgcagaggagcctcactgggcctgcaccaactccctccagccacctgtcctggatcatccacaccccatcttggtgtcacctctctgaggtgtcctggcctccaggaccaagggaaactggagccacgtggccgtagacttaaactccttgaagaggttggagaaagacacacggatgacttggttgtcctgtggggacggagcagggccgtgaggagacaggggccgcaggggtgccggggctcccacgcagcccccagccgcgggctccgtaccttggaggacacatcgaggtggatgacgaagtgcttgctgggcaggggccgaaagagcacatacaggtatcgtcccgtcagccccagagactgggtgctgctcttagggagctggatgtagttggcggcagagactgagccccgaatgcgatacacggcgcccttcagggtcttgtcctggagaagcgggagcccgcatcaccgacagcacccagaagaagtgcagcgggggcgagggggccctcgggggcggggcagctctcctgggggcagggcaggggtgtgggctccgggcgagcccccggccgcctaccgtgaccacggccacgtccccctgcttggcggagcgcttccactcgtccacccggaagtgtctgaagacgttgaggaacgggtgctgccacgctgcggggagcgggcgccgggcgtcaggggactcggccacgcgagccggggccactgcggggctgggccgggcctcggggaccaggcaggagccggggctctccgcgccttccccggcgacgccaacgccagctaggctggcgggacgaggccgggcgcccgagggaagccaagctccgggagcccgagggtgggcgcccggcagacgggaccctgcctgagcggggactctggcctcagggcctaggcgggggccctgagcgctccggccgccgaccctggaccccggaaccccggaacccgggatcctcgggacccccgccagccgcgcgctacctcgggccatggcgccgccgctcgagcttcccgcctaggcctccgcgcgcccagcgcagagtacgccccgcgacgccaggcaacggctgcctggcaacggtgccacttccgccattacttccgccgtcatggcggcgccctggccacgtgacctccccggtgggagtaccccgctcacgtcagcggcctccagggttgctccagccgcgaatcccgctgccctttgccccgcgggcctcccaaggcagccccctgttagcccgaccggcttcgaagcccgcgccggttgcggatcctccgccgcgcccacctgtcagcgcctcggccggccggggctcccgccgcatgcaagcagcgaggcgaggtcgcgctgaggcctggccatgccacggacggccgggcctcaccctgccgctctctcgccgtccagaggcccctgctccacacctgggtaccctgggtcctgactcaggtgggctgggtcatccccgtccatcagggaaggtagtgcgggcgcccgcggaggggctggttcccacgttcgtcctatcaggttccccacgtactccttcgcccagtgtcctgcggccgggcccggcggattcagaatgggacctggcgttctgagacacagccccagtgccggtagtggggggtggtggactgcactccggggccatttaatgtctttaggccttgagtctcggcttcggtcccagtcaacgccaacgggagaggaaagaggaaccaagtggggtccccagacttccaagcaaggtgggctggctaacgtccctcctacctgtcgcagggcagctgggtgagaagctaacggcttgaaggaacagggctacaaggggagtttgtgctgggcctggcgtcccaggctgtggactggaactggacatgagaaccccccctacaccctcccaagtcaaagacactccaaaaagacagtttctccactttattagcctggagctcctccctgccagccccaggggctggtcgctggtccctgggcacagtgagcagggctgaggtcagacgggttcggcccttggccatggcagcttggttgggacagccgggccaagggaaaaaaaggtgcaaaagtccaaatgctggcacttcaggtgtggccggcacccagccaggcgcagtgggtgggcagggcgccatgcttctctcctggcgacaggtcggccgtgtagcagcgccccctcccagcagccactaggaacagctggtgattctcgccaggaactgctgcgcccaccactcgtctaggtcaatgggcacaaagtctgtgggcagagaaggctgggcagtgatgctgcctcccaggccagccggcaagtctcccctggagctaaccacaagccgctcacccggactccgagtgcggcaggcgctgggaagaaggggtttctgcacaagagtcccctccctcatcccctggggtgggaacctggcagggcctgggtcaggatcagaggggctggggggtctctcctggggggacagggttggggggctcactctgcagccggggattgggggtcctctccacgtactgcacaggccttggcccgccctcaccggctgggccaccatccagctgctgttgcacctgctgccaggctgtgggaggagggcagtcgggctgagccaggtcccaggcaccccatcgcccacccagggcctgatggtcaccctggactccagccccacacagggctggtcacaggacacaagggcagagtgccaaggaaaagcacagccatgcagcggctgtgggtcagcttgaagtggggccatcccgggtccatggttttgcgacccagcagcctatgccgcaccctctggccccgctcgctaccttcggacacaaagcggacattctcctcgtgggccactgtgtaggtctcctgggtcccctcgaaggatggggacgtggagggggcccgccggccattcacacgattgaacacaagccttggccctggactgcaggaagggaggagacggacatggttggtgcccatcccaggtgcggtgctg

SEQ ID NO: 1243524 - DNA, 4001 bp, Homo sapiens
agcgcctcatcatgtcactctactactctttccacttctcgaagtcctcctgtctcccgccacgagcatgtgccgaacatggagaatatgagccctggaggcccagatttgtctcaatacagtttcaggcaccccactatgcctggggtcattaatcattctcccttccctcttctccagctggcaaactcctatttatcctttaaagccacaggtccactgtccccaaccctaaaaaccctgtctgactctcctggggaagagctgcacacgcatcccgtgctaccactgcagccgctcataattcacccacaagaatgtaccaggcgtcaacttaatggcaggcaccaggggcacacattagtgaaacagaaccctgccctaccccaaggaacctacatgctaccctgttaggcaacaccaaacaaagtcacaattatttgattgaaagctgccaagatgcactgccagcttgctatgttgcaaagacgttctacatactgagacattcaatcctcacacaggtgctgtgggtgccagcattaccttcttgagccctctgtgtgctgatatcgtcctggctcactccgtccctgcggatctgtgatctctggggggtgggaggaaccaaaaatgatagcctcctccaccccattctctctcctagttcccttcctgctttattgcttcctcagcacttgcaatctgcacatactaataaatgagatctctctcatttattctttgctgcccccagccccccattgagttccccaggcagagatgtgaggcctgtatccccacagcctaggacagtacctggtaaacagtggcgacccagacatagttgtgtgaagaaatgcatccctctgtcttttgcagatgagattgctggggttcagagacgtcaagcagcttgcctgagagaagccacgcagctaatgagcagcagagcccgattcacacccagacatctggccccagggcatgtgtttcttgccactcactgcctcatgccttctctttgtactgccatcgtttgtcacccaactgcctctgcacctcggccacgccacccttgaggatgggggctggtacctcctttatcttgtatccacaggaccccacagagtgccttccccagagcggtttctgctaaattctgtttaacagagtgtattcattctgtttgctgaatgaataaacaaccacatgaatgcataagtgtatttcacaaacatttggtactgatcagggagacggaatgctccgtttaaatcctggggttccgaaatgagatgctgtctttcaggagcaagcatacttttgtaacaaggcaaaagtaaggcacgattctttggcacatttgtgatgtgtcttttgcctcttgattcacagataagggtccttttttgggggtgagccccatctgcccaccacacaactcagacacacacggataggaagacgcctgccttgccacgttttgggggagcacttacaggagaaggcagtgtctagggatcgcctctcctcaaggctgactcccacccacacaggctgccccagcctccccatcccaggcacttacacgggatttctcggccagcctcgcaggcaatgcccgtttccagatattcttggcagagccggcgtggaggagaagtagcaagaggcacagagcccggatgatctgcctcctgcagctgcccggccccacgccggttaaaggcatttcctccctgggcagcgaccttccagacgcacacagaagaggggcccccctcgctgcgtgggcctgtgagtggggacaggagcgtgcacagtctgctggactttcttagttccacccagcagggtccctcggatcatgtgtccgcgtccagcacatgccccttcctcgatggtggctggcctgcccggttatttttagcttgccctataacatctggccccagacgctccaaccagggcgtctgcagcccaggcagctcagtgggcggtggcagcaggaggagggggcaccggcttgcttggagacgtggccgggagtggcctgtcactctccactctccataatgagcacttccttgcaggctggggcggtctcctcccaaggaggtgtgcttgacacagggctcggggctggacatgcaggggagtgcagccggatgggtgggggctcggctgctaccttgttcacatttcgagctgggctgacaaactatctgcctataaaagcttctttgaaagaggctgctggactggcactggccaagggtgcagccatgaagagacgacttccacccttgcacccgccggggtcctcctgcctgatgtgggcatgtgggtagttcctcatagcgtgtgtttcctgtgagatttaaaagaaattgagcacataaagcatttcacacacataagtgtgctgtcactgtcagccggtgtatctgcacatgtgcatttatgtgtatgcgtgtgtgcacgtgggtgtgcatgtgcacgtgtgtgttttacaggaatgtagcacagcgggctcaacatttcacaaacttcatattcccttgtctgttctcagcacttccaagacagatactggttttttgttttgttttgtttttcgagacgggtcttgctctgtcacccacgctggagtgcagtggtgtgatcacagatcactacaacctctgcctcccgggttcaagcgattctcctgtctcggccttccaagtagctgggataacaggcatgtgccaccatgcctggctaatttttgtatttttagtggagactgggtttcaccatgctggccaggctggtctcaaactcctgaccttaagtgatctgcccgcctcagcctcccaaagtgctggtattacaggtgtgtgagccaccacacccggccccaaaacagacactgttttgatgcccgctttacagatgaggaaacagagggggctgcctgaggtcatgcaacagcagcagagaggaggctggaacccaggtaggtcagaccctgtggcacccccctaggcgaagcagaagggacccaagcactaggcttgacgcacctgcctgatcccagttcagcctctgcgagatgctggaaagcctcttgctcatggtcctcagttctctcatctgtgaaatgggcatgtgaaagtctctgcctcttgagatcgatgtggggctacaggagagggtgccagctgtgcccagcacttgcacagagtgagtgctccagaaagattggttcctccctccctggggaccctcaccccccacctcctggccagcacagccttcagaatgccctgggcaggtatcatcaacccctcttggccttttagtgaatgacaatagtggcaaacacatatagtctgtgtaggtcgggtacggtggctcacacttgtaatcctagcacttagggaggcagaggatgccttgagcccaggagttcaagaccagtctgggcaacatagtgagacctcatctctacaaaaaatacaaaataaaaaaagtagcccggcgtgctgatgcacacctgtagtcccagctaattgggagactgagatgggaggatcacctaagcgtgggaggttgaggctgcagtgagctgtgatggcgccactgtactccagcctgggtcacagagcaagaccctgtatcaaaaaaaaaaaaccttaaaagccatacagtctgtgtgttcggcaatgtttgaagcacttcctgcattttaatgcttttaggtctcatattagccttataagcaggtgctgtctaggatcccatgcacagagaggttaagacacttgcccagtgagcaatgcaaaatttaagttcaccatcagagtcctgtaaacccaggagcccaagcgtgagagtctttttacattttagaccctagatgcctcctttgcctcccgctaggcccagccctgatcattaccttgccctagattctagaatattccttcatttcttcatccagaaactactgg

SEQ ID NO: 1243525 - DNA, 4001 bp, Homo sapiens
cccccaacctgcaccgcctgtggggaggggctgctgtacagggcaggaggcacgggcgcggccccaggtgtggggcgggcagtggtctccggcggccccgggctgctgggcggccagctgagcacgtgcttgcagggcacgatgtggaggtgcaggccccgcaggcaggcctcggcgtccatatagcagcggttgtagtaggtgaggccgtccgaggcgcaggtgaagctgggctccttctcacagcggtcgcggcagcggcacacgggctgcccgtcccagatgtcgcagtccgagccctgctgtgggcacacaaagccctcgcaggaggccgctgtcgtcggcgcagctgggctgccggggaagcgtgctgccacgcagctgtgcagtccacacacgttgatgcagcacttctcagcagccgcacagtcctggggatgggggacacttaggtgggagccccaatgccccccgccccggggctctggcctggcccctgcaaggggaggcccaggtggggtagcagggagccccccgctctgtggctgcctccccggggactcagtgtcctttccatcctgtgtgaggagccacctcgccagaggtgccacctggcttaccttccagaatcctcacacccacaagcaagttccgttattctttacgttgtacagacgaggaaactgaggcccaaggagggcgtacagtgctcaggaccacccagcaggtggtgcgggccaggacaaaggctggacatcggctgcagcacccccaccaccatctgcactggtcccggatggaaggagggtgggaggacagggaggacagtggatggaaggagagggtgggaggagaggatggaaggagagggtgggaggagaggatggaaggagaggcagtgacggggtgggagaagaggatggaagaagtggatgggaggagtggatgggaggagtggatgggaggagagggtgggaggagaggcagtgaaggggtgggagaagtggatgggaggagaggatggaaggagaggcaatgacggggtgagagaagaggatggaaaaagtggatgggaggagtggataggagaggatggaaggagaggcagtgatggggtgggagaagaggatggaagaagtggatgggaggagtggataggagaggatggaaggagaggcagtgacggggtgggagaagaggatggaagaagtggatgggaggagtggatgggaggagagggtgggaggagaggatggaaggagaggcagtgaaggggtgggagaagtggatgggaggagagggtgggaggagagggtgggaggagaggcagtgacggggtgggggtggtcgccgaggatgatggtgccccagggtggaggcacatggggagcatgaaagctggagtggggagggctcttattcttaagacaaatgagggcaacgatgggggtgtctctgggccccttaaggggcccagacccagaccccccagaagtctggggagcccaggcagaaggtggcacctccagcagggtcttgcccaggctggctgctctgagccccaggaccccggcccgaccacactcacctggtccctgctacactcgcgctcacaggtgctctgggcgtccacccacaggttggggctgagctggttggggcacacgcccgggtggctccccagccctggcagcaagccagcccccgaggtcagccggaggaggagcaggagcggcaggagtggacgtagggcgggcatgagggccgccgagccagggggccggggggtgtggccaccagcccctcctcgggctccacagagcccagcttcctgcaggcatccaccctccgggcctgtggtcggtgcccccaccaggaccccggggctcccttttgcccctgaggctgaagcctgcagcagatgcttgtcctgacacccctgctgggtgggtaacggggtctccaagttctcagaggccgtctgtgtgacgctggttcctctccagcttcagcctggcccctctgtctgaaccgtgcgggggctcccaggccctggtcagcacagggcagaggggaggaggttggggaggggccagaggcccatgagcacagagccactggccatgagggtcaccggggcggggaagggctggctctggctggagagggggaggggaggggaccctgtaacctgaaccccttcgtccacccctgggctgagatcaatctccttgacgaccctcagtagggtgggggcagggccagcagatcccagcttttgtccctggcgccctctggaccccaggctcctatgccatgggggtggcaggcacgggccctccccgcagagcgtggctgaccacagcctgggtcccccgggccaggtccaggctggcaacggtcacgtgcggccgagggcttcactccgctccgaggttccttcccccctccatggctgtttcaggggcacaggggtctgcaggacgcccagcacagcccggcctcctctgctctgctgcccctgttggagtggggcccaacccggcaggactgcattcccagagaccccatccctgaaaccaggcagcgggcttggggctcaggcctgtccccaaggcggggcaggtgcagcaggaagaggcctgtggccaccacaagcataagaacagcccgaaacgctgatgccggagcctcggcccacgcaccgtgtagccctggacgtggctccgcgtgggatggcaccgcccgagggaaggccaagtgcaagggcgtctgcagctgaaaagagcaagtgtcccagggcaccagagccttgccctgccccagccccccgtcggcggggcacacatccccaggctggctcctcttcgttggggagggcagggggctggcctgcctggtgcagcaggacaaaaggctgcctggaatctacccttccaaaccctctgtggctccagatgtctggggcctcagggagtggttctcttgagaccggatgggagtgtccccctgaccctgtgtctgacctctgacccaggaggcagggtaacaggagcctggtctggtcagaatgagacccggagacggctccaggcgccagtccctgctctacaaggagactgggggtgggccctgatagcgtgggggtgggggtagctaggccagacccagcagcaggcggctgggctggagctgccagggaggggcttaaggcccggacatgcccacgaaacagcacagggaggcacctgagccagaggctgtggtctggtccctgtaccaactggagtgccccgttccagctcagctgtgacctccggggcgtccacacccccctgggccgggcatagcagacaccagattggccagcgtgcaggcggctctgctgagcgggccgactgactggaggacctggccctctggagtcctgctgctgttggggacagtccgccccaggccatctgctgccggggactgtgagcgagggctcagcacagcccagctgggattccatccaccgggaagaggagaatggccgtgaccaggcccagctgctccagcccagctccagccctcactttgaggcgaacccagccaaccgcggcaggtcagcccggtcagcgcagggaacagcaggcaaaacaaaggccagaggtcagtttgccgggtatgaagcagcactggcccctggcacggggcaccgccactgccagacccaccccaccagacacagcaaaacgtggggaccacagctgaattacatttactgtacaaagaacggttcggagagaaccaggaatggcggagtgtctaacagcagcgcgggtagtgttgatgccgtgaatgcaggaccatccaggtcctcaaagtctgtgaggtttgttcataatcccaaacaagggccctgctggcagcaacaggacaggtggggccaggacagggaagctggagcaggaggccagtgtctttgggggctgtggcagggccgcctgcctggggtt

SEQ ID NO: 1243526 - DNA, 4001 bp, Homo sapiens
gatcgcaccacggcactccagtttgggcgacggagcgagaccctgtctttaaaaaaaaaaaaaaaaaggccgggagcggtagctcacgcctgtaatcccagcactttgagaggccgaggcgggaggatcacgaggtcaggagatcgagaccatcctggctaacacggtgaaaccccgtctctactaaaaacacaaaaacttagccgggcgtggtggcgggcgcctgtagtcccagctactcgggaggctgaggcaggagaatggcgtgaacccgggaggcggaggctgcagtgagccgagatcgcgccgctgcactccagcctgggcgacagagcaagactccgtctcaaaagaaaaaaaaaaaagaaaaaccctctggaagtggggcccagaaaaaggctcttacaaaaaaagtttcccagatgctgaaaatcagatttacatccatgtttctcaaaaccaggtgatattccacctcacctggaaagcttaaaaaaagagactcccaaagttgagagtcggctacagtaggttctctatggagacccaaaacgtgtatttaggacatttcctaggtgattctaaggtgccgatataagaggcactgtcgtatcttaagagcaatcaaggaacgacagttaaggaacagagagtacctactagacacggtgctatgtgctttacgcacagtgcctgaactgaccctcgtatcaacccattttacaggtgaaaaaaccaagattaaacgttatttcaatggcccaaggtcacacagttaaagatgaaggctctgctggggtttccaaaactttcccaggaaatgatagtgaagctatctaggactgctactaaaaaatactcctggctaggcgcagtggctcacgcctgtaatctcaattctggaggctgaggcaggtggcctgcttgagcccagtagttcgagaccagcctgggcaacatggtgcgaccctagtctctacaaatacttaaaaaattagtcgggcatagtagtgcacgcttgtagtcccagccactcaagaggctgagatgagaggattgtctgaacccagtaggtagaggctacagtgggctatgatggcacccctgcactccagcctggatgactgagcaataccggtctggacaaaacaaaacaaaacacaacaaaactcctatccctgcaacccagagcctgcaggagggagctgagcatgtgcgctttttaaaacatctttattttttggcggggatgaggccgctttgccctcgccgcgccgcgcagtgctgcatcctgaacagcagagggcgcgccgggaagccaccaggtgacccccgctggacccgaggcccaccaagggggccggcccctactgggaaccctggacccttttccctgaagctccttaacagttactttcactttgcaccgcacgcgctgcgctggagtgcgcgtcctccccgcgcaggtggcgtccgtgggctgtgcagggtcccaggtgcgtccgcggccccactgcggcccccttacttggcgtagtaaacccagccgtccttggtggttctctcctcccagcccggaggcagctcgtcctcactgtccgtgtcgtccagccccgcgtagcgcagcgctgccatggctgactgtggaggcacctggcccccctatcgcccgctgccgggtccactcgctcaggaactcactcccgctccaaacgagacccgcgcgcgtcggggcccgaccgctcacgcctgcgcactgcgccctccaggggccgctccgccgaccacgaagctgaaatccagtctccgcaatatcgcgacggccggcgtcaaaggggcagggcctggagaggaaggcggtgaaagtgcctaagagatcgcgctgccgccgggctagacagcaaagccggagagcgctccgaggcgctagagatagagcggagccttgtcagcctccccgccgcagggaaggggcgtgcgcatccagtttcgggccaggactccgcccgttgctgggcgacccgtaatcacttccgcgttgttctggccaatcctgcaggagcccggcaattggatatgggaaatgtagtccaggtggcgcctgaccaaaaagcggcgcccgactaaaaagcggcgcccatgctgttgtcctgggcttctgtctctccttgccttggggtctcgtgaaagtccgtgatcacaaaccttccagggcttgccagcattcgtgctgattcacaacctttgttttgcatatgaacacaatgttaaaatataacctggagaacttaaaactgctgattcctgatttcctggttttagagaactttctttcagccaaaacacataatagagactgtgataatagagactgttgtttaatagagactcatgataatagagactgatgataatagagactgattgataatagagactgttgataatagagactgatgtttacggagcacttaatgtgcggtccaggccagaaatgcacagacatcacatgtagctgacacctttgtgtagtgggcacaactcagacagggtagctaggccgggctcagtggctcatgcctgtaatccaaacacattaggaggctgaggcaggaggatcacttgaggccaggagtttgagaacagcctgggcaacatcgcaagacccctgtctttaccaaaaataattatttttttagtttgccgggcgtggtagtgcacatcggtagtcccagctactcattgaggctgaagggggaggatcacttgagcccaagaagtcgaggctgcagtgagctatgatcgggccactgcactccagcatggacgacagagagagctgctgtctttaaaaaactgcctcacctttagagaatttcctttagtaagtctggaataggtccagaatctggaaagaaagggagggagggagggagggagggaggaaggaaggaaggaaggaaggaaggaaggaaggaaggaaggaaggaaggaaggaaggaaaataaaagaaagaaaggatagctaattacctgaagaggcacaggaagagaggagagccgggggattcctggcagttgagatcgcatcactccactacagttattgactcatttgtgtagtcccgactaaactgacaaagcacacccgggacttctttctattgccagcacttggtaaatgcttcaacctacaaatttattaaatgaacaaatgaatgaatgatgtgattccttaggtttggttctctgtgaatcaatctaattaaaaacaaaatcctgtatttacaaggtacactcaagtcctcttggaccaccaaaagatatcctataaatgttctgtatccaaaacctcaaacatatcttcagcttgtgcctaaggagttttcagaacattccctgtttggcacttgctccccagccccatgttatagggaaatctactgaccgtgatttctcaggcctaggtcccaaagaatgcaagcctccatcagaataattacatatatttgattcttctgagagagcaaaaaaataaaattgaaaataaggaattttaaaagtatgtattttaatgggcagtgtatgggaggggcagctgctttttgtcttcatgttctgaaatggatgattgcttaggattcctgctctacgtactcattagcggagacacctgcctttctacatttgaccaaccaaaaacaagcttaacaaagcactgttttgtttcaacaggcctgctgactcatattaaacctatcgtaagattttttttccaaatccacctgtgtttaaatctgctaccattggattgggcgtagtggctcacaactgtaatcccagcactatgggaggccaaggcaggagaattgcttgagcccaggagttcaagaccagcctgggcaatatagtgagaccccccccccccccccgccgacccccaccaccccatctctacaaaaaatttaaaagttagccagtgtggtggtgcatgtctgtagt

SEQ ID NO: 1243527 - DNA, 4001 bp, Homo sapiens
ccaacattcgggacagagcaagggacactctccaaattccctgctctgtctgtattttgctagtgtgtatctctagaagaacacagcgtacccttcccaaccaatgcctctcataaaaacaccttcaacctccccaaaaagtgtaactgtattgggaaggaaaataatgggccaaagtcacatttgataaagatatttcattttccaaagtccacatgggatgaaagatgtttttctctgctatcaaaccaaacaattacatatttacaaagactggacatttactgtgacccttgaaaattcatgttgtgatactgatccacggagctaagaagagtccgggctagctatgggccaggctgagtgggaatcaaaccaagatggcctagtaagaaccaagctctcagcacctcctggcccccgcccagccccaccctgtcccggcacagtcctgaggagcagggcggcactcaccatctgtcagggcactgccattaggcacatttcccagatcaacagttggcccgtccaggaaaattgtcagctctccgcctgagacaacgctgcctttgttctccgtctgcaggttcagggtcagctgcatgttctccactgtggggtacaaaaggcaacatggatgggctaaagagaatgcaccccaagttaagattctctaaattagaagctttcatttcacctttgctggcttctctgggaatgctttctccacatcttcacattttgcctcgtggcatggaaaaaagagtgggaaggaatatgtctaatgaaatcactgttgtatcaggctggaggggaagctgcactctttctaaacatttcatatcactgggtcagcaccataatttccacattactgatgtattagtttgtttatacttgcaggactgtgagaaaagcatagggatattgatggcgtacagacgaagaaattagttgcaagtaatatccccctgcccatagaaaccgaggagaccctaaggaactgtcaacaggaggcatctccatctagatgagggattgcaggggcttattcttttcttatttgtgttaaaacatgatgttgttttttaaaattttcaatcctgaaaatgtattgtcttgaaataaggaaaaaaaagttaaaacaatgaaacttcaatacaggctaatcagccccatcagtgacttaaggagagagaattgagaagtggcccagagcaccccgtccccaaggataccaggcagattcagtcctgtgggtgactgtagcagaaaaacagaacaagctgactggaggcagaagcaccaagccctaggcaggctagaaactgctgcatacacaccctccaccctgctactgaacttggctgtgctgaatagcttctgtctagttaagtgtttagtccacactgaatatttcagttcccttcagttcagtccagccaggagctatggccttcagttcagggccgtttaataattaccaagagggaatcagcctttatgaggatttccacggggtccgtccactccacaccttacaaaaccacatatctgaacctccctccccacccgccccacccaatccaacactttgttttatttcttagttgctactgcatgattataagctatcttacctgtcttctagaacaaggtatagtatatataaatgtctccataagcacactaaggtaaatttcagcactttctagagataaccccccttcccccacccccccaaaaaagactgctctaaatccctctacagatacaaccctttaagaacttagcagaaaattctggatcaagtcaaagatctattataataagatagaaaccagttaccctttgggttttcaagctctcctaagcgctctaccttcccttaatctctcttccctgccatggatctctccaattcttttctgagtgagtctgctgctattttcagccagttccactgagggccttggtgagtactaaacgtttctataaaataacacttgtagtttccaaaggaaacgagttccttcaaaagccaaggagtatgggaaggaactgaggcctttcaacccccagccacctcttgccatccctgggagtggccacttgggaagcagctgctccagccccagcagagcctaaccctacagcttagtccacatcctgaatgcagcctcgggagagatccctggccaggctgcccagctaagctgctgccaaatctagccccctgaaactatgcaatcgtaagtgttgattattgtgggcttttttttttttttttttaagtcaaggagggtctccctcctctattacgccaagatccagtacctaagtctctggcaatagggtttttaagcacgtggattaagagggggtgtggtcaggcactccgagtttaattcacagttctagtccctgagagctgtgcaccgtgaagcaaactacctaacctgagcatcagtctccctacctgcaaaacaggggtaatcatggcacctttttcagaggactcttgcaaagaagtaaatggcacctaccgagttcctaataagctgtcatttttatcatctccctgttgacttcctgtgtttaggaagagtcctaattcctcttggtctaacttctcattcactgtatttgttttttgttttgctttttaattttttttttatagagacatggttcactatgttgcccaggctggtctcgaactcctggcctcaagcaatcctcccaccttggcctcccaaagtgctgggattacaggagtgagccaccgcgccctagccttcattcattttatagtcattcttctcttgatccttctgatccttctgagacttttttgggctgtgaccacagaatcttccaaggtaagccacagacccatcacgcagacaaactgtcctttcatcttgtttccaggtcatctcctaaaggcgcccagccttctggctccaggacacacaccgctattggaagcgtgctgagggatgagcattccggaaggctccttgattcctgtcctgatacctcaaaggtcatcgtttcataaatggagtgttggcacttttttttcctccttcctggaggactgataatgttcaacaggagagtggaggaacccaaggcctcttgttgctaatttctacccccgtgacagtcacactgccatgggccttggacagaaggcagagagatagcctgaattttcctctccatggtctcatctcagggatccaagttagctcttctatctggtttatctactcattgtctccagtggaatcattatatatttgaaggctcagaagccatcatacaacaccttgagacacattttgtcttcaaaaagagccaatgggctgggtgcagtggctcatgcctgtaatcccagcactttgggaggctgaggtaggaggatcacctgaggccaggagttcaagacaagcatgagtaacacagtgagactctgtcactaaaaaaaattaattaaaagcagccagccaggctcagtggctcatgcctgtaatcccagcactttgggagaccaaggaggatggattgcttgagtccaggagttcaagaccagcctgggcaacatggtaaaaccccatctctaataaaaatgccaaaaattagctggatatggtagtaggcaactgtagtcccagatactgaggaggcagaggtgggagaatcacctgagcccgggaggtcgaggctgcagtgagccaagatcatgccagggcactccaacctaagcaaccaaaatgagactgcgtctcaaaaaagtaaaataggactgggcatggtggctcatgcctgtaatcccagcactttgggaggctgagatgggctgcgatgggtgggtcgcttgagctcaggaattcgagaccatcctgggcaacatggtgagaccctgtctctattaaaaatacaaaaaatcacccaggtctggcagggtgcacctgtggtccccactacctggg

SEQ ID NO: 1243528 - DNA, 4001 bp, Homo sapiens
aaggttacagtgagccgtgattgtgccactgcactccagcctgggcaacagagtaagatcctgtctcaaaataaaataaaaataaaattttctattgtgtcaataaatgaaaaagaatggatctaaggattaagggtctgggcttgagtccctactcatttactagctctgaaatctaaagtaaggacttcattaagcctcagtctcttcatgtgatatagggacaatactgaccatcccaatttcaaagggaaggttaagtgagatgttggtatacgctctttgtaaatgggaaagtaatcatgaagtgaaagagactgagaagccaatccaagcctttctctcgagcctgttttcatatggaccaatgacacagataatcacaagcttctctgacaagaaaaagagtagaagacttgggttcaaatcctttgtcaccacttacgccggtgtgacttttagaaatgcatttattcaccaaatatttatcaagtgctcacaacatgccaggcactaggctagcagccaaataaaatatgaaacctgcccttgaaggatttgcaatctagcaggaagaggccagcaaacaagaaagagcaataaattgttttaaaaaatcaagtcgtctctcgtaagtctgtttgttccctgtgaaatgagaatacatcttcccaacctcactcataggcgctgctgcaaaaactaatttttaaatgtttgtcaaataactccaaaaacttgaactcataatacattaggaaagtactttttcctacttgtaacccaaaacgatgctggctgctgtgaatgtccagtttgaacattcgttccagttacactgcactcatgaaactccttttgcttctgcaaattttagtaaacatgagaaacaggaagatgaacaggctttaacacaagtattcaatctcaaaatcatgatccaggtcacagttctaaggaacataacacagacctctcaggcaccctacctagttacagttcgtcaagataagcagtcacaagataagctaagggaaactgaataatttaaacggaagaaagagaaaagtcataaagcagtctaggtagacacttctctgtccaagatttcagcagtcactatgttgctgaggtaacgctgggctaggtcaacagtgtaagctaaaagccattttacaggcaaagtgcccacacttatttttttaatttattttctttttttgttttttaaagcctcgatgatggcccgttcagggaaaatctcaaagaaaaatgagctgaagggctaggctcccaagaagtggaaaccctacccacgcaggactaagtgggcgcgagggaagcaagacgatcaagattctgtgatccctcctgaagtttaaaaactgaatgggaccgtcatcaaagtctcgggtaacaatcatttccaaacaggaaggaagggagagactctcagagggggtccaggcagcatctttttccctctggctccacgccataaacccattttcaggcacccccttccagctcagttccaagtcgccccttcccctggtcccgatccctccacaaagatcgctcctctccatgcctgggaacctaagctcctctccccttccgggaggactcgctccagctgcacccttggcggccggggcacccatttcggagcaacccccgcgcgggccgcggcgcgcccaccccactcgggcgggagccgggacacccctcctcggaggccggaaccgccgcgccaggcccctcccacaggaagccgccgccccccgacgcccgggccgcgccgcccccggcccaccccgcgccgcccgccgcccccggcccgccccgtgcaggcagccagcccaccgcgccccccgcgccagcgctcgctacctgccgtggccacagaagcggcgccgaactcctctcctacttccgccttccaccgcccgcactcgggccgggtcacgtgaccgcgcgcggtcacctgacccggaagaggctggccaggctcgcaggtgcgggccacctaggcctggcctgggcacctctggcctcgaggaggcctttttatcgtctctgtagttgaaagtggaagggtttctgctcaccggatggtcccaggcaatcaaataaattgagggctcactgaatgccacctactctgcccatcaaccttatagaggcagggacaggtactagccccattttacaggtgaaacgagaccttcagactgttaagtcagcaaatacttaattgagctcctttagtagggttgccagataaagtacaggacacccacttaaatttgaatttcagataaacaacagtgtaatatgtatgtcccaaatacagaatgggacatatttatactaaaaaaagtattttttgattatctgaagatcaaattgaattgagtatctgtatttctatttcctggcaaccttatgcctattatgtgccaggcactgttctaagatccaggaccacaaacatctcagcctttgtggggcatctgtccttgtgacatgaagcaaaagtacaaaagcttaaaaactcctgcttggctccataaaaagcccctccacactaatccaatcgcattcccttaatctacaactacagggcacagagaacttaatgaattataatccaggtaggtaggtaggtaggtaggtggatagatagatgatatttttttttttttttttgagatggagcctcgctctgtcgcccaggctggagtgcagtggtgcagtctcagctgactgcaacctccgtctcgccggttcatgcaattctcctgcctcagcctcccgagtagctgggattacaggcgtgcaccaccacgcctggctaatttttgcatttttagtagagacagggttcctccatgttgaccagtctggtctcgaacacctgacttcaaatgatccgcccaccttggcctcccaaagtgctgggattacaggcatgaaccaccgcacctggcagagaaatattttttttaagagatgggtctggataggttgctttggctgggctcgaactcccagcttcaagcagtcctcttgcttcagcctcccaagtagctgagactacaggcgaatgccactgtgcctgcccaataactttatttatttatttatttatttatttatttgcttgcttgagacagagtttcactcttgtagcccaggcaggagtgcagtggctcaatcttggctcactgcaacctctgcctcccaggttcaagcaattctccttcctcagcctcctgagtagctgggactacaggcacccaccaccatgcctggctaatttttgtatttttaatagagatggggtttcaccatgttggccaggctggtctcaaactcctaacctcagatgatccacctgccttggcctcccaaagtgctcagattataggcgtgagccaatgcgcccggcctccaagaacattttaaatagacattcttgactgatgttctggacaagttgaatgaaggctcagtttaatcaccattgattaaaattaatactaatgacgtaattagcctcaaagacttgtactaatctgttatttttgggtcttcgaattgggatggattctatcatgcatacaaattaaattggctggtggggcgtggaggctcacgcctgtaatcccagcactttgggaggcagaggcaggtggattacctgaggtcgggagttcgaaacccacttggccaacctggtgaaaccccatctctactaaaactacaaaaaaaaaaaaaaaaaagattcgccgggcatggtccgggtgcgggtaatcccaggtactccagaacctgaggcaggagaattgcttgaacccgggaggcggaggtggcagtgagccatgataacgcctctgcactccagcctgggcgacagagtgagactctgtatctaaataaataaataggttgaacacttagtctctactttttgtagtaccactccaaatccaaga

SEQ ID NO: 1243529 - DNA, 4001 bp, Homo sapiens
cactcagcagaactggcatgaaaacccacttgactgggctacatcacctgcctctacagagcctgaaatacactagaagtccccggcttctatgccactggctactaaacagcagtacagattcttgtttaatctgacgcattttcccctgcctactgacgacgcagggtcttcagagttttactctctcgcattggagttgctgccaatctctgagatactaatgatctttctttggtccagggagccatgtggggcagctatctgcgtaagggatccccaagctgaacatcaacaaatgtgtggaagcttcactaaatgatctctccaatcagaaggaccagaaggcccttctggcacactggactgcagtgctcattgactaagtggtaccctgcaggtataacagggttgacacaacctcttaaataactacccgagagcagaagtgtctgcatcgagaagatccagctccaaacctgcatgtttccaggcatcagatgcccatcctatcactgccaacttcccaggatgcacctctccatctttgttgtcgagcgcaccccctcccagtttcacaccatctgtcaacaccaccaaaccaacgtttaccgtcttctgctggcctaaccaataaatgaaacccaacacatgctggttcccgcaaaaactgctttcttctgctcccagtgactctcacaagattaaataaaactctgccccagctctatcaaatgcgctaagtctcatcatctctaatgaccctttttgcatggctactctttcctagaatagccatgaagcctatcatctctcctaagtcatggatgtccatcccttaactcactgtcagcaaatcacatcaaggacttgggataggtaagaggcggctaccaagcgcgaggagaaatctacacggcgataataactagcagcgatgcgtttccagagtcaccacctggcattcaactctcgtatctgcttccctctggcctctttcacagctatgtcagaaataaaaaggtggcttctattagtcaaaattagaccaaagtcctccaacatctcagctgcaaagaaagatttgttagggtggatcattccaaccatacggtcacagatctgaaacaaatccatttgggagttaggcagtgtcaaaatatcttagtggtagcatggactcttgagtagacaccttgaaactcaagaccaaaagccaatagccccccagctgctcagggacatcttttcttagggtcacactcctttagcgatggtgggtggatgctacagtggttcggtggagcttggttactttcccagctgcccagctccatcacctgtaattgctctggtggggcatgcccagagagtgtgctggagaggggagagatggaaaacagagggacaggaacagggaaggaagacacgcgggaggagaggacagagcaccgtggctgacggaaggccaagggccaggaagagaactcagtacttaccccagccaggagggagggggcccaggggatcatggtcagtcgaagcactcgaagactaaacacaagaaacacagcagaacacagaggttacaaaaagccactggtgaaaaaatcaatcaatcaataaaaaataaaaatgccaatgactggcttccacatttgagcgctttgcagggaatgcagtgggactttaggtggcatctgctcctctcaaaagtctctgttttttgttttgatttttacagaaaaaccaaaaaagaaccctgcgcacggagggcccaagtgagttttggaaaaggcagagcgacggggaggaggcggtacgcgggtgaaggtgtgccagggtggcggaggcagggagcagccctggcatggtaggaaggcccgggaagcaggctcggcccagtgcctccgctcagctccggctcaaggcggccaaggcgactgaaatcaccaccacctccaactttctccaagaaccacacgcaggaggggaaaaaatatcgcaggcctttccaatgaaatcattcccacaagccctgcccacgcccagagcttcctggctggggcccggccctcctccctccacctcggcgtcccccccaacctcccatctgggtgtgcagcgtccacccagactgagggcacattcatgccccaagccctcacctcccccaggaatgttttccttcccctttacaaagcacctttattcctcccctgcctgaacctgaagttgctcagtgttctgtgtttgtctcggggtgggggtggggggggtggggggtgttggggctgggggtggggcagcaagacagaaggggagacaggggaaagaagggggaactggctccagggcttcagggtcactgtttacattagaatcccccccacaccccctccagccaaattctgcttcgaggtccctggggatggactgcagtggaccaggcattctcatatcctgcggggaaggggggtgttgtcaaaaagttctggtcgttaaataaaacaagtattgttccactctttcttcctttcttttttttctttctgaagcatttttattttacttactaaaatttaatcgttataagaggggatcaagttctaaatgcggacttcaggctgctgggctggccccgtctaggggtgccggagccacacatgggcaggaggatgaatggggctcagtgtcggcttgagaaaacattggtggaactcaactgccagcaagcccccttccacagccctccctccacccccagctgaaaggacagagaaactttctttccaaggtggcaacacaggcccctcttccaagcaagttccaacaaagatgtttaagtcttgaaaccataggctcttgacaggacggagccccctttcagggcagggcctcctgcccacacagaatgcaagtgcacggaggtgggggaagctcaccttgatttagggccccttatcattgatctcaagctgtgcctaaaattctccatcacaaatcacgttgaatcattactgaaaaaaatctcccgaattccaagtcatgggggcgtgtgtctgtgtgttggggggttgggggagatagggtacagcatctcataaaatccaagttcctccaactctgttttgtagttaacacattaaaaacattcggcaacagaggcaaaggaacaaatgagaaaacacacgtattctacatcatggagccagaggcactgggtaagtgctgagctacagcagtgaccttgcaaaagggaaggactatagaaaaggttattttaagacattaaaagaagacgcatttggtgtaaaagtgtttgctgcttcaggtcttgttttggagtcagtagatcatctgtaaagcgttcagggttctcctgggaaatcagctaccagctggtaccaacccagcttccacaggggcatggtcatcttttgcttaattctacaaatcaacagaccaaaaaggtctttactgacagtctccctgactagcactgaactaggatcagaaaatactgatcagcccttttctgaatccttgccttttaaaaaaaatctcagccttcatgcaatgttggctctctttcgttaaagggtttttaaaaaatttccttggtatcctctgtttgttattctatcagaacgcaccccccccacccccccaacacacacacctataagaagcgaggagaagaggaggcagacaggaaagggagagacaccagagactgataaacacaaacaacatttattaggttggtgcaaaagtaattgtggagtcatggcggccgggtgccgtggctcaggctggtgatcccagcactttgggagtctgaggcggatggatcacttgaggtcaggagttcgagaccagcctggccaacatggggaaaccctgtctctactgaaaatacaaaaattagccaggcatagtggcaggcacctataatcccagctactcagtaggctgaggcaggataatcgcttaaaccc

SEQ ID NO: 1243530 - DNA, 4001 bp, Homo sapiens
acttgagctcaggttcaagaccagcctggggaacgtggtgagacctcatctccacaaaaaattagccaggcatggtggcacttgcctgcagccccagctacttgggaggctaaggtgggaggactgcttgagcccaggaggtcgaggctgcagtgagccatgaacgtgccactgcactccagcctaggaaacaaagcaagaccctgtctcaaaacaaataaaaataaaacacatacactatacgtatagcatatactgtacggtgctgctcagcattaatggtgtactttacccagctggttgtaagctccatatctcaggacctacacactacccacaggccccttgaatgtttcgaaaattccacaggccttaaggtctgtatcacaaaagatgcagctatgtccctttctctattataccactaacttggcaggggtaaaatgggtgaaactgaggagaacagctccactcctcgaggtgctcaaccacaggctaggtgatccagtacttaccaagggcttactatgtgccaggagctggagcagataagggttcaaacaatttggtctttgaaggagctgtgtataccgcaatagacagataaggctcagaaataattacaagagcaaaaaggcaaatgcttaacaaagagatgtgggtacacacatttaggggagtattgaaagtatcggtctagaaaacgtggagatgtggatacacaaagagatgtgagtacacacatttaggggagtattgaaagtatcggtctagaaaacgtggaaggtagcttcagcagagatcagagcatgtagaatagcagcctcagtgtcaaaagatcacgaccattcctgactttgccatcacctgtgcaagtgacctctgtaaatcgctctgtttcctcatatataaacctacagctagatgagatgtttctcctacaatcacccagctctctaagtgtattagagatgcctaggttcaaagtcagatgcctaggttcaaatcttaacactgttaaaaagtcgcttgaccttgagctggggaattaattgctccgtgcctcagtctccccacttccgaacagagggctggtgtgatcattaaatactactgcactgtcaatcacttcgcgcagggccttggcaagtagtaagccctcaataaacgatagttattatccggaggagctgcaggaggcaaacaccagatgcaagggttgtgcctgctgcgctcccagggccctcccaggcctgagccatcatccctggggggatgggagcgcagggccggggctgcacactctgcacgcatgtgtcaccggccaggctccgcacgcgcctctccccgccatggggagagcagcgatggctcagcagccccggggcccattcccacccttccggtagggcaccccaggagggaagggggctccaattccacttaccatgctggccggggagggggcggctcagatgagctggttcttgggcttcggacacgtcccgctcgcacagttcaggtcatggtcccggcagactcgggaagtcccccacccatgcaaagacaaccccttccccaccgggccccgaggggaccctctaaaaagggcagggccgcccgggtcgcctcatcgggggaccccgagacaattcatccagacccacccgcccctccccaaggaaactgaaaaagcaggaaatgaggctcggatgccggcgaggagggcagctgctcgggacccccgcccgggcccgacccccgcgggggaggctgcgggcccaggcaggggctccccggcctccgcgggcagaggtggcggcggccccggccccgaggctgaacgggcggaggctgacaggcctcgaccgcgcggcccaggcggccggctcaggggagaggcccgggggcccgcgctgtcctcgcagcctcaacccacacggccactgccgccgccccctagagcatccttgcgcgcgcccgccctggagccgcccgctagtaccgcgcggccgcccccgaccaacagccccaacgcgccggaagtggcgagcgccgggcggccccacagcgcggccgccgggctgcggcgctggaaccggaccaatccggaatcgagcggggcgagcggggggagcgggcggagggcggagggcggggctgcacctgacggctcccactggccccgccttcttaccacgccctctcttgccccgccccctgcgcccaccgcccgtgcgtccacgcgggccggcagccatcttggtaaagggagcccgggctgccattttagtaaaggcgtggtttccctttcgcttttttcgcccattcattccgctaaaattttagtgagtgccttttacgggcggagcatcgagctggcagcgtgacgacacgcggccctatggagcttacattcatgcagtccacacactcttgcccgactatattccaggccctgctgtggatgctaggacaggggagataaacgtaacttcgatagccaaggtgctgagagaggcagagaatgtgttggattcctgttcccatcctccaatccactttactcgtgaaagtgctcatctttattttgttttatttttggggacaggttcttgctctgttgcccaggctggagtgcggtaacacaatcatggctcactgcagcctcaacctcctggtgcgccaccatgcccagctaaatttttttattttttgcagaggtgaggcctccttttgatgcttgggctggtctggaactcctgggctcaagcagctttcctgcctcagccttccaaagtgctgggattacaggtatgagtcatccagccaggctgaaagtgctaattttaagaaacagtcaggaaactatcccaaacagctgaggttgagcccgcgggtgtgcctactacatagattggagcaaatctatgtaacccaatggcccttgtcaaccttaaataacgagattgagaaaatagtatttaagtatagggtttattcaagcccgaagcttgaagatggcccaccagaagtatagtccaattagtggcagttacaaatggggtttccttgtttgtttgtttgtttttaagacagggtcttgctctgtcgcccagactagagtgtagtttgttgttgttgttgtttgagacggagtctcgctttgtcgcccaggctggagtgcaatggtgcaatctcagctcactgcaacttccgcctcccgggttcaaacgattatcctgcctcagcctctcgagtagctgggactacaggcacccaccatgatgcccggctattttttttatttttagtagaaacggagtttcaccatagtggccaggctggtcttgaactcccgacctcaggtgatccgccagcctcggcctcccaaagtgctgggattacaggcgtgagccctcccgcctggcttcaagtgggtttctaaggaaaaaagaggcataacataaggttgaataggaatgatgagaaagggggaaaaaataacataagctattgcctatacattgttctttgtatcacaaatttcaggaacctgaaggaaatgggggaggcagctagtctggaacaaaatatctttaaacaattgtccccgagcatgtggaggtgggagtgtgcccgaactcccatacacaagtctcagtggacctgacaaattttgcatacttcacataactcagacttccctgagctatttttctttcctgtcaaacctcagtgtgatctgaatcaattcacccagaaggactgttaaaacaaagattactcgctccactcatagactttcccatccagtaggtttgagatggggctgaataatttgcatttctaacaagctcccaaatgaagctgatgctgcaggtctagataccacatttggagaaccactgatacaacactttaccactgaaagcaatagctttcaggggttttttagttttttgtttgtttgtttgtttgtttgtttttggagaaagggt

SEQ ID NO: 1243531 - DNA, 4001 bp, Homo sapiens
cacaaagaacttctaattgcatttctgcgggaacccatcactatcaactccaagagttcaaaggcagcgtttcagagtacccctctctgtaaagaagagatcgcaggacactaggaatgttctggttctccgtcaggcagctcacgccactattctccccgcaaatgagggaaagacttctccctgctacccacacagcaacgtgaaatgccatcacatcacgtcttgggactggctcagttctcaggcatgaagagctgcactccggcagaaagggtcgcacagactccgaagaagtttagcagctcagaaagcatcacgctgtgtactaaggcagtcttcagtgaggacttccaaagtgacaaatgatagaaatatgcattcagtcttcaggatcctgaaaccatccccctggtgtctaatatcctttaacggctaggcaaatccttgcagacaagtagtgtgatgaagaaacagacagacacacaacacattggctatgccctaaggcagaactcacgcccctggagaactgagaccttggctctgaaatggggactccggcctcctgccccatgtgctcctgctcctagctcagtaggctgggcaaggcagcccagagaaggtgggaaaggtatccctggagaagttagggacagggtaggaagacaagtcagttccccacccagccacccagatggccccagatctgcggaaaaaacagtttcagagccctgactgttcacacccacgaagggcaaagtaatcccataggagtggaagccctgacggtgtggtcggacacacagctggtgacctgaaccggccgcaacaagacagaaagacagagacaaccagctaggagaaggagccatgccctgaaactggagatggggaggagataaagtcacagagggcatgggagacggcaaggttagagacagagaaggtgaagacggaaggctcaaacatccagagaagagaaacagaagacccaaagtaagaccagacaccccggactgagtattgattcaggggcatggtcggggacttgggacgcccagctcagccctcatcgcaggccaggacgaacagagggctcaactgtctgcacccagctcggcaaaaaccagagagatgctgctgcgacaaccgcccaggaacagcggctgaggatccggggagatccactcactcaggcagggagcgagtcaccaagacctacacgcacggagcaagtcacctggggtccccagcaagagtgatggggaacaggaacccagccaggctccggtaacccccaaagcgcccccgctggagaaaacttcccccagaccccaaggggtccgtgctcagactctgaaaggggcagcccacgacccctgagccttggcagggaccccacccggcttcccggggcaagaggcgatgtggagtcggtaggcttgcagagtcccagtctgatgaccgagttcaagggctaggggggcgtggggtcgggctgccttcctccctccctcgccgcggggcgcgagccgaaagggcatcttaccagagcccgggcgggcagtgccccccggctggccggctgctgtccccgcggttctccggggccgcctccccgcgcccgcgcctggggcccccgtcctcctcctcctccgccgccgcctcctcctcctcctcgggctgcagccggctcggcgggcaggtcccggcgctcccggcgcggggccggggccgggggcggctgctccccgccgccgaccgctgcgcccccgcggcgctccccggccccggagtcgaggctgctgaaattccacacgaccagcgtctgcagcagcagcaccgtgagcgccgcgagcagcgccgagtgcgagcgccgggccagcctccgggcgcacggcgccgccaccatcttcggagcgcggccggcgagcgaggcgcggggaccccggcacgctccgggccgcccccgcgctccccgcagctcccgcggccgccggctgccgctcgggctcccgctcgggccgccgccgccgcccccctccccacacccctgtccccgctggaggggagggtgatggggaaggcgccggggggacgcgggccgaggcggagagggcggggcctgggggaggagccgagggaggaaaaggaggagggaaaggaagggggtgggggcgatcagagaagacagacacccctcaggacgtagtgggagtaggatggggggcgagggggacaattcccaaggcggaaaaagagaggcaggggccgcgaaacaggggacctttggttgagggtgggcccgctcagaatccaggggaggtcaggaagagagggggtcccgaggtcctgttttccctgtgggccgctggaaggaggcagtgcgtggaggaagctcctagccccggagttcgcggtccagggatcttctgtcggtaccagaccggttggcaggtggacacgtgagaaacatttcaggagtgtcagagccacagtctgatcccttcatcctgggcttgaaggggtggggaggaggctttgggtgagtttctggagttaatcagcacaagctctgtgagtgactcctgaatcacacacaatccccggtgccaacgatgtactaagtgttcactgagtcacttctctggtccctgaggactcacaagccaagagactccaaacccagttggcaagtggtatagcggcaaaagggagacccgtggagttactcaaccttcgcaggatgcaagccccaaaggctggccccgcagcctcccagcgtgtccttttccccatccatcctgaagtcccccttcctgtctgcacagggcccaggtcctggggaaacaggtcttgctcttgaaagtggagttctttcccatcctgactggtctgtcccggtgaccttgagccaggaggaggaggactcctccctgagcccaagctttctcctctgtcgtttaggcagaatgatcccaatggactcaaatttcatcccgagccttctctgactcagtctttctggtttttccctcccttgtcctcttgcccagggctttatacacagcagcgcagaacagtgagcatatgggatggcgttggtgtcccatacgggacctagcactctgggaatacaacagcagatcaaatcagtttgtgaattgaggacttggcgtgaatgcttcgcatcttgtctgctgtgctttttcacctcatcctaatttacaaagagaagaaagtggagtgtaatgaaggctcatcagacaatgaggcagggagtgggaagagattgtttcatccactccacaagcatccgtgaatacaaagcttgtgtcagacactgggccaggtgcacgcatccaaaggtgaatgaggtttaatctcatcttcagcaagcctgaggtctagagaagcctgatgtggatgttaatcattaaaatatagtgagataggcctgggcgcggtggctcatgcctgtaatcgcagcactttgggaggccaagacaggaggatcacctgaggtcagaagttcgagatcagccttgccaacatggtgaaaccccgtctctactaaaaatacaaaaattagccgggcatggtggcacacacccctgatcccagctactcaggaggctgaggcaggagaatctcttgaacccaggaggcagaggctgcagtgagccgagatcacaccactgcactccagcctgggttacagagcaagactccatctaaaaaacgtatatataaatatatatatattgtatatatatatattatatataatgtatataataaatatattatatataatatatttatatatatgtacatataatatatataatatataatatataacatatatataatatatatatttatatgtaaatatatataatattatatatatatatatggtgagataagcattgctgtagagatgtgcaaaaatgctaagggttcatgagggcaggacgggagtaagcgccaag

SEQ ID NO: 1243532 - DNA, 4001 bp, Homo sapiens
aggactatggaaagggaggctggtgaacccaagctccatgttgttgcagagtctggggcaatttttctgatactctaaatgacaatataagctggtgaccaagggtttggagtgaaaaaaaaaaaccaaccaaccaactcagattctggtccctattctgttacttaccagttgggtgatcttgggcaagttacctaacatctctgggcctccctgtcttcttctgtagagataataatagcttctacctagaggatcactgcaatgattgaatgagataatagacgccaggcacacaacagtgcaaggcacataaacattccataaatggtgactctgattatatcctaactctctaatggggatccaagtgcctgggagagaagggatgggttaagagaaaagttctacaccccttgcaaggtgcaagataaagagaatgtggtcagggatgctgacttgtgtgagctcggcctatgcaatctgaaaggctatagggtgacagcttgtcaggaggaggtgttggaaggtcaggtcaaaggctagcctggggtcagaggtgggtgactcacatatttccagcccaaagtggtcttgcagttctcgcagtggatgtcggcgacagcatggaggccggtcagcagcacccgctcctcggctggcccgcagcccacgttcaccctgtggggacatggggtagtcccagggagggtcctgccatcacagggcccaccccctcaagcactgtgtctgtcctcagcatccaagaaatgatgctcacaatttcctgcctgcaccggggaactctgggagtctcagcaggatgccaggggtcacaggtcacaacagaggtcagggaaagcaagaagggaggccagatactcacactgagttgaagaggtaggcacgcccctgactgccctggaaggactaaagggtgagagggtgggaagagaggagggggtcagggctgccggtggggagctgccaggcagcccctataggttccagccccactgtggcctggttggttaccttggagatgaggtcgtcgtggttggccaggtgagcgcggcagtgggcacagctatacctccggtgacaatcatccaagtaggcctgaaacgtcttgggctttgaaatccgcaccatggcgggggccgggggcagtggccccacgcggggagcggcccacggggagcagagggagcccagtgcctgccggggagggagtaggtgggctgtcaggacctgggccacacacatgcgaggcactcccagagccgtggggactcgctctgtcacactgggctgctctctcctttccccagagccagcagcctctccggggaccagaggcgtctcggttttgactcagtgaggaggcctcaggttgcatccatggggaaactgaggctcggaggtgcccagggtgagtcacccgcctgcttccggcctcacccttgctgacctggcagctgaagctggaggaaggggctttggaggggctgggctgtcagttcccagtttcgggggagcatgggcgggtaggcactggttggtccttgcgacctcatctggagagcagtggggttcactggtggtttagggggttcatcggggagagggtcccccacctggaggaggtaggaggcctcgccgtgaaggttgagggtcacctaggaggggaggggctctcacctgcgggcgccaaggcctcctctacgctcaggggctcttacctgcaacgcggagccttacctggactccggggctcacctggggcgcgggggtgggggcgggcgccgggggagggggcagtcctcgcgggctgggcaggggcgcggggcgacacgcagccctgacggcgcgggcctcacctcgcctgggcgcgcggggcccggtccgccggggtgggctggcctgggagtggggggcgctcctggcgggcgccgtcccccccgggcccgggttcgcaggcgcctggacttgtttacaccgagcccagctgctgccgccgctgcggcgggagggggaggggacccgcctcctgtcccggcggccgccgtggccaatgggcgctccgcatgcaaatgagggggcgcgtcacacggcggccggcgcaggccccgaccgcccctcccccgccgcccgctcccgccggcccggaaatgcggctgcggcccgcgcgccccaggcctgctcgcattcctgcttgtggcccgcgcaggggcggggtcggaaggtctaggccgggcgcggagcgaggaagcgggtggcgctgggacgcatgctctgggggagatgagtataatgacccgcgtttgtccgccgcccgtgccccgctcaatccccgcatcaatcccgtgaggccgtttctcccgttggctccactgtaccgggggctgaggcccagggaggtctcgcggctccctaggttatccagctagtaagaggcgaagctggaattctcactgtgggcccattccatggcttttgccagagcgccagggacacactcagttcaccttctagcagggaagacccaaagatgcgcgcccctggcagccagggcgtcggaccaggcaattcctactgtccagcatcacctcctccaggcctctcggatgcctctgttgggacagctaagttcctcttcaaagactcaatttcctggtcataagctgtaaacagattctactcccgctttttcttctttgtcgcacgtctaccctatttgggaaagtttaaaccttagccaatcgggatcagctcagattgtgcggtccaaccccccagccaatggggaaaggacacagaaacaggaactgcgttagggttaaaaaccacttccctcctttgttggcgggtgctcttgggattgcaaccagcgcaagcagcacccttctgcagaagtaaagatgccttgctgggaagtcttctgtctcagtgctggtttttcttgactacactgagcacttgttttcaacaaatttgagggtcttctgggatcccattctcctttgggaggggtagcgattacttttcctcgtgagacacgtcccactgccttgttgcagtggcccaaggagcggaggatcgggtccacccaaagtgaggaataaatccggactttcagcaacgtgggcaggaaggagccttaaaattcccaggcaagtgggtaactctgtgcacagaccaaggtaagaaaagttgctactggggcgacaaagtatttccttggtggttggggtcacttggaggttgaaagtgcatggctgagacatgtcagtggacacgaatcgagtgtggagtccagacttggttccatggtcacctcataaggcttagggcggttttccagtcggggattataccgacccgctaatgctaagaggggcctgaaattcccacgagggaagcggccaaaaagtacgaagcgattattcatatgagtgcaagaaacctccaatgggaaaagggagaggttaagcccctaggaaatgggcaccaacctccagaatgggaaataccccaagtaagacagggagtacaaaaggccaagcagacaataaaattccccctgacagtcctctgggccttatgttagagtactggaggtataatgaaagaaccatgtaacacaaggaaagacagtgaatgataaaatattgctgttttatttggaccaaagaacctatcctcagaccctcagtcttttggccaaagtttggatcagacgaggattggatatgccaactcttaatccagtatgttaataaaaaaagtccagtctctcaagaggaaatagattatgctctgtgttggagacaggaacatgtccttccctttcccttaaaggatgacgtaaaagagaaaccaaactcagtaccctcctaggacaacccagttaagtcagattctacatctaaagatgccaatgtataggatcccctagaccatcttcccccgcctaccccacctcaggctaatcactcagt

SEQ ID NO: 1243533 - DNA, 4001 bp, Homo sapiens
agcagcagtggcaatgaggactatggaaagggaggctggtgaacccaagctccatgttgttgcagagtctggggcaatttttctgatactctaaatgacaatataagctggtgaccaagggtttggagtgaaaaaaaaaaaccaaccaaccaactcagattctggtccctattctgttacttaccagttgggtgatcttgggcaagttacctaacatctctgggcctccctgtcttcttctgtagagataataatagcttctacctagaggatcactgcaatgattgaatgagataatagacgccaggcacacaacagtgcaaggcacataaacattccataaatggtgactctgattatatcctaactctctaatggggatccaagtgcctgggagagaagggatgggttaagagaaaagttctacaccccttgcaaggtgcaagataaagagaatgtggtcagggatgctgacttgtgtgagctcggcctatgcaatctgaaaggctatagggtgacagcttgtcaggaggaggtgttggaaggtcaggtcaaaggctagcctggggtcagaggtgggtgactcacatatttccagcccaaagtggtcttgcagttctcgcagtggatgtcggcgacagcatggaggccggtcagcagcacccgctcctcggctggcccgcagcccacgttcaccctgtggggacatggggtagtcccagggagggtcctgccatcacagggcccaccccctcaagcactgtgtctgtcctcagcatccaagaaatgatgctcacaatttcctgcctgcaccggggaactctgggagtctcagcaggatgccaggggtcacaggtcacaacagaggtcagggaaagcaagaagggaggccagatactcacactgagttgaagaggtaggcacgcccctgactgccctggaaggactaaagggtgagagggtgggaagagaggagggggtcagggctgccggtggggagctgccaggcagcccctataggttccagccccactgtggcctggttggttaccttggagatgaggtcgtcgtggttggccaggtgagcgcggcagtgggcacagctatacctccggtgacaatcatccaagtaggcctgaaacgtcttgggctttgaaatccgcaccatggcgggggccgggggcagtggccccacgcggggagcggcccacggggagcagagggagcccagtgcctgccggggagggagtaggtgggctgtcaggacctgggccacacacatgcgaggcactcccagagccgtggggactcgctctgtcacactgggctgctctctcctttccccagagccagcagcctctccggggaccagaggcgtctcggttttgactcagtgaggaggcctcaggttgcatccatggggaaactgaggctcggaggtgcccagggtgagtcacccgcctgcttccggcctcacccttgctgacctggcagctgaagctggaggaaggggctttggaggggctgggctgtcagttcccagtttcgggggagcatgggcgggtaggcactggttggtccttgcgacctcatctggagagcagtggggttcactggtggtttagggggttcatcggggagagggtcccccacctggaggaggtaggaggcctcgccgtgaaggttgagggtcacctaggaggggaggggctctcacctgcgggcgccaaggcctcctctacgctcaggggctcttacctgcaacgcggagccttacctggactccggggctcacctggggcgcgggggtgggggcgggcgccgggggagggggcagtcctcgcgggctgggcaggggcgcggggcgacacgcagccctgacggcgcgggcctcacctcgcctgggcgcgcggggcccggtccgccggggtgggctggcctgggagtggggggcgctcctggcgggcgccgtcccccccgggcccgggttcgcaggcgcctggacttgtttacaccgagcccagctgctgccgccgctgcggcgggagggggaggggacccgcctcctgtcccggcggccgccgtggccaatgggcgctccgcatgcaaatgagggggcgcgtcacacggcggccggcgcaggccccgaccgcccctcccccgccgcccgctcccgccggcccggaaatgcggctgcggcccgcgcgccccaggcctgctcgcattcctgcttgtggcccgcgcaggggcggggtcggaaggtctaggccgggcgcggagcgaggaagcgggtggcgctgggacgcatgctctgggggagatgagtataatgacccgcgtttgtccgccgcccgtgccccgctcaatccccgcatcaatcccgtgaggccgtttctcccgttggctccactgtaccgggggctgaggcccagggaggtctcgcggctccctaggttatccagctagtaagaggcgaagctggaattctcactgtgggcccattccatggcttttgccagagcgccagggacacactcagttcaccttctagcagggaagacccaaagatgcgcgcccctggcagccagggcgtcggaccaggcaattcctactgtccagcatcacctcctccaggcctctcggatgcctctgttgggacagctaagttcctcttcaaagactcaatttcctggtcataagctgtaaacagattctactcccgctttttcttctttgtcgcacgtctaccctatttgggaaagtttaaaccttagccaatcgggatcagctcagattgtgcggtccaaccccccagccaatggggaaaggacacagaaacaggaactgcgttagggttaaaaaccacttccctcctttgttggcgggtgctcttgggattgcaaccagcgcaagcagcacccttctgcagaagtaaagatgccttgctgggaagtcttctgtctcagtgctggtttttcttgactacactgagcacttgttttcaacaaatttgagggtcttctgggatcccattctcctttgggaggggtagcgattacttttcctcgtgagacacgtcccactgccttgttgcagtggcccaaggagcggaggatcgggtccacccaaagtgaggaataaatccggactttcagcaacgtgggcaggaaggagccttaaaattcccaggcaagtgggtaactctgtgcacagaccaaggtaagaaaagttgctactggggcgacaaagtatttccttggtggttggggtcacttggaggttgaaagtgcatggctgagacatgtcagtggacacgaatcgagtgtggagtccagacttggttccatggtcacctcataaggcttagggcggttttccagtcggggattataccgacccgctaatgctaagaggggcctgaaattcccacgagggaagcggccaaaaagtacgaagcgattattcatatgagtgcaagaaacctccaatgggaaaagggagaggttaagcccctaggaaatgggcaccaacctccagaatgggaaataccccaagtaagacagggagtacaaaaggccaagcagacaataaaattccccctgacagtcctctgggccttatgttagagtactggaggtataatgaaagaaccatgtaacacaaggaaagacagtgaatgataaaatattgctgttttatttggaccaaagaacctatcctcagaccctcagtcttttggccaaagtttggatcagacgaggattggatatgccaactcttaatccagtatgttaataaaaaaagtccagtctctcaagaggaaatagattatgctctgtgttggagacaggaacatgtccttccctttcccttaaaggatgacgtaaaagagaaaccaaactcagtaccctcctaggacaacccagttaagtcagattctacatctaaagatgccaatgtataggatcccctagaccatcttcccccgcctaccccacctc

SEQ ID NO: 1243534 - DNA, 4001 bp, Homo sapiens
cggtgagccgagatcctgccactgcactccagcctgggcaacagagtgagactccgtctcaaaaaataatagtaataataaagagcaggtgctacctcccttccgagcagcccctctgggaggatgcacagactccaacggcactgctgaaatgcagagcgtttggggaccttctcattgcgaatgaccttccaagcctaaagaagtcttctggtattcttagtggtggcaaatcttcctcctctcaagctagtcactttgataaagtgctgcaagtcagagtctcacctgataaggtgagctaccaaccacgtaagtaaacttttggtcaaacctggagggtgactattgaataagactgattttcccatatgactacatttttactaccacaacaggagttctaaagagattctggcaaagaagcaccgatgaaatacaagcacattttgggacaattactttcaacagagcagtacctatttgaatgcctaagttctggtacatctggttaaaattctgactcataacctcatggacttaaaatatctaaatgaacgttatcaaggttggtgacagaccccacgtgcaaagtgaccaagcgtgaccactaaactccttgataaagaggtactcaccttgagatgctctgtagctgtgacaaaatacaaatctctgtaaacacgatgtaggccataggttaacttacctgtttgctttctggagtgactccacaaagctttcttacaatatttcagcatgtcccacctacaacgggagaggagtttccggctttgggacacatttgactggttccagggctggctgggctccatactgcccttagatagtaaaattatcaggaaaagactctcctcccaaagctgggaagcgggattcagccgaggtcaaacctcacccggataatcccaactactgaacgggaaaggactactctacagacaacaggctggaggtgagtctaacaggagacatgatgagcaccttgctacaccccaaacggtacttcagatgccaaacactctcttcttccattttcccaaatgggtctgaagaatgacctactcttgcaaatgagttagcgttgttcgaacaaagctcatttaaaacggccactctacccggcaaactcagttgtcataaagtattcaggaaaaatgtttggcaggagtaaggctgttaagtttcagttcttccagcattatagctgcagttggtctatataaaggacccagcacctctgatctcctaatccaaggggcaaggaagttacatactcctaagagaccggcgcgcgtcttggggcaatcactgcgcccaacctgtgcacactttgaagctgcggagcaagttccaggaggttcataaagagctcaaagttctccgaagagcccagcagcagcccgggatgacctactctggaggtgaatctgggcgcctctcaccgccccttagccggcggcacacatgtgccacgcgagtggcccggaagagaaatgacagcttcaggaaaataaactctgccgcggggcgcggaggcagcgcgcgaggagctcgggcgcccagggcgccccaggaccgcggggccggcttacggacggaactcggggtggtgcctgtctcaaggtccccttccctgggcccgagggccacgcttcggccggtgggtccgcacggccggaggcgcgccgggctcccgggcctccctcccgcggccgccgccgccgcctcggcggcctcctcctcccgccgccgccggcccggcctcccgccgccctcccggccccagctaacctcagcgctagggcggagaggaggccacggctcccctggagtcggagcggcgtggagaagacgtcccttggcccttccgctcttcacaggttctggctccaggctcgacacgggcggaacaaacgggctccactacccgcgggggccggccattgtgcgacgtcatcaggccgcgacggtagtcctacggccggcgggcttccctccctcgccccgccccctccagcttccttccggcctccgcgcggttccgcccccgcagcgcgcgcccggacccgcgcgagccagccgaacccccgctacagcgcaggcgccacggggagttcgcttctcaggcggcgggcgtgcggatccgcgcctgcgcacagagctccccgcggccgccgggtcacgtgacggggctccggctgggccggcgggttcttcatccccggggatgatcgagttcatcaaagtggaaaacttaaggcggtcttcgtcgggctgatacttcctgctttattgaatgttgatattaaatgcttacctccggaattattttttgaggtatcgactttagattaaaagcctaacaattcttacctttcccgtgggctgcctggctccccgcgcggttcaacgcgagcagcgccagtgaggggacctgtcgcgtgtcctgctcagcgcggtgtcccacgggcgcgtccacagcccggggcgtccaggggctgcagcggtgcgagctgctctagagacggagggcccggccggagaccaggggccggcggtttcatcctgcgctgacccttgccaacgacgtggctggtcctggggatcacagggcttcgctcatcccatcttcctccatatccccaaggtggaaacaagggggcgagatgtccacaaactgaggaacagacaaaatgctggctgtccatgcagtggagtgtgagtcagtcatcaagaagagtgaagttcagacccatgccacaacatgggtgaaccttggaaacatactaagtaaagcaagccaatcgcaaaaggacaaaacctgtgcgactccatgctatggaccgagttctgtccccctaacatttgtatgtgaagccttaatccccaatgtgactgtgtttgcagaaagggcctttagagaagtaattaaggttaaatgagattataagggtggggtcctgatctgataggattagtgtccttggaagaggtaccacaggcctggcactgtggctcacacctgtaatcctagcactttgggagtccaaggtgggaggaccacctcctccaggagtttgagaccagcctgggcaacaaagcaagacccctgtctctacaaaaaaattaacagggcaccgtggtgcgtgcctgtagtcccagcaacttgttatggttacgtaagaggaatgtgaattcaaccctggtgattttgggtcgtgtcaggagcagccctgcgacaccagttggcaccttctgcagactctatgtgtcgataagacaaggtcccacccagcaagtgcccttttctcagctgatgaacataagcctgcatggacgttactgtccatggaaaggagcggccggcaccggctgtgacagacacgtgcctgtctgcgatctgagtttcatgaacagtaaactctgttggtcacagcctctttggaaaacaatgttagttaaaagaagtgccctgtgaccagcagtgccaccctcgacagggttctccaagtgggacccgggcaagcagcctcagtatcactaggggttgttagcaatgtgccttcctgggctctgccccagagtggccgcaccagtgactgggagtgaggtcccagggccctgtggtccatgaagagctctcaggggattctgatgcccagtggtacaggtgggccaccggactggggtgtcatctgcccgtgggcatgagacatgaacaaggacatagcaggtctgttagtagtcataactaaaagaacaaaggagccgggcacggtggctcatgcctgtaatcccagcactttgggaggtcgaggcgggcagatcgcgaggtcaggagatcgagaccatgctggctaacacagtgaaaccccgtctctactaaaaatacaaaaaattagccgggcgtggtggcgggcgcctgtagtcccagctactcgggaggctgaggcaggagaatggcatgaacccgggag

SEQ ID NO: 1243535 - DNA, 4001 bp, Homo sapiens
tgagagcttaagggaaggaggccacatgccatcagagaagcaggaaagataagcagatagacatgtcttctcagggccaccacccattcagatgccccagctgcgcgctgtccagtcgaaatattgtacaaaatatattacacaaaataagccatacgtgtcattgtatgtatgtatgtatgtacgcatgtatgtggagagggagtctcgctctgttgcccagggaggagtgcagtggcacaatctcggctcactgcaacctctgcctcccggttcaaacgattctcctgcctcagcctccccagtagctgggattacaggcgcctgccaccacgcctggctgatttttgtatttttactagagacggggtttctccatgttggccaggctggtctcggaattcctgacctcaggtgatccacacacctcggcctcccaaagtgctgggattacagacgttgagccaccccgcccggcccgtatatgtcattttaaatttccaaatagccacactaaaaaaagagaaaaagaaaagcagtgagattaacttttgtttttttatttgtttgttttgagacagtgtcccaggctggagcacaaaggcacaatctcagctcaccgaagcctcaatctcctgggctcaagggattctcccaccccagccttccgagtagcagattctcccacctcagcttcccgagtagctgactaccggcgtgcgccaccacgcccagttaattttttgtattttttgtagagacaggggtctcactatgttgctgaggctggtcttgaactcctgcactcaaacgatcctcctgcctcagcctcccaaagttttgggatgacaggcatgagccactgcatcctgccaagattaattttaatgatctattttcgttaatccaatttgtcccaaacatgaccatctcaacatgcatttaagtataaaagattaccaatgacatcttttactttctttctcatccgaagtttttaaaatcagatgtacgtttcacagctgggaccgcaactgaaactggccccatttcgtgggctccatcgtcccaaacggcggggggtcagtggccaccgtactgggcatggcaaggtccttcgtggttcaataccgaacacgggcaactccttttcatccctagacaggtggggacaggaaaatacccaactcctggcaaatccacccagtcccgactcaggctcgacctcggaggccccggccgggcctcaggcggccccacccctttgctgcccaggcctgaccggaagccccgctaatgggaactgacaggtcccggtcccggtcctcccgggcggcgcccccgcctccgcggaccccaaggcctctccccgcccggcccagggctgcaccccgcgcgaaaaaataaaaaaatcagaaaggggggtaaaaaagacggatgagccccaaattaatgcgccaagctctccgccggcatccttcccgcccccaagcccaagacgctgaatcgggatccccgcgatcaccagagcagacagaaataaccaaaaaaaaaatttttttttagtgaaatcaccaaaaaggagacattttgccgagggaatggcaggcagaagtgggtcacgttattctcggtgggggaaggggacggcgcgcccacccgtccctccgcgcgcacaggccccggcccggctcctctcagggtcctctcgggtccgcgggccccggaccccgccgcccctcccccgccccgcccgccgtccgttaacggccgcgcgcgagcacgaggcggcggcgcgcgcggggggggcgggggcgcgggcgcgcgcgtttccttcatgcccggcggcgtccccctacccctacctgtggggacgacgcgccggccggcggcagaaggcaggcggaggcgggcggcggcaggcgggcagcggtggcggcggcggcggcggggcctgggtgctcgctcgcagctctccctcggttagcggcggcggcagcggctcggttgcgcccgcggcggcgccctctagcggcgggaggccgcgcttgccgcccgggagacgccgccattggctgcgccggagctacgggctgggggcggtggcgccacgtctgactgggggcagggacctgggcgcgccgttcaatccggagccccggcgtcgacgcgcggcccactgggtgagccaatgggaaggccacgttgcgcactggacgcgctcggactcaagactgattaaccagcaccggggttttctggggcctcgcctgggccgcggcctgagcagaagcgctaggaggtagaacagcgtccagcggggagaggagctagagtcggcatcgggaagcccaccctggagcctgcttagcttgacgagccctcaaccggggcgccctgctctgcgaagagtaaccctgcatcctcagaacaaccgtgattgtcttcattcctacatatgaggaacggaggcgcggagccccacggcagccggggatccaaagacagcctccctccagttccatctgccggctcttggaaggcctggatccctgtccttcagggcccagcccaaatgccgcctcgtccatctgcattttacggccaggtgccccgctgcgggcacggcttcttgtaaaatgctcagctcagcagtgggcgaggcagggtccctgccccatgggatggagggcggagatcaggacccacaagagcccaaagaagaccattttggtcggtgaagaccaaagaaattcaagcaggaggatgtgacaggagcttttgggaaagcctctgaggaggtgacagccatgcaaccgtgttcggggaagtgtgccgcaggcagaggggaaatgagtgcaaaagccctgaagctggagttcggtgtctggataacaggaaaggcctgcatagctgatgtgtgccagaggggagaaagatctgtgacacaggggggccgccatgtttaatttggagttttgtgtggaagggggtcattcattgagtctgaattgggagttccgaggtctcatttatattttagaaagttctctcctgctactatgcagagattgggctgtaggagagacaagaggggaagtggggactctagctacagtagctcttccaggggtctgggtgacgtagatttacaaaccagagtattagctcaggctgccatgacaaaataccccagaccaggcagcttagacaacaggaatttattttctcacagttttagaggctgcaaatctaaggtctgggtgccggcagggctggtttctggtgaggcctctctccctggcttgcaaacagctgccttctcactgtgtcctcctatgaccttttctctgtgagcaggaatccctggtgtgtcttcctttttcttacaagaacaacaattttactagattagggccccaccctatgacttcatttaaccccagtgactacctaaaaggccgtattcaaatagtcgtattaggccaggcgcagtggctcacgcctgtaattctagcactttgggaagccgaggcagatggattgcctgagctcaggagttggagaccagcctgggcaacacaatgagaccccgtctttactaaaatacaaaaaattagccgggcatggcgacgtgcacatgtaatcccagctactcgggaggctgaggcaggagaatcgcttgaacctgggaggcagaggttgcagtgagctgagatcgcgccattgcactccatattgggcgagagagagagtctgtaccaaaaaaaaaaaaaaaagtataagggtcctatgacttcatttaaccctaatgactgcctaatatgcctaatagccatattagggttagagcttcaacatacggactccggggtgggtatgtgcggagcggggagcgtttcagtccgtaacaccaggtaagtgctgcaacagatattggagagctgatgggctgtggttttagggaagctcctctaagaaaggggtggattataccgggc

SEQ ID NO: 1243536 - DNA, 4001 bp, Homo sapiens
gctcacacattaagaatccccttaaagagatgacgttactgtagcaacagccatagaaattattagtgggtggaatctacacaaaggagtaacagcacatgaaactgaccataaatgactgagattccatgaataggtgacaatttgctggcatgtcaaggcttacatggattactataaacaactacatttcctaggaccctctgcacagcacacagcctgaaatacagggtgggagccgaacttaaaaagaaaactatagtcttggaggtaaatgtcacacacacaaaaatcaatttaaaaaaaccgatgtatgtactacaaccacttcttacaggaagacattaaaaaagaaaagccacaatctacgattgaaagacagctttaaaaacacacacataaaaaacctagcaaaccagacggtgttctcagccactcataaaagcaaagtcttatcaaagttttaacttcaaagagcttaaagacactgcaaagagacactgagcaagacttggtcccgactgcaacctattcccttccaaaaaataatcagtttgtaatctaaatacacatcacaccaggtcaaagtaatctcttccggcagcaaaattttggcactggattgcagggggctgttcaaaatagctggagccccagacactttgcgttttcagttctgaaacacttagacaaaagttcacatcgctaagtggatggccaggacgcccttccggttcaatttggagaccggagatctttaacctaacctaacattccttaaggcatcggtgccctcccactcaaagtcagcctgggttttgtttctaagggtcgccaataaataggtttcacgggcatttaaggctctgggagtctttttctgtctgttacaggtagcccggctcttaaaaacgatcacacacaacgttcacaagcatgtgcacattcatacacacgtgtgcacatatacatgcccacatgcgacacacgcgtacatcatacagcatgcacgtgtccataaatgagctcacacggacagccatgtcccgcgcccaggcccccagcgacacaggccccaagcagggcctccacctgtgtggagggagcggctcagacggggaagccccagcgccttgcaatgttcacctcaccggcggcttctggcgtggccacggctccttccttttctggtaataaataccagatttggggaaaccaaggcgccgcaatgtgtgttatctgtcacccaagggccccattaaggggacaaaggccttatcgcgtttgcagccggctaagtgaaaggagggcacctgggactgtgagctctgaccgcggacgtctcccgcaccgctcccgcggatcctcggacccagggcccctgcagccgctcctgcccaaggggcgcgaggcggaggtgtggaggctttggggcacgcagaggggactgagggtgtgggctcagggccgcggtgcggtcttggggcttaaagtgcagacttagggtgaggagtgcgggcttaggatgggggcttgggatgtacggcggaggcttgggatgtacggcggaggcttgggatgtacggtggaggcttggagaggtggggcacacatttggggtgcgacatagaggcttaggatggggcttgggatacgggctgggggctcgtggtgcaggttggagacctgggtgggagctctcagtgcaggctggaggcgtgggtcggggggtcgcggtgcaggctggaggcttggagtgcagagttggggatgcagacttggggtacagggcagagctcggggcgggcacgcaccttgtggcaggctgggcaagtgggcagcgcgccgcccggcccgggcgcgcccttgccgccgtggcccccgccgccgttcaggctgctctggatctgcgtgagctcctggcgcagcacctgcttctggtggaagctgaaggccgggtggttggaggccatggtgaacagcagcaggaactcatcgcccgtgcggccctcgttaagctgcagcccgtagttgtggatgatggagtcgatgtgcgtgagcgtgcggtagagcacgcccgccgcctcgcgctgctccgagcccagcagcgccagcgacaccagcagcttgctgcgcaccacctcgtccgtcaggttggtgaggctgcccaggtcggccgggttgttggccttgatctccgagtcgcgcagcgagtggtagtccttgcgggccaggtcctccaggcacgagccgaggaagcgaagctcgagcgggatgcacaggtccagcaggccgcacaggaactccacgcgctgcggcgacggcagctccgagaaccagcggtacacgccgtccctctgcagcgggcagcgcttctccaccatgctgccgcccgcgccgcgccgcgacccggggccggggaccgcgcgggggcggccggggggcgccgggggccgcggccggggcgcgccgggaccggggacgcgcgggccggggccgggtccgggcgagggcgcgcgggcgccgcgggccgggcgggcgccggggcgggggcggggaccggggccgggcaaggctcccgtcaggggccggcgggcgggcgcgcgcggggcgccgggggggcccggggcggccggggcggccgggggcggcgagcggcctcgggccccccgctcacggggaggcgccttccccgcgcccgtgcccagcggcggccggtgcgcggcggcggcggcggctgctcctcgtcgtcgtcgtcgtcgtcgcccgggaggcggccgcccccatctccccccgcgccgcagggtctgtcactgcgggccgccccccgacggagccgccccggccatgccgtcgccgccgcccgcgcctccgcccaggccggccgttaccccgggccgcgggcgcggcgtcgccgcctggggagcgctgggggccgcggccgcgaaacggacgctggagggggagggacgcgcggcgggaggcgcggagggatccggccgggacttgccggccttgctgctcccgcgcggcggacggatccgggcccgagcgcggcggcggcggcgacggcgacggcgacggcgacggcgacggcggaggaggcgccggccgaggagcggagggatcgtcgcgctcgcggctgacgggcggccgggatcagcagaagtgggcggggtggccgcctctcgcgacagcccgggcctgccgggcccgtcccccccccactgattggctcaggcggcccgttctcggcccgtgattgtgccgggtccccaatcccattcgcccgttccgcggccacgcctccctgggggctgtcgatcatgttggggccaccgcctcccgtccctcggcggccgtcaagacgcgattggtccgcggaatcggagaggcggaaaacccgggctggatttctggttgcttttgttcccgcaaatttgcgtggagcattgtttttcggcgaaaacggggcgttcggccttcctgctttatttttgagcggtgtaagagggaggtagtgggtatcttcgagaaacggccgccgcggggtccggagccccgggttccaatcccgggtcggccactgcaaagctgtgtgaccttgggcgagtcacttggcctctctgagccccaggcgcctccccgggaaaaagagggtaataataaccgcccccgaggtttgtgcgaaggtgttgagctcacagagggccggcaccggcacttttgaggcggctgacttgccctgggggtgtgatgggaggtgcaagctttctccaaaagcctcgtccaaatggagcctttaaatccgccttctttccgcggctacttcaccagctcgccaaacgcagaaaatgcaaacacaggggagggggcaagggagctgacctggctggaagtaaacagaaacgccaccctcccctggcacttgcattggcaccggattgcaggtgggggaagggccggtgcacccaaccacctttaaatcccaccacttacac

SEQ ID NO: 1243537 - DNA, 4001 bp, Homo sapiens
agtcaagccacttttttaccatctctgctgtcattaccccaatccaaacctccagcatcgctctcctacagtgtttgcatgataataaccaacaccagcatttagaatgcacttattctgtgccaggcactgtttcagtggaattcactcattcaatcctcatagagctctaaggaaggtcctatcatttccaactgttcttgtagatccctgtagtcactgatttcagatgtgactggcctctcacttcctcataaaaaacatacagaacacccactcccatcatgaggacactgaggctcagagacactaaatgagttattttaggaggcacagctagattggcagaactaggatggccctcaactgacttcccggtatgtctgtcacaaccatgctgctcagcagccagagtgaagtgagcttttcaaacgtgaaactcatccaaactcttctttgggaggccaaggtggctggatcacctgaggtcaggagttcaagaccagcctggccaacatgttgaaaccccgtttctactaaaaatacaaaaattagctgggtgtggtggcaggcgcctgtaatcccagacttggggggctgaggcaggagaatcgcttgaacccgggaggtggaggttgcagtgagccgagattgtgccattgcagtccagcctgggtgacagagcgagactccatctggaaaataaaaataaaaataaacaaaaaataaaaaactcttctgccgcttgcagtggctcacacctgtaatcccagcactttgggaggctgaggcaagaggatcccttgagaccaggagctcgagaccagcctgggcaaaatagtaagacctcatctctaccaaaaccttaaaaaattagctgagcgtggtggcgggtatctgtagtctcagctacttgggaggctgaggcgggaggatcgcttgagcccgggagccggagcctgcggtgacccatgttcacaccacagcactccagcctgggtgacaaagggagaccttgtctcaaaaaaataaaaaattggctgggaacggtggctcacacctgtaatcccaacgctttcggaggccgaggcgggtggatcacctgaggtcaggagttcgagaacagcctggccaacatggtgaaaccccgtccctactaaaaatataaaacttagccgggcgtggcggcgggcgcctgtaatcccagctactccagaggctgaggcagcagaatggcttgaacccgggaggcggaggttgcaatgacccgagtcgtgccactgcgctccatccagcctgggtgacaagagcgaaactccgtctcaaagaaaaaactaaaactcttcccatggtttccttttaaaacagaccctccatgaccaacccctccatttcaataccagagagcctaacccgacctgaaatcactttagtcatgtatgacatccgcttcccagcccccttccttaatgctctgggttctggagacagaccacgtctgttgggagtcctctgtgcccacgcctggcacagagcctggcaaagagtaagcgctcaaggaagatctgtgaacttgatgcatgctaaaaggaagccccgcgctctgccggggccctggaactcaggccaccggctccaggcggaagcgagcccaaagccggccaggcggcagcatccgctaccccgtggctcaagccaggctccgaggtgagaaaccgggcggggactcctcacctgcgcgccgcggaggccgtgccagatgggccctgccaaagtcagccagaggttcgggccccacgcctggccttccaccctccccggggcagccgcgcctcagaccctcgcggtagggacggtccccgggactgggcggcaacgcgcccgggagcggggccccatcccggacggagactgggccggtgagtcctcgagctctggctctggctccggctccggctccggctccggctccggctccggctccagcaggctggaggggcggccaggccagacccagactggctgggcctcgtccggcgctgggcccgttcccctgacaacggcgcgggctacggcgccccacagcggccaaaccgcgctgcgtcactccgcgccggtcccccggccagggcggggcttgccagggaccctcttggtgccccagtcggcccattcccagattcttcctaacctttcgtctagaaaatccgcttttccctactcccgagtcacagcttgtctccccgaaatcctaacatctcaaaagcgcccccttccagtttctatcctgagaccaccgctctcaagaagagacctcccccaaccccagtcaacctgcacacttcaatgagcgtatgtgctggaacatccatgatatcccgacccttccgggagcttacaggttaagaggcaaacagatctagacaaataaattacaccactaaaaatgcaggtaccccagaatataaagcgagaagcgtaagagcttaaaataagcagcacaaaatatctcatttatttattgcctttaaatcaagcaaaaatcaagccccaatcttccaggctgatgggaaattcagtctttttctattttttaaactggtctctgttacccaggctggagtgcagtggcacgatcacggctctctgcagcctcgaactcctgggctcaggcgatcctcccgcctcagcctccagagtagctaggactacaggcgaacaccaccacgcccgactaattttcgcatttttttgtagaggcgtggttttgccatgttgcccaggctggtttcgaactcctgaactcaagcgacccgcccacctcagcctccaaaagtgctaggattacaggcgtgagcccctgcccggccgggaaattcagtctcagtctccactgtactccttttagctaggtaattccaaaggactcatgttttcctatagcaaaaaacaacaatcaaaaacaaataagcaaaaaactctctggtcagggttttgtctggtactgaggccacaaccattgctccagtccacaaagattttcaggtttgggctctatgaggccatccctgcctgaggcccctgcctctccctggggctgccagggacagacacctgcttcctctgctccatggcctgcagcctcccttccctttctctacctgggagacttccctgctaacttggtttccctaaaagtcccctctcctcttctccttgtggacactcagaatggaatcttctatgagctcaggctttctcaaaagacaggaagacactttgtcttctgctatctgtcctgtgcgcatctccaaggcagatatgacagatagggaaagaaaacatccttatctctaaaatgtataagtcacaagcatacttattgtatgttttattaggcaacataactactccttctctgtcacatgacaggtgtgtgggtccttgtgcaagtgacataacctattacttaaattcttgttttcaagactgataaactcaaactcaatgtgagataaatatcaatgctattctggcttcagagtacaagctgactacttaactcttatctggaattggaaaacttcgggtcaaacagagatcatgacccagaaatcaaggtgaaggatgaggctggatgcagtggctcacacctgtaatcccagcactttaaggaggctgaggcaggaaaatcacttgaagccaggagtttgagaccagcctgggatacatagagagactcccatctctacaaaagatgaaaaaaaatagctgggcctggtggcctgtgcctatagtcccagctactcacgaggctggggcaggagaaaagaatcacttgagttcgggagttcaagattgcagtgaattacgatcatgccactgcactccagcctgggtgaaagtaagatcttatctctcagctggtctcagtggctcacacctgtaatcccaacactttgggaggccaaggcaggtggatcatgaggtcaggagatcga

SEQ ID NO: 1243538 - DNA, 4001 bp, Homo sapiens
ttaccttttcaaatagtcttcttctccttcaactctcaaatcagaagccaatgtgggcccctaacctattttccagaatgttcaagaattgcaatttagttaatatttcagttccattccatatttcaaatatcccaagagcctttcactttaaccaagttctgactttttttctttttttttttttttttgagacggagtcttgctctgtcgcccagactggagtgcagtggcgcgatcttggctcactgcaagctccgcctcccgggttcacgtgattctcttgccttagcctcccgagtagctgggactacaggcgcccaccaccatgcccagctaatttttggtatttttagtagacatggggtttcaccgtgttagccaggatggtctcgatctcccgacttcgtgatccgcccgcctcggcctcccaaagtgctgggatcacaggcatgagccactgtgcctggccaagttctgacttttaacaagcgaatttaacaaagtgactttttttttttttttgagatggggatctcactctgttgcccaggctgcagtgctgtggcatgatctcaaactcaagtgatccccccacctcagcctcccaagcagctgagacctcaggcgtgtaccaccatatccggctaattttttaatttttttgtagagaaggggatctcactatgttgcccaggctgctctccaactcctgggctcaagtgatcctcctgcctcagcctcccaaagcgctgggattacaggcatgagccacgagccaccgcgtgcgtaccaggccacaaagtgactaaaaggtgatttcaggtatgtaaacactgtaaaacataacaaaaaagagattcttcatctgtgagatgaagagttcagaaagaaatattaatacacattgacctaaatctctaaaccccttgggatagtaacagtaaaatagataaatacgtgcgcttaagtgcatacactaagcagactgaaaatgcaacactgtagcagcgatttgcccagcactgtatacagcccagacagtaaaagaagctacaaggcaggtagccgcatcaacactgtctcttacactccaatttaacggccacaataaactggttcttcataagctaataaagtgtgtctatctaactgagtgtgacaaagttgtagaaggaaccacaccaggagaggtgagccttactgccctgaaagctttactgtcccagatgccctttcaggcaactaacacccaaagatgactgacgtggagcaggagggaagataactaggaagatgggcagagaataaaagagaaaagtttacagcttaagaggaagagaagccacaacgcgaagtgcgagactgctcattgtaatacctgcctattaaaaaactctttacagcttacacagggtttatagctgctctgtaaccaccaccccgtcattagccacacagaaaaccagggctcggagagctgagtgtcacgcccaaggtcaggcaaaaagctggggctgcaatccgggccctatcccgagagagcaactaaggaatgacaagggggcacctggaagggaagtcaggtgcgggcacggaggtgcccctaggaactccagaaggtcgcaggtgtgcggcggggtggagacagagcggcggaaccgacggaaggacagggcacgccgggggccagaagtggccgggagacccgggagtgagcagcccgcccggcccagcccgccgcactcacccgaggcccgggcggggtcgcccggcgctgcggctcctcccggcctgcggcggcggcggcggcgactgcagcggccgaggcagggacgcatcatgcggccgcgctcatggccgggctggagcgggccccgcggctcggctcggcttggtcccctgggtcccgccgggcaggtcggaaggaggctgcagccaagcaaatgcctcagcccggagccttggctggagagcggggcggtgcgagcgccggaagtgaacccgacgaggtcagtgacgtcacgccggcgcagttccggccgcgcagctctcgcggagaggggcgctcgaggcggtttgaggggacccggaggctcttacaaactggcagttcattgagaaaaggcagcttttagtcacagcccctctcgctaagacagagatgccgccaaactgaagtccggaggagaaaggataggggctacgggctgcagcagggtccaagccacgccgttaggctgcggaaccgggttgggaatgcccttagcggagtgtgtacccgcgcccgcggcggtgtctcagaggcagctccagtggcctgtactatatgcggggatgtgaccgaaggaaatgggaaagtaagggagcgggagtggaaatggctgagccagaaagcacttgggaaaagaggaaagcgccctgaactggggattggaggcctgactcctgaggtccgcggagcccccggcctcctccttgagggacttggacactagagcaccgccactgtcccttccatataggaagccctaagtgtttgaaagtaggaacatgtattttaaggccgggcgcggtggctcacgcctgtaactccagcactttgggaagccaaggcaggctgatcacttgaggtcaggagttcgagaccagcctgaacaacaatggtgaaattccgtttctattaaaaacacataaattagccggatgtagtggtgcacgcctgtaatcccagcagctactcgagaggctgaggcaggagaatcatgaacccaggaggcgaaggttgcagtgagctgagatcaagccactgcactccagcctgggcgacagagtgaacagtctcaaaaaaaaaaaaaaagcatatcttttttttaaaataaaattatgactctcacacaaatataaaatgaacatatgtcaaagataccatttaactcattaatgatggtatatatacaatgctccactagagctctagatagcttaaagacaaaagtaagaccccataagacgagataacccagaagggtatgccagacaatacctacttgttcaatgaagacacctaaagaaaaccagaataaggccaggtgtggtggctcacatctgtaatcccagcacttgtaggaggccgaggcaggcagatcacctgaggtcaggagttcgaaactatcctggtcaacgtggcgaaaccccatctctactaaaaatacaaaaattagccgggtgcagttttgggcgcctgtaatctcagctactcgggaggctgaggcaggagaaaccgcttgagaaccgggaggcagaggttgcagtgggccgagatcgcgccattgcactccaacctgggtgacagcgagactccatctcaatgaaaaaagaaaaagaaaaaaccagaatatatcaccgcaaaatatgcctcttcgacagaaaaattattttcagctgaaggcaattaagaagcgacaaatgcaggaaaagttctctttatcctcccttttctgcctaaagggcaggtgtaaattcacctttactggacattctagactcttcttagcccagagagggcaccaaaggaatctgcaaacaaaccttactctattaagtttcttcccatatataaacctttccatagtttgccacttttggaagctcaaaactcctttgtcctgtcatttctctacaaaagtattgttcttttattattattattattattttactttgagatggagtctcgctctgtctcccaggctggagtgcagtggtgcaatctcagctcactgtaacctccacttccggggtttaagcaattctcctgcctcaacctcctgagtagctggaattacaggggcccgccaccacgtccggctaatttttgtatttttagtaaagatagggttttgccatgttggccaggctggtcttgaactcctgactgcaagtgatccacccaccttggcctcccaaagtgctgggattgtaggcatgagccaccacgc

SEQ ID NO: 1243539 - DNA, 4001 bp, Homo sapiens
gggcagtaaattctggttgttctccctctaaatcctctctaagaagccaagcaaggcgctggagcacccacgctgcagatattgtagaaatttacagtaaatgtaggtacacgattgcagcacgctgccctattgattatgcagattgtgatcaatcttctcccctcgcccactgcccaagcctctttcggaggacctccaaataagttggtctgcaactagctattctcccaaagtagggaggaaaaaaagtaattttttaaaaaacataataaatcctcaattgtccccactgaaagggctcgagtcttttttaaattccaaagtgaatttatgttctgtaatttgcattacagccaagcgatcaccgtctgtcatattcttcaaaggtacttaacaaactgccttttaaaagtcactagaactggaggccagaaaaaggcaatcagcatgctccgtccatacagtgcttagatcaagtttcaataattgagaccaataaaaattgtcatatttaccctacttgaaagcaacaagggggaaaagttaagactgggtgccttttgaaagcgcttgtaatcaaagaatttgccacagtccaaagaatagcacaacattgaacaaaagtcagattctgagcaacagcttcactcgcaaagtgatatatacatattttaattcaatagttatacaagaaccctccgagtactgagtccatacacaacttaattatatacactgcatgaaatacacttagatctactctccaatagatatgcaaaaagacggacattaaaatgcataatgtaaaattcaggaacacggtttttgcatcgagtggagccgggcgaggggtgagagtggggaacccaacgtaaacaatcccagattcgcgagagcaaaaaaaaaaaaaaagaagaagaagaagaaagaaaagaaaaagaaaaaaggcatcctcggatgtctctgagctcagctggcggaagaaggccggccgggcgaggtctggccctggccagcggcgcagccccgagcccccgggagcccctagtgtccagggcagagtcccctctgggcgctcgcggcgctgccagtggggcagggcggagagcgcacaggtagaggatcgcgcggccgcctcgccccctccgggaccccgtggctccgaacgggctcccgcgtcgccggcaagtcgagccccagcgcggaaggcgctcgcccggccagcggtggcggccgcggcagcagcagtggctgcgaccgcggcgactgctccgggccgggtgcgcgccccgcgcggctgctcagcccggggccccggcgcctctcggggtggggcaaagttgggggccgggagcggcgggggcgggggcactcggcaccgcggacccccccatactccccccaccgccggccgccgcctttgtctccgagctggtaccccggccgccctcccgccctcggcccgcgccccggccggccctgcctggcggcgcctccaaactcgccgcgcgggcctcgccccgggcgcctccaccctcccgggggtcgccggcggccggcggcggcggcgcggggccggggaggagggggcggcccgggctcggcggcggcggcggcggcagcggcgggaggaggaggaagaagaagagaaagagaaagtttggcgtagggggaaggcgagcgggacgcagcgagcgagcagggcgcgggcgcggggagcgcgggcggcggcggccgggcgcgagagccgggagggggcaggacgagccccatgcaaagcagcccgggcgccccgaggagccccgcgtccgggcggtggcggcgggaggaggaggaggagcaggcggcggcggcggcgggaaaaaaaaaagagggaaaagttgccacttacgcggttgcttctccggcggcggcggctgcagcggcgctgctggcgacggcggcggcggcgggagctggcggcgcttttaatcccgaaaagaggcgctcgggccgcggagcccatcaaggcagcagcggcggctggcgggggtcggcggcggcggaggacgcgctgctggcggcggcggcggcggcggcggcggcggcggagctggagcgcgctcggcggagcccggggcgggaggcggccgcagccggggagccggagccgccgccgccgctgccgccgagcagcatggttggcggggagtttacagcccccggagcgggcaggggccacggaagagaagcggcggcggcggcggcagcggctctaggctgtaattgggatgcaaagcaggcggcggcggcggctgcggccgggaggaggaggaggaggaggcggcggcggtggcggctgcagcggtcggaggggacgcgctggaagtgggagctgatgagtgaaaagaaaaaaaagtctttggatctttattctgctaattagtttcctgcaaaaaatggctgtgattaattcagtgcgcatgtgcttcattacccaggcacgacgggaagggctaattagccaccttctggatcaataagattcagcaaaaaagaaaagggggaggtggagggaggcagaggggaggaagggaggaaaaaaaaaaaaaaacaggggaaagtgatgagcagggcaaggagagcaggaagagaggatgggagaagagcctagaagagggagagaggctccaaaagtttatgcatgtattaaaaacacacacacacacacacacgacacacacacgagcgcgcgcacacacacacacacacacacacacgcacacacacaccgagaagtggaatgcataggagcaacaataggaacctggctaagaatctttttaagattttttttttcctttcttcttcccccccttctcttttctttcttattattttcccctttctctctctctctctctctctctctctctctctctctctaagcaaacgcagcaatgtttaaattaactaggaaaagagcatctccaaagaatgggggcattagtggagggggacagcttagagtaaaggtttaagtgaaagagcagagacttcgaatagagaccactttaaattgcaaatctgagattttttaactgaaggaaaattacctccccccaaatcagaggacgaatgaagaaaatatggagaaaactttaacacataccatagactagacaaaaaatatatgttaattttgtgttctgaaataagacgcaatcggtcttctctggttctttagaaggagagaggaagagaggaggggtgattagaagaaataaaagggagaaagtgaatcagaactgaaaggggataacttcaggaaagacaagaaaaggaaaagttgcacttggaaacaagtccaactttctacctttctggacttaagagaaaagtaaaatcaattttctcgtgtgaaacctggaaagcagatgttttcaaaacacaggaagctattttgccatcaaaagcagggatgtaataaaggcagtgaaaaataatttcagactgaattcataagagagaaagccaatatatttaaatatagaggaaaggcctagggtgtagaaaggggaaattacataccccttccctaatgccaaaaaaaaaaaaaaaaaaagccttacagctacctccaagagtttggagcacagtcacgaagccaaagggcttgaaatgagaggatggatttcagataaagactaggagcggtacatcccactagagcccaaaggagatccctggaatcaaagacagcagcgagggaccctactactgtaccgattcccagtacatcaaagccatcacttaggctggtgcacggtacctccaaaaagcaagcaaacaaacgcaggaagaacaagagtcagtgtctgtctgtctctctctctctctctcccccctcttctctgtctcttcccccccctttcaaatcctagcctcagcgtcactgctactgcaatagattttttaaaaatgacaagttgtatttatgtaagttctaaatatgaact

SEQ ID NO: 1243540 - DNA, 4001 bp, Homo sapiens
acggcctttcttgatcaggttaccttggaaggtgtatgttttcctacccaatgcagtccccaccacagcactctcgtgtcctcctccagcccagcctcctggaactcgtgattttcagggtttcccttgaaacctatccagaaaccacagccattaactgaacgtgaagatttgacacctcctgaattcaggaatgagggaactcgaggggccaactctacaaactcgcacctgctgcttgacggcaaggaaacagagtttccccagctagggtgagctttaaattatacactatttatttagtgacttgtctccaaggatctcaaagcatagagagaaataagatgatgtgtaactttctcacaatctaccttcaaggctttgccctggtgcattctgacaagcaggacccagtatgaaggagaggccttccttctgtgcccaggcagagccatctgttctctctggggttttctgtcagtggctttagggagtcttcaaggactgttaaatgacacagagggtggggggagggatgaccctcctggattcacctgctcacggctttcacttaagccagtttaacacaggaggtaccactgtgccacgcaattccctcttagcacacaccatgcgtgagctgcagtctttgccctccaggccttttcctatcataacacaggtgtgtccaaggcagaaaagaacattttccagaaggttcgtttccctccaagcctacaatgcttctttttgttgttattgtttttctgctactgacctaaacataggcattcctcctcctaacaggataaaaatcttgactctctcctttgcatcagctccccaccccgcccctgcccaaggaaataaatgctctgacttttccaagagtgcgaaaaaactaaaattagagggtggacaagatgatctccaaaggtgccctccagctccaaaactctgattctccctttaattactccacaagcgcattcttcacattgtttcgaactgaccagcgacttctccagggctgaaaagggtgcatttttaggcggaggcacccaaacttctaaatgacaccagtaccacaagtattcagaaggcaggaactaatccaaaagcagactcaggaaaggaggagggaggggaggacagagggaagggaaggaaggaggaaggaagagctttactgtgtgcccagcagaatttaggcgctctcaccctaggtaggtggcaactggagtctgggagttcaagtgcatccagcctgcccttcccccacacgccccaagagaatgggaagttcagccaagactcgcagcacctgcccgcggctccaggccggctgcgcggacccggagggaggctgcactcacctggcacaccaagcctccgcgcacctccggagggaggcggcacttgcaggtccgggggccgcgccgccatgcgcaacaacgggaaattccagtggcacccgagccccgagctcacccaccccaggcggcatgctccccacctcccgctggccccaggactcggaggtggctctggtcaggagcagggggcccggagacaggggaggggagctcatggtggcggcagggctggcggtcggcccgtccccggagggaggtccccgggacgcggcggggattcacccacggggcgcggcgctggcgtccgggtccccggcctgcccgccgccgccgcctcctcctctgccgccgcccgcccggaatcgctttatgtaaatgaagcccaactcgcagtttgcagcgcgcaccgcccggggaaggggggcgggcggggcggggggccttcggggatccacattacacagcaacaaagcggaaggttaatttgaaactcacagccccgctgccgctcggctccccgggcaaagcctgacatctacagtcgtgccgggcgcaggccgggttgctcggcggcgaccgcgcccgcccgcccgcagggacccggggacgcacagggacgcgcgggacccgggcgctcagctgcgctcgctccgcttggggcgcgggccttggggcaggccgggggtcccgcgcacccgcctggggccaggaaccctcgccgctcggcctgcgccgccccgggaaccggccccggcgggaacaaagcccaggccctcccggaggcgctgacccctcgctcatcaaaggtcaggggccggcctagaatcgggcgagaagaaagggacgcgccctcggccactaaaaggagcctgaggcctccgaaccggagccatcgctccctgggccccgtccacgtcacagccaggccactcaagcatggggacaggagccaatgtggacaggaatttattggaaacacacacccatcctattaactgctttacagagcacttctgtttttcagttgcagaaacttataaaaacatccccctgctctccgttgagagtttaaggatagtttttgaggccagagaaagagaaaaggagagatcactagaaagataggaagaaaagaagtgggaagaaaaggagatgcagtctaccatgtaagcctccaggctccttagcctcaccttataaagccacatcaccgcagagatagcaaagatcgtgccctttcccagggagttcctaccgccagggtaagatttaaagcggccaccccagttggtcaaagtgattgctgggcgcctttctatctccccaagttcaccttttccagttggtcaaagcgattgctgggcgccttctatctccccaagtccacctttttccattctcatctgaaagccagccccaaagaaatctcaccggaagtcctctgtcctccctgtcagaatcccaccctcagtctgaatttactcccgattctcacagcacagaaaggcacctgcttttaccctttctgaaaaccacccacccaggctggccttacagcctggagagtcttttcctcgggcacaataatgaaccatgcaagtgttagaaatataatcagctcatgaggcgaagagcagtatgtatggaattgtattagcatgaggcacacactgactcgggagaaaaagggatgcttagctggtgaaaaccatcacatccccgtatagaaggctttttgcacaatgtaagttgggttcagattaatgtaagtatctaacctgttgggtacagacagcccctttctacattttagtccagaatagattctggggaaatttatttatttatttatttatttcagctaaggccctgggagaaaagactgcctccagggaatcatgtccgattagggacaaaggagggcacaagcccaattcagtcacacgtgagagcacgggggccgggtggggggagttaagagccaacagggaaggtggaggatgagtttgcaaaccagactatggtcactgcagagctgcttccagaccacctgacttcaggcccaagaacaggtggtgttttcaaaacacactgttatttatattggccatataagttgagaacaccttaaagaaaacaattaataatttaattgaaaaagtgactatgaataagacatgaagatgacgtatgctagcaggaccgcaagcaacgtggcccacaacgcagagatgcctctggcaatctctccggaaaaacgaagattccttacctgggataggtaaggcctgctggataaattaaagacaacaagaaaatgttgatactctcagaaaatctaattttgctgctttatcttcatttttattaacaggggacaacctcgtaatctggtgacatcatgatcctggtaggcccacagacaaataccttcaataaaataaaagctagaaagcccaaagaacaagctattaaagtaacctgggaggatgcagcactgcctgggcagaaggcccggacgggatctgccctaatactgccactgtcccaagaggcagaccctgcaacctgcctcctgcacttgagaggcctgacaagtagaactgagagtgaccctgagttcct

SEQ ID NO: 1243541 - DNA, 4001 bp, Homo sapiens
atctgggccgggtgcgatggctcacgcctgtgatcccagcactttgcaaggccgaggcaggtggatcaccaggtcaggagatagagaccatcctggctaacacggtgaaaccccgtctctactaaaaatacaaaaaaaaataaaaaaattagccaggtgtagtggcgggcgcctgtagtcccagctactctggaggctgaggcaggagaatggtgtgaacctggtaggcggagcttgcagtgagccgagatctcgctactgcactccagactgggcaacagagcgagactctgtctcaaaaaaaaaaaaaaaaagatctggaaaatctccaaaaacttggaaattatgcaatacaatctaaataaataagggtaaaaaatgaagtcacaagggaagttaaaaaaatttgaattgaatggtaatgaaaacacaataaaaaggctgggtgcagtggttcatgcctgtaatcccagcactttgggaagccaaggcgggagaatcacttgaggtcaagagttctagagcagccgggccaacatggtgaaaccccgtctctactaaaaatacaaaaatcagccaggtgtagtggcgggtgcctgtaatcccagccaggaggactgcttgaacccgggaggcagaggtttcagtgagctgagtgccactgcactccagcctgggtgacagagtgagactcagtctcaaaaacaacaacaacagaaaagaaaatacaagatataaaaatttgagtgatgtagttaaagtagtatttagaggaacagttacatcaataaattgtgtctggccggacgcggtggctcacgcctgtaatcccagctactcgggaggctgaggcagagcactactttaacccaggaggcggaggttgcagtgagccgagatcaagccactgcactccagcctggacgacagagcgagactccgtctcaaaaaaaaaaaaaaaaaaaagaaagtaaagaaaagaaacggtacaatacaaaaatatagtattacaatcacataggaccaccattttacatgaggtccctcgttgacagaaacactgttacgcagagcgtgactgcaccagaatcatgggaaaactttcgtatttcaaagtagtgaagaattttgggtgccccaaacggaaagaacagtaaattccacccgagagaaatttaaaacgtcaaaacgtatacatggcaaaatctaccagcgagtaaaatcaaaagataaatgaaaaaatatctgctgctcacataaagtaccaccgggttgtgagaccttagggaaatcactttccccttctgaacctcccgtgttcctgggatagcgacggagatgataacgctggaagtcacggggtggatgcgaggatcaggggaacacctcactgaagaccctctgacaaagggatcacggttctccttcaccaccggcaactgaccaggctccagtccttcctccacccacgaggcaccgggcatcggggcgtggccaggtgtgtcaggccacgcccccaccacgccccggcggggcctcgtcccgcgcgcgcgcgcccgccggggctccagaactcgctcccgcgcggcccgagcccttcgccgcccgtctgaggcgcatctcctgacaaagagaagaaggcgaagcctcatagccgcccttccctccgccgtccccgcccccgcacgttcggccaggcgtgccccgccggccccgttcagaggcgagcgccgggcaaccccggacgccgccctgagggtcactgccgcctacgagtagccgaagtttgggctcccaccctgcgcgggcacgagcccatccctcatctccttcccctcggccccaggccgcgcggagctacctggaagcccctctcgtacctggaggggcgcagcctccactcgtggcccagtgccacagcgggtcacggcgcagggcggcgaagacgcgcggagacgggggctctgtcacccactcgccgctggtggtgggggaagggcggccaccggcgcgctcgcagcactgcacatgcgcagaaacaggggcgcgggccgttcccagggtcctcggaggggtggaccatccacgttcgggactacatttcccacaagcctccggggccgcggctttagggactctcaggaaagtcttcgccttgttaggcggtctgatgagccgaccaaaataatctccttagcctgcactgttttcttttttcccagagtgggtcgtgaactacaattcaccacctcccccttaaatacaacaacttggcttttaaacattacacaaataatctataactgtatttaattagaatatatgtacaaaataaagtatccataatctcactttctaaagattaactgcgtataacattaagttcgcactttgatttttttgttgttgttacaaaactggccataaaggtatcatgtgctgcaactagcttttttcccttttttcccaggccactttgttgaggtatatatatttgttgagatctatatatttaagatgtacaacttgatatctacatttgtgaaatattcaccataatcaagctaattaacatgtgcatcacctcacatagttatttgtctgatgagaacacttaagatctatcttcttagcaaatttcaagtacacaatattgtcaactatcgtcacatagctgtgcatctccccagaactactcatcttgcataactgagactttgtaccccttgaccaccatcttcccatttcccttcaccctcagttcctttcatcctttagaacagttttaggttcacagcaaaatttgagcagaaaatacattgaattcccatataacccatgtccccccagcacacacaacctccccaaagttgatatcccacaccagaacagtgtatttgttacaattggtgaacctacagttaaatatcagcacctggccaggctcagtggctcacacctgtaatcctagcactttgggagcctgaggcaagcagattgcttgagccgaggaatttgaaaccagcctggccaaaatggtgaaacctcatctcttaaaaaaaaaaaaaaaatacaaaaattagccgggcatggtggcacgcacctgtagtcccagctactcgggaggctgaggtgggaggatcacttgagcctgggaggctgaggtttcagtgagccaagattgtgccactgcactccagcttgggtgaccctgtctcaaaaagtataaattaaaaaacaaaatcattggcacccaaagtccatagcttacattagtgttcacttgatgttgtacattctatgggtcttgacaaatgcctgtaaccattacagtatcgtacagaatagtttcactgccccccaaaaaatcatctgtgctccatttattcatccatcccacaacccctggaaatctctgatatttttactgtctccatagttttgccttttgcaggttgtcatataggtggaatcatacatatgttgctttttcagattggcttctttcatttagtaatatacatttaagtttccctcatgtttccctcaagttaccctggctttttttttttttttttttttttgacacagggtctcactctgtcacccaggttggagtgcagtggtgcgatcatggctcactgcagcctccacttcctgggctcaagtgaccctcccagttcagcctcccaagtagctaaaactacaggcatacacagccatgcctgggtaattttttgtattttttgtagagatggcattttgccatgttgcccaggctcgtctcaaactcctgggatcaagaaatcctcctgccttggcctcccaaagtgcggggattatagggatgagccactgtgcccagcctcagttcgttttagtgctgcataatattctactgtctgcatgtaccagtgttttaaatccattcacctactgaagatacattggttgcttctaagttttggcaactatgaataaagctgctctaaacatctgtg

SEQ ID NO: 1243542 - DNA, 4001 bp, Homo sapiens
gatactttgcatgtaaaggggataacgatcatgatgtgctctggctctcctcaaaccaagtaactgtcttgttttagtattggcaggtgtcttactccttaaggctcatccctgtaaaaacagaaacatataataagaagtatatatatatataaaaacgcaggccgggcccggtggctcacgcctgtaatcccagaactttgggaggtcaggagatcgagaccatcctggccaacatggtgaaaccccatctttactaaaaatacaaaaattagctgggcatggtggcacatgcccagctgtggtggctcacacctgtaatcccaacactttgggaggctgaagcgagcacatcacttgagcttaggaattcaaatccagcctggagaaaccccatctttacaaaaaaaaacaaaaattaggccaggcgtggtggctcacatctgtaatcccagcaccttgggaggccaacgtgggcggatcaattgacgtcaggagttcgagaccagactggccaacatggtaaaaccctgactctactaaaatacaaaaaaattagccgggtgtggtggtgtacacctgttaatcccagctactagggaggttgaggcaggagaatcacttgaacccaggaggtggaggttgcagtgagccgagatcatgccactacacttcagcctgggtgacagaatgagactgtctcaaaaaataaaataaaccaaaaaatacaaaaattagccgggcatggtggcgtgcaccatggcagaggttgcagtgagccaagatcatgtcactgtactccagactgggtgacaagagaccctgtttcaaaaaaaaaaaaaaaaaaggcatgatgtattgtatgcttaattcactataaactgctcttttaaaggacattactaagttggtgtttttatcttttaaattttttttttttttttttttttgcagagacggagtctcactatgttgcccaggctggtctcaaattcctgggcttaaacgatcctattgcctcagcttcccaaagtgctggacttacaggtgtgacccactgtacctggcaacttggtatttttatttgaattgatcttgatgtctcacacacctagcaactacaatctgtcattttcccttaattctaaagagaatgtagattcaaagatacagataccatctggatcttgatgtattttcaccaatatgtaaatcaatggataaccttagagttgtgacgcttctagaaaatgccccctctgccacaagaataaatgggttcacgaatcagcctcacattaaggtgaaggctggacttctggcggtggggagtgagttgctctattacatttttgttaaagcagaaaaggacagacacaaaaagctctgggagaatcagccctggttttatttttggttgttttttattttgttttgtttttgcctccttgcccaagaaagcccatctccagcctcttcctagacatgttctaaccaggcttctacggccccttacggactctctatgggccctgggtcagaagctggggctcctctctccacacttgccgacagtcacttcctcctctacagtgttccatcctgtgaccccactctctccatttcttattgacaagagttcaaaaaactggcgtggcattcaggactctcaaaactgacacttcccaacgcatccaatctcaactcctcccacaagatcgcaccacactggccctctctaccccacagagcagcctcccctttgggaatccagctccccaaagcctggggttttccatggccaggaggctccgatcgagccaagcaagtaagggagtcgccaggcagagaacaatgactgctccaaacacccttgggagatgggatggatagatggatgggatgcccaggaggttaggaacgcgttgctcacctggggcgcggcggtcggaggcctcggggccattcctgcctcgccagggcccggctccggggcaggagctggggagaaaggacagggcccactcaccccgctgcaacaccgaccccaccccgccccgccccgccccacctccgcccctaaaccacatctccaggggagatggtggcgaggaccgtggaaccagcccgggcctgccgctccccatccccgaaatgaaaggctcagcggcctcccggacacccccctccggccacgcccagtccccttcgcagggtggtgggcgaggcccggctgacacccgccaaacccaggaggggtcccgcccagacccgcgcactcagaatcaccgcctctggggggctccggatttcgcgacctccggcccacccagagcctcgggcagctcctcccgcccccgccgaagcctcggttatctccaattctgatctgcggaggggctgcccaaaggggcctcagccgcaccggggtcggacaatggccgcagcggtggggcagaactggaagtgcgcctgcgcactcggagcctcgctcctgcaaccccgggtccacgccgggcgcgcgaactacacttcccagaggcccgcgcgcgcaggccccgcctaggcggcttccgaaggcgcgttagggacccttgcgagggccgagggaggcggccagtgtggctcgagtgtgcgtgtccctgtattccagtcactgtccgcctcctctttgcaaggggcttgttgctagctggggaatcggccgggaaagaccctggtttcggggagcaatcgtacgcccctttcgacgaggctgacgataaaaacgcaaacatgtcaacaagataatgtcaggtcctgacttcagcggtaagagtgacacaggaagggagtgagacagcgtcagagggtggggcatttacatcttcttcaaaaggcaattttccatttctcattttagagaaaaaagaaacttcggacaaatccgtggcctcctgagcaatgtgcaaaggcagatctactgccgtgttatttcattacttcgtatccccttacgcaggattttgtttgggacaagcaaacaatgatggaaattttcttttttttttttgagacacagtttcgctcttgttgcctaggttggagtgcaatggcgcgattttggctcaccgcagcctccgcctcctgggttcaagcgattctcccgcctcagcctcccgagtagctgggattacaggcatgcgatgcgtcaccaggcccgtctaattttgtatatttagtagagacaggttttctccatgttggtcatgctggtctcgaactcgcctcggcctcccaaagtgctgggattacaggcatgggcaaccgcgcccggcccgatggaaattttcaacacaaagataggtcaacttttagatacagctattacgtttatgtaattatgtcttatatatcacagacattcaggctacatttcctagatttcagcttgatttcttaacattagagcattgcataccaacatggtagaaaatgactgcaacgaaatgttcctgatgtcacactgctttatcaaaaatatgaacattcaaaaataaatgctttatgccgggtgcggtggctcaagcctgtgatcccagcactttgggaggctgaggctggcggatcacctgaggtcaggagttcgagaccagcctgaccaacatggagatagctcgtctctactaaaaatacaaaattagccaggcttggtggcgcatgcctgtaatcccagctactcagaaagctgaggcaggagaatcgcttgaatctgggaggcagaggttgtggtgagccgagattgcaccattgcactccaacctgggcaacaacagcaaaactccatctcaaaaaaaacaaaacaaaaaagggagaaaatttccatcactgttggcttgtcccaaacacaaaatcctgcgcaaggggctaacaagtaatgaaataacacgtcaatagcacagggaggctgaggagggaggagcccaggaattaaaagaccagcttgggcaacatggcaaaac

SEQ ID NO: 1243543 - DNA, 4001 bp, Homo sapiens
gccccctccgctctgcactcgcggcccggccgcaggtgaggccagggcagcgggcaggcacaggcgctggcaagagggcgggcgggcgggcgccgccgcttggtgacaatcagccttcgcatcttaacgtgctgagatctgccatggggaggaggcgccccgggccgcgagcgacagggagggtccgcggccctgccttcctcgtccgggccctttctctgccccggtcccgggccgcaacgaggatgggccgcggtggctcaccgtgcacccgccgcggtcccagttcccaaagtgcgcgcgctctgcccgccccgctgggctgggctacgggctctcgctggcgctggcggccttatcagcgctggagatcggtttccaacctgcgatctccctgtccgagctatctgcatttctcatcacagtgaaacaccacacacacacacacacacacacacacacacacacacacaccccagaaccgaacataggcgctcagggaaggaaggaaaaagaaaccagagcacaagcgcggatcgggacctgtgggtggcttttaatacttgagttgacacgatagaaggcgactttcggaaaacaggtcccgtttgcgctgagggagttgggttacgggaaccggttcatgcctgtgacccccgcctcgggagacctcctgagtagggaagctcccacaggccccgcacaaggggtcctggtggcagtggtcgtgtggacaaaggaggtagtgcccgggcgcctacggctgggcagcgggcgggtttccgtcgtggcctcctggcagggctcagacgacctgcccgtcaggctccggggaggcgccccggggaggaagacctgcgtctgggccctaactgtgaggcgcaaagttattattggcatagggtggggagggtagcttcctgtgctcttgctccctcctggcacagcccagaggcccaggccagacagtggccccgacagcttagttctcatcgcgggggcactggcaatgtggcggcggggcagcagcctctgaccgggcagggagccggaccagcgagaaacttagtggcgtgcaggggcgaccccggcccggggctgcgtcctgggaggcccttctctgactcagagcagcccattgggatgccagggggtgcccgcgggcatccgagggcaccatttgttgcccatgccgccttggctgggacacttgcagggtccaggaggtgtcaccaggctggcggggcctgggttcaggacttcagcgctagggcacggggtgggggtgtctggggggctggagccaagtgcctaggctgcggcagctgcgcgctaccccctcccctgtcctgcggctctgcgacggcaccggtgggggtgggcgcgggccggtgcctgccacttggccaggcatctccgcggccccgggtgtcccctctgcctcccaggtctctctcttcgcttctagatacaaagcctgggagagtcaaccgcgcgagataagatcacaatttcagcccgtcccgacagaacgatcttatcaggacgggacttgcagaatgtaatattttaaactttatctgagcccagatcggggccgccctatcgccgcaccatctcgcagatgcgggggaggggcaggccgcgaggggccgagctgcccgggccgcgcccccaaacaccctcctcccggcctccgggcggccccctcctgggctgaaccccccggtgcccaagccgagacgcgggggcccaggccgccggcggagattagattacggcgcgcttggcacagcgcggggggcgcggcgcggggtgaaggtcgccggcgcccagggcagagcggggacgggcgggggcggcgctggcggctgggctccggcgggggtcgggcgcgcggaggggaccgcgggcaaagtttgactcacgcttgatctgccgggggttgctctgtttccgcctggacatgtctccggcgccgcgcgccctcccggcggccgcctctagccccgggcgggcggcggcgggcggcgggggcgcggcggggccgcggggccgctcatgcccccggcccccggtctccgcggccgccccggcccgcgcccccagcccgcgcgcccagccccggagccgctggagctgccgcggaggcccgagaggccacggtcctgcgttgcgggcgcgcggactgcccgacgggcgggtgccggctcctccgctcccgcgcactcgccgccgccgccgcggccgctcggcttttctcaatggaacccgcgggcggcgagcggcggagcaggcggccactgcgagggcgctcctggcgggctggaggcacggggcggggccgggcctgagcgtcgtcggccgccgcacctcccgccccgcccccggcgctccggccccgccccgtgcctcctgccgggccctgcacctctccggctccgcccccagcgccgcggccacgcccccgccagcccggctcttcgttgctctggctccgcccccagagccgcgaccgcgcccccgcccgcctcgctctttacggcgctggctccgaccccagcgctgcggccccgcccctgtccgtctgggccttcaaggcactgtccccgccccgctcgatgccccgccccttcctggttcggccccgcccgcgccccggggagacctctagcctcccccactcctctttggcccggaggtcatgtccccaggccgcgctgggagtctgagacctattcggttctgttctgctgccccgcggcaccgcatcctgcgccccgcctctcggcgccagctccgcctccaaacctgacccgacctggttgggtcctgagacgccgaggctccgcccccgcactgtaactccgcccccagcccttggtccctccctagacccctgggctctgccgcacgctccacgtgcgcggtgggggcagtgacaaccggctcaggaagcccgaggccttgacgcccacgtttctcttgggccagacttggggtgtggagcggattcgggccagggagggggcttccgtcccagactgcggtggggtccgccaactgagagcaggatctcgggtcttcccctgtgagctcagaccaggctggaaatcgaggagggggcgcgggagccggcagccctgggcgttgccacttggggcctctttcctcaccgagcctctccagggcgccccgcaggagacccacgaaggagttgcccacagcgcccgggccacagccccctctcggagcagtcagaggtcagcgaggtttgtgggcgcggtgctgtcagctcaggcctggaaatggagaactgttgccctctggggtgtgttcaagagccccacttcacggaggctcggggacttgctcaaggtcacgcattggggggctgtcccccactcccagctgagttgtatcatctccttttaatgttctcggtctacacttgctacctgctcccccatcccccgtactcataagaaacgggcgtcagtgggcccaggggcagacaggaaggacccctcccacctgatgatgagatcatcgcacagcaggactgtcacaccacccgccagcctgctgggagctcctaagaccccatctcgtgccaacttctgtgacctattccctggctccaaggaaggggagaagtgggggcttaccctcagagcctggtacaggagagtggcgggtgggtaggagaggcaggggtacaacactggatatgcgccgtccctccccactgccatggacagacaggaacactgagaccaggaggccaagagagctgcccaggggcatacgggtcctccagcccttcctgctctctgccagggtccagtgggcacagccttcccacagctgctctctggagggggtggggcccatgtctgattggttcactcaacctaggacctcccccccaccctcccgcccccacccagtgcttgtcaactggatggagcacctacctgtctgggtttcccaccaggcct

SEQ ID NO: 1243544 - DNA, 4001 bp, Homo sapiens
ccagcttcttcaggtaccacttgtacttcccagaaacctggatcactgattccccagggtgcagaaagatctcctccaggtctccgttgcgaccacccacatagtcgctccacaccttgccatagcgcacctgaagactgaggaagaggggaggaaggaaggagaaagaaaggtgatgatagggatgagaggtctctggctagtcctacagactgtgaagcctgggtgaaccctggaagatcctacagggaacttcaactcattttgccaacaaagagactctgtcacccaggctggagtgcagtggcatgatcttggctcactgcagcctcaacatcctgggctcaggcaatcctcccgcctctccctcctgagtagttgaggctacaggtactcaccaccatgcctggctaatttttttgtttttcttcggtagagatggggtcttggtacctggagcatggtttaaatccctggcatccctggcatcttgcccaggctgagctagaactcctggcctcaagcgatctgcctctgcctcccaaagcattgtaatgacagatgtgagccaccgcgcccagccaggaattcaaagaatcttaccctacgatgtagtatgtgttgactcggacccggagggcggtgatggggccgtccaactggttgccagaatgagagaatcgctttccaccaccacctccatactctccactataggaggaagacctggcctgaactggaggggcaagcaggagttggagggagaaatcttccaggagttcagtttctctgcatcacccctgttcctccgacaactcagctccccaccccaagccaacctccaaaagccttggccaacagcagtgcccaaggctgccttcccaagtccccaataccaggctcctggtatctcacttactggcattgccagaggctgaggcacagagaagggctaggagagcgactgtcaacattctggggctggagtgggaagaaaagagcaaatgaagattcaccttcttccttgttgacttgattgacccaggcactcctgacctgcagctcagaccaagccttcttcgtccttcaacttagacctagcagacccagtcttgagcttagaaaggactgtccatagcctgtagtcctgttcctctctgatgctaccttcaatgtccctgacccctccagctctccctggtctggctgtagccaagccctcctctttttctctcaggcctgaagatgaactctaactatctggattaagccttattccatcctggcacaaagcagaaaagttttctgaagtcagccaagcccaggtacatttgggttggtatggccatagccaggaaacgagttttctaaggagggagtagaggacctctcccaagcaaagagatggctgagtttactgagcccagaggctgagcaaagaaagcctcatcatctgtggtgaattggcctggattatggggcacctggagcatggtttaaatccctggcatccacctggtctcaaggaaagaagcattttagagttgcctctatgttacctggggagcaaagttggtgacagaaggaactgtgccagcaccagtatccaagcagtgctggtggaactaggacagacagagaagttgcagaaggagtcgggaccagctcaagatattagaccccaggtgcctggtctatgtgtcactattcttttctccactaacacacatctggccatttctattctcctgaacatcccaggtgtccccagtccttcagcagagacctagacagctttgcacctaagattactgcagacccagaagcgccaattaactcaagtctttcctgccattccttccaggcatcctcttcgccagctcagatttgaattcccccccaactcagattcaggcatctctgtcacccctcacctgacagtttcagatgcaaagcagccccctggaaacttccagatgttttataccaggtccaagccctcctcctgccctttattgtgtgaacctcacctcctgagcaaacatgagcaacctcttcggatcaggtgtcaggcagggtctggaacaccttatcctgcctctaccccatagtcaacagatactacagcatagggtaagattctctgagttcctggctgggcatggtgactcacacctgtcattacaatgctttgggaggcagaggcagatcgcttgaggccaggagttctagctcagcctgggcaagagtgtgagaccccatctctaccaaaacaaaaaacaaaaacaaaaattagccgggcatggtgacgagcacctgtagcctcaactaatcaggagggaggtagggaagatcgcctgagcccaggacgttgaggctgcagtgagacaagatcacgccactgcactccagcctgggtgacaggtggcaagctggagtccactctgggccaagtgccgtataccaggagaaacatagtaaacttaaggtcaccaccagcagctctaggtgggcaaagtagcttatcacctctaggcttagtaggtgctctcacctgaaatctgccatctgtcaggacaaacagagcccttcccaggcattcgaaatgtggattctcccagaagggaatatattcccaaaatcttatacttacgagtgctgactatttgccagacatttttttctttcccttttctaatattatgaaaaatccaaacacatataaaagtttaaagaattgtacagtggctgggcccagtggctcacacccataatccaacactttgggaagctgaggcagctggatcacctgaggtcaggagtttgagaccagcttggccaacatggcgaaaccccatctgtactaaaaatacaaaaagtagctgggtgtgatggcaggtgcctgtgatcccagctagtcaggagactgaggcaggagaatcacttgaacctgaggggcagaggttgcagtgagctgagatcactccactgcactctagcctgggcgacagagtgagactccatctcaaaaaaaaaaaaaaaaaaaacaaaagaatcgtatagcaagactgggtgcagtggctcatgcctgtaatcccggcactttgagaggtcaaagcaggaggactgcttaagctcaggagttcaggaccaacatgggcaacatagggagatctcgtctctacaaaaaataaaacaattagccaggcatggtggtgcacacctgtgatcccagctagtcaggaggctgaggcaagaggatcacttgagctgaggaggtcaaagttgcagtgagccatgatcgaaacatcaagtctcaaaaaaaggaaaaaaaaaaaaagaattgtatagtggacacttatataaccactgtatagattctactatggttaatattttgctgtaattgcttttttttctttcttctttttggagacacagtcttgctctatccctcaggctggagggcagtggcgcgatctcggctcactataatctctgcttcccaggttcaagcgattctcctgcctcagcctcccgagtagctgggattacaggcatgcgccaccacgcccagctaatttttgtaattttagtagagacagggtttcgccatgtttgccaggatggtctcgatctcttgacctcgtgatccgcccacctcggcctcccaaagtgctgggattacaggcgtgagccactgtgcctggcctgcatttttttttctatccactcatctatttatccccaatatgccaaacacttcccaaaccatttctctctgagaaggatgactggggctgcaggtgcacagtgaacacgtgcctattgccccacaggaaacagagtcagtccaatgggaagtgcaaagctaaggatccgaaggtctacaggtgttcctctgggggtaattctgggctttgggccctcaagtctcctgggtaccatggctgaatcttcctggggctgtaggccgcccagggccattgcttctttcttag

SEQ ID NO: 1243545 - DNA, 4001 bp, Homo sapiens
cccataccccaccctagcgacccacgggtgagtttgctgagtatgtgagattaactggtggctcagtggtcggctcctctagtggataattccattcaaagccaatgctcttgatgccaaggagttgatactggccatagatgcccaccagcacctgcccctcttggctggggtaggcagaggagatctggccatcaagcttcccaaaatagaaatagcggtccttgctggtgtacatgaccataccccggaggaaagcttggaaggcgacaaagacttttgtgatgtattcgcctggctgcagggtgacttcctgggtattcccacctaaggctcccagtttcacgtcccaggagtctccaagtttcacctggacactgggagagaggcaaagctttggacgtccagatctgggatggcccagcacatcccgggtcctcagcgcccccatcctccttcccgggatgcagagagtccagcaccatcagactttgggtccctgacacagactcactggtcaccaaccctgattctaccacttttgggccctgtgatcttgagctcgttacccagcctctccggactcagtttccccgtctgcaaagtgggtgtgacttttgggaggagtcactgagatcctggtgaggagagctgcgtgcagcgccaggtctccgtgacccagaaggcaccagctgccgtcactgtggcccacatatgagctgcctctggccgagcctggacctcccgagccttagtcactccaagcagagcagctcacaggccgaggggcaggtgacttcccacactcgccagcgcttccctgacggggctcatcttcacccctccctcaccctggtgctctcccaggatgcacccctccggctcgccccgcccacactctgtctcctctgctattgggcttctctcccctctcccaggaccccagaacttctaaatgcagggcaaaaatccatcccagacctccagcagagacacttcgatattaaggaaatggccctggacttctgcctctaacacttctgcgactcatattcagtcagtggtccactctgacccttacctcctgtcttctttgacagtaatcggacagactttcccctgactttcctatcaggcatggggacagaggggccatttttggttgagttgagcttgggttgaagggagaaggtagggaggacggtctgaccgtctccgctccagccaggaagcatcagcgggagccaggaagcatcgacagtagccaggcatgtgtggcaaaagtggccacgggtgcttaccccctgccctgagttcctgaaactgtgggatgggaggggacatggcgctgggcccatgaccatagccctactcaccttttcaccaggagaagacctacagacacccgcagccctgtgatttcatggtcgtagtcttcagtggtgctgaaatacttgcctcctccagggccatacatctctgaagaaaagagagacccaaagggaagaaaatccccatgcggtgatatgggggtgacctctgccagaacaggggaccccacccctccaggcagacaggatggttctgtgaccagagttagtctgggacaagggccgggtgagtccctggctctcctggagggaggcaggggagattgagggcagaccccactgacttactccctgcccaggtggggccccccaggagggcaagcgtgagcagcagcagcatggcctctggccggtgcatcccagggctctgtgggaagaagagaggcctcctgactccaaagcaagggccagtgtgaccttgccgggccccacccatggagccaagcaccttacctcgcctgtgactgggcgtctggttgtgccgggcaccctccacatcgcctttatactctcctgggccccctgggcccccatccagaaggaagaagcgaggggccgccaggggaacaggaaggagctggccgtggggctcttcctgggggaaggcccagggccggccttggggaggctcccggatgtgcagtatttgctgtcttggctctgcagcctacataaacgaagctgagaacagtgacaggcatttcacagttatctctgggatctctccagtcagcactggcaccgacttgaatggcagaggtggggagaggctggcttatccagcgcagcctgatggcttccacctgagggtggcgggtcaagggtccacagaagctccgtggggcccactcctgccgtgggcgacctggagtcagggcctccttcggactcaggcagcacctggtgcctggcagccttcctgggacccaggccgagctcgacgcgggccctgagagagcctgaatggatcacccagccctttgtgtcctgtgccctgtgcggcaggtgcaccaggcactggccctcaaggcactgcccttagaggctgcccgggtctctcctctgtgctgtatctgggtggagcaggtatgagccagtgttcagggactcagaggccatgggagggaaggacaccaaaggtgcagtccatgccacgatgggaggcagagggcctggggagggcgaccccccaggccggtccttccgaggtgtcggccctcatctgggcgggaactggcgcttctccagggctcggtccccggggccctgctggttttctgtctcactcctttccccctcagcccctcttgtcagggaggcctgtgcaggcggatgcctgtgggcagaacgccatcaccctcagacgccagctgagaaaagctcgtgttcggagatgtctcatcccaaggaccctgaaggacccagggcactgggaaggaactggagtctgcagaagagttggggtgtcggataaggatcaggggagaagagataaaggccgtcagatgcccaagcgaggcgggaactaggggacagattgcagctcaagcgcagttccatgcgtgtcctcaggacacctcttgtgtgtgttccagggactgaagctcctcagggcctgtgaccgctgggaacagccacagggctgtgatcaccaacacaggaccctggagccagacgtgggtccagccgggcttcctgacgtagcggggctgggatctgcgggctcttgcttcacctctctgggcctctgttctgcggataacaacagaacctccccctgagggtgctgtgagggcctccctggaggggaggcccccagggctggttgccctgagccttagactttatgccttgggggagagtgtacaacgctaatttttggaaagagcaaaagctgagaaatcacgggcgcatccacctggagatgccgagagcccgggtggtggatccctggctgtggaaaacttgggtggagagggtgggggacactcccactgcacacccatcccccagggaaacaggctggaagaccagtgtgtgtggaccccacatgcttcccaggaagatgggtgcaaagaagggctttgtgcatgcacagactggctctggaagtgctggctcaccaggaacggggacgccggtctcatcgggatgagggtgggcaggggctgcgggaggagcaggactttcacgacttgaaccaggtgcctgcgccaggggtggcgaactatggcccagccaaccacctcctgtttctgcctcgcccatgagcaaagaatgcttcctacatgttaatattcttaggaaacattcaaaagaacgatgtcttgtggtccatgaaaattctttgaaattcccatgctccagttcattaagtcaagcgtcactggcccacagccgccgtgcgctcattggcatgtggcctgtggctgtcttcatgcttgcacagaagctcacatggctgtgacagagacctgcagcccctgaacctaaaattgtaccatctggcccttcacacaaaacgtccgcccacccctggttgatacctattcccaaagaaccaccaaagccctgtccgtggtgctggatggcagagtcaggaagggggct

SEQ ID NO: 1243546 - DNA, 4001 bp, Homo sapiens
cgctgggctgagagtactgtccagcagtctgggtgtaaggtaacagaacagtgttcttttttctgagacagagtttcacttttgttgcccaggctggagtgcaatggcacgatcttggctcactgcaacctccacctcccaggttcaagcgattctcctctctcagcctcccaagtagctgggattacaggcatgcaccaacacaaccggctaattttatatttttttagtagagatggggtttcattatgttggtcaggctggtctcgaattcctgacctcaggtgatcaacatgcctcggcctcccaaagtgctgggattacagatgtgagccaccgcgcctggccagaataatatttaatactaaacagagaaggaaatctgtcaggagtgaaagagcctccttgttgctagaatagatattatttgactctatatctgttacgttcgcaaagaagttaccaggacatgaatatatacagtagtgaaatgaaaacttacaaaattaatatccacatctatctgtctatccctgaccaatacagcaacctgctgatagatctctacacaatgcaagtctgatgcaaggtgaaaccgcaaatcttgcaaatgctgcaggatttcacgaggttcatgaaagtgaggttgaagaacaactagaagagcatgcaagccactgagaaatgaagatgtggcagttagactggaggagagtgacagaaatgaaggcatgagagcacttcagaagacactgagtgcaacagtaaaacgcttggagacggctctgggataacggatgaagtcttttttttttttttttaaagggggaacagaatagccttttttgatcaaaatgcgtaagtgaacctctgtgacgcaaaaccatattgttctcttatattgttttgttgcaaacattatgccaaagatgacgataaatgcttaggtgaataatgtctggtttccattgtaagataatatttcaatcaaagcttttatttttctatttcatgtgaaattctgatccccttttaagtggattcacttaaagtgaaaagacccccttatagggtcttttattagtaccatttatctttctctgaagagcacgtctttctgcaatacatccctgcccacatgcctttcccattcccttttttctaagtacaaaaatttggaaaatcctctctcacctgctgtcttagtcttccagtctctttctccaaatgcactaccagggccaccgcttcctctccactttgcggacactgcttctgtgcccaagcctgaatcttctcgggtaaaatggtgagaaactgctcaatcaccagcagctcaagtatttgctccttggaacgcatttctggcttcagccaccggcagcaaagttcccagagtttactgaaagcttcatggggtccagtcacatcctcataacagaattgcctgaagcatttgcggaaggtctcagagctatccgatccttccagaatgggctctgatgcccactcagggtccttttccaccttcattattaggcatccctcaacctccaggggcgcgtcgatctgagagtcgagggcgacagccatgctgcagcccaggggtcaacttcacgtctagctcaaggtggggacccaaagaagactccaagcgctccctgcttaatgttcctgggagtgtgataaggtacggaggtaaaaacggccaggtcggcaggaacagggtattccaggctgattaatcaaatctatgccaggcccttgaaaaggtgaacgtatactctaagatgcaaaagcctggcctcttctccaaacaagatgtgaccgcgcaatgtggttttccagagtgcatccctcttagtgcaaagtcggaaaccgggaggctggacgactgggagaaaaatgaagcaggctgaggaaaggctgggcggaggcggacagccgggccgggagggggtgtgtccgctactcccgggtcgggcgcggagaggcgagtccccgagtgggtggggccggatgtgcaggccccgcccggcgccaggttccgggctcgggtcaccgcagcacgtccaggccgccgcgggtgccgctggggccgccggattccgagagcggcgccgggctctttcgggcccacgacggccccgaccgtcctgaggaaaccgctgccgccgaggaaaggccgcaaaaactgttccgcccggaagggagaagagctgcggggcgaagccagggctcgcagggggcagcggcaggctgctcgcgttcggcctcgtccactcggcccgcggagagcgcggggggcgctgggaaccgcagtcacgcatgcgccgcctgccaccgagcgccgcggggcccgcgcgaggcgtcctggcgggcgaggggctgggggagggggggggggccgtgcggtggactctcgcgagagcgcgcggcgcggtgactcgtcgctgagggactttaagattgtagaggggcgcggagggtcctccccggggcggagggacacagagggattctagggaacctgccgtcgcgagtcccgcttcaggcggagaatctaggcggcggcggggcctccctgaggcggaggagtcggcaccggggcctggctgccggggaaggagagcacgggagcggggactcctgtgtctggcggagggacacggcgttccggtggagggatctgttccttgtacctggtccagggttgcggtcggggatggagcggttaccccgaccctgcgggaccttcttcctctggcggaggtgcacggcgcggcgtggtgtttttctggcggaagtatctgtgcgtggccccaggcccttcccggcgcggtctcatctggggccacttgttggccctcgcgttggggaggttcatgtggtgcatcctgatgagaaggggggtcacaggggtctcggggccagggttcagccagccaggccccagcttgctctcttctggtgctgcccctgtccctgaattcatagacccggctttccctctcttgagcacctactatgtgccaggctgcgctttgcgcatgtagcagaggcaacagtgtcacctgggaagctggtttcccccaaaggaactcttgtctgtccgttgttgcagagccagcgcatgagaccaagtgtgagtatcaggcagtgcagccttcattcagtggccatggaattggagaagtgggagggtagctcgcaaatcaagctctcagctcttggaaactgagaagttacaggtaatagggagtgttgacgaaaagtaaaaccgtgcaaaatatttgaagagatttattgtgagccaaatacgagtaaccacagcctgtgatacagccctctcgaggccctgagaacatgtgcccaaggtggtcggggtgcagcttggttttatgttttaggttggcatgagacatcagtcaaatacattaaatacattggtttggtccaggaaggcgggacaacgcaaaggggtgggggtgggggcttccaggctataggtaaatttaaatattttctagttgacaattggttgagtttgtctgaagacctgggattgatagaaaggaagtgttcaggttaagataaaagatagtggagactaaggttcttttgaagtcttatggtggctgctcttagagataatagatgacaaatgtttcctattcagatcttcaaaaggtgttagacttttagttaatccgtttaggattgggagggcctggaagaaaaacatctagctatgttaatagatgttctttacagatgcacattttaccccacaaaggatagcttttgggggaaaatgctgtcctttatggaagaaattgcaaaatagggcaaggaaacatgttttggggtaaaatattttgactttctttttgtcacgtaatgttatgccagagtcagaatggaaagtaagtcatcatatataggattaaataaaacccatctgatgagaatttatggtttgtaggtcatgactccccaga

SEQ ID NO: 1243547 - DNA, 4001 bp, Homo sapiens
ctcaaaaaaaaaaaaaaaaaaaaaaaaaaaaaaaaaaaaagactataagctaaacactggaaagacaataagctagaacttccaatgaaatgaagttccccaaagtccaactgctacccaacagggtgaccctatctgctaagaattctgctagtaggaaaactaagttgggtgggggaagagctgacagaagggatttaagaaccttacaattacttctggtgacacaaggtgcataaaggaatggtaagaaccttggtcctctgttgcctcactgggtatcagtagttggattttctaaaaacctgttaataactcaggataggttcccagatagaggctggaagcaacttctgaagccatccagtccacttctgagacttaaatagggagagatccagataccaaacattacccagatgaaaaagaaatcggccgggcacggtggctcacacctgtagtcccagcactttgggaggccgaggcgggcggatcacgaggtcaggagatcgagaccatcctggctaacacggtgaaaccctgtctctactaaaaatacaaaaaattagccgggcgcggtggcgggcgcctgtagtcccagctactcgggaggctgaggcaggagaatggcgtgaacccgggaggcggagcttgcagtgagccgagatagcgccactgcactcgggcctgggcgaaagagcaagattccgtctcaaaaaaagaaaaaaaaaaaaaaagaaaagaaaaagaaatccccaggatgatgggagaggaccctccttacccactgctttggtttcttggatgctctgtgaaaatcttccacgagggtcacaatctccttgctgctcattggacatcgatgcctgacccgagcctggatctccgggggcaggatggtcaggaactgctccatcaccagaagctccaaaatctgctccttggtgtgcagctcgggttgcaaccactgacggcagagctgtcggagctgggagagagcctcttggggtccagacacctcttgataacaaaagcgtctgaagctctggcggcagagctcaggatctgggcagtttttttgcagaggagggccccgtttctcttctagtttggctattatgtgtctctcttgcttggaggaagcttcagtgttggagcttaaagttatctccattttagctgccattttgggcgtcaggagacaactctctccttgtaaacgggttaagcctttgggatcatgaccctggagaagtctctgaatactagaaagattctagaaacgaaggttctctgaggatgttagggggaacgggatgcagagacaaagcctcacttgctagcctttactagccaaactcaagacaacgcggtccctgggagtgggaagagttttgtcttcttgtcagttttttgcagtcttgcaaaggagaaaagtcataacgtcctaaaaggactctggggaaaaaatacttcttttatttcagtagcaagcacacaggtctcggatttaatgagcaatacgctctaaccggcgggtggagcggaatccctaggaaaagttcaagctgtcgcaggtagcttgccccaactctcccgcatcctggcggaaaccgaccgggtgcatgtcgccgggtgctaaacggtagagctaagcgaggccacagcgccagccgggggtgtgaggtagcgaacagcctcctgcacgcgagcaaagcggctgctcgctgccgaggcgccgcaggcccagtggctccggcctccagggcggccccgcggcccagccagccccaggcctggcgaagctgccgcaacccgatgcgcagctgaactccacgcccggtgtgagctcggactggcgactgcgacaccggtaccccgaacagcccggcgccccgcacccacctgcagccgactcacctctccgggaacccaagaccgagggacttaggacccgacaccggcgagcacgggctgggggcggggccgatgccactcgctgcggagacgcccactagctgctgaggacaactactgacagggcccgcctcctgccaagggcattctctaccgtctattggttgctgcgcctgtcaataccgtcgcagtgcatcccgggagctgcagtccggcaattcggcttgcgggcctgcgcaggggcgtgcgtaatgggcggagcgaatcgcgccgctgacttccggcccggaggctgagggagtttgtggagtcgcgagtgctggtgtccggtgagttctccgcttccttgcggccggcgggattagccgctgggccctgcgacggccgaggagcccctccccgctgggagtcttctccgaggcgttcgggtccggccccgatgggcgtctccttgggacaggcagcctccctcaggccgggcgtccccagacgcgccgcgatcaccgtgccccgctcccaccgtgcggatcaccccgagcctgagcgccggcgccccgggaccccctggccttgaccctgctcatctcgtccctgtctcgcccactccctactcatccacagtgcctagccctggcaccgagtgcgttctgagtactcaataaatagttaactaagtgaaaaacctatcaacctggctccccatcctcatgctacatttttttccgagtgtttgggccatcgctagagtgaagtaaaattttcagagaacagcattttaaaatttaacgatgagtgggaggtaaggggtcaaaaggggtcaagaagggtgcaggttccgccttctgcatgaagttagaagagcttttattaaattcttcttcagccaggtaaggcacaggatgaacataatgaaggcaaggggtgctggttctagtcctggccttgctgcctaggagctgtgctgtgtgatgctttaggcaagatacttcatcgctctcagtttctttttggctagaaagcagtgctaacaataataatgcccttgatttctctatctctagaagcactgaaatgtaaagagaatttaagtgaaggcagttcaagttccttgagaaaagggaacccaaatccatttttaaaatataaaaaaatttctttaatttttaaaaaacatttaccatcataaccatttttaagtgtacagctcagtagtcctgagtatattcatcttgttgtgcatgctggatccattttaataccacatggtgagggtgtatcagcccctggagaaaatgtaaattacgatctgctttaatctgtgttttaagtagataaaaaccaacacaaactcattaaaaaagactgccttcgcgggtgcagtggctcacacctgtaatcccagcactttgggaggccaaggtgggaggatcacttgagcacaggagtttgagaccagcctgggcaacatagtgaaactccacctctacaaaaaatacaaaagttagcttctatttaaaattatttttaaggtcgggcatggtggcttatacttgtaatcctaacactttgggaggttgaggtgggaggattgcttgagttcaggagtttgagaccagcctgggcaacagagtgagactccatctctaaagataaaaaaacaaataaaattatttttaaaagttatttattaattttaaattatataaaactatttttaaaattaactcttaaaaaaatattgccttacataaactggccttggagatccaaacatgttgtcaagacttgagtatattgtcctcttgtaaacaggctcactcctgtgatggaagagtggagtagagagtgggacatagttggagacaactctgatcttacatttgcccaatttaccaattcctagaaaatgaagagctttccctacctctcatgtaaaatctgagaaaagaattttgataggcctagctgtgtgtcatatgcccacttctggggaagtgggtattgtaattaatatccccaccagaaccaatgagagggactttttctttttttgagacagtctcgctcttgttgcccaggctgga

SEQ ID NO: 1243548 - DNA, 4001 bp, Homo sapiens
tgctttccaccatgattgtaagtatcctgaggcctccccagccatgcctcctgtacagcctgtggaactgttagccaattaaacctcttttctccataaattacccagtctcaggtatatctgtatagcactgtgacaacggactaatacaatactcatactcatgtctgtcacaatctctaccatcaaacataattactttcaagctttgaccattccttagattccaatgggaaccacctttctttctggtcacctcacagcctaactatccagctctccctctaactcctacagtatctttaactgaagctataagtaatatcagatcatgatacccagagtatggtgtatgatcatggcatatttactgttacttaatcctgacttgaaaatactaacttctctcccatatgtctgaaaatcccagccacaaataggctgaggctgtggtggaacttaagtttcatgcacaaagtcatttttgccttggctgcaaaaaaatatgtagttaagctaaatattgtgctgcagtatctatactgacatataattcaatattattctctccttgcagctgcaaacatacttaatgatgaaagacagaatgtctttccctccaagattgggaacatggcaggtatgtctgctcttaccactactatttaacatcatattgggagtcttagcaagagcaaggccagaaaaagaaataaaaggcacataggtcagacacagtggctcacacctgtaatcccagcactttgggaggccaaggtggatggattgcttgaggccaggagttcaagaccagcctggccaacatggagaaatcgcatctctactaaaaatataaaaatgagccaggtgtggtggtgtgtgcctgtaatcccagctactcaggaggctgagacatgagaattgcttgaacccgggaggtggaggatgcagtaagctgagaatatgccactgcactccagcctgggtgacagaacgagactatctcaaaaaaaaaaaaaaaagaaaaagaaaaagaaatgaaatgaaagacacacagattcgaaactcagaacaaaactgttactatctgcaggcaacatgattatctgtataagaagtcccaaagaatctacaaaacaagctcctaaaattaaaagtgagttcagactggtcacagtggctcacgcctgtaatcccagcactttgggaggccgagacaggcggatcgcctgaggtcaggagtttgagacccgtctgaccaacatggtgaaaccccgtctctactaaaaatacaaaaattagccgggtgtggtggcaggcacctgtaatcccagctactcgggaggctgaggcaggagaatcacttgaactcgggaggcggaggttgcagtgagtagagatggtgccattgcactccagcctgggtgacaagagcgagacttcgtctcaaaaaaaccaaaacaaactaacaaaaacataaaaacactatgggacaatggcatttgtttggacacaggtctccaaatctgcctcttcaaaagaaacagacactgcaactgcaagagccttggttaaagacttaagccggccccaactaagagtggggatggcttccctaggaggtaggaatcagctggagtccttgcctctcctggtgcccaggcagtgccatctgcagacacttctgtcatcctcccatccttggggggctctttctccagctccagttcgtgagcggcaaagcttgcagctgtacagcctccaagagcaaacagcccaggtcccacccggccacaattgtatagtgacgccctccccgtccccttctttgagctgcgctcaaaggaccagcctggactgctatgctgtctcactcccaacccaagctccgcccaactgtgggtccttgcactttggcacctttgagcgcggactcaaaacaggccagaagcgcaccgctagcgagaacggttaggaggccggaagtgcgtcacgcttgtggggcgcttggaggccagaagtgcgtcatgagcacggctgctctttctacggtgcaacttttccgcatctcggtgtttccgattgggagacatcctcttcctttccttgtacacacttttttctctcctcaggaacctcacgcctgggtcattgtccatttgggtgggtcaagaaagcgatcgcttctgcccgggagcagttgattgtcaggaaggaattcgtgataaaaccgccatcaccacaggcctagatggtggccggtgtttcctggttgcttactggtctttctgagttctggttcactcgcagtgaatcaacttcctttcacaagctctgccactcacgggccattgaggaagacccttgtgtctctgagcagcttttgtcttctgtaaaatgagccagtcagattataccattcaagctgtctttaattccatgcactgtaacctccaatggtttgccactacccctggagtccaagtcaccattcaaggctcctcagacccttgccctccttcccctctaaatgataaagaaaatgccaaaagcgcagggcatatgggctaagagagatagctctaaagtgttagtgcctgtggctttctgggtccacaaaagagaactctggccaggattttgctggactgtcaaaacgtttgtgatcactgtcacagaattacaaaacaaactggggacttagagcttcttagtcccatctcctttacaacagtatgacatagtggtaaggagcacagcctggcatcaggatgctttgtttcaaaggccaaaggaccactctgtgacctttggtgcattacttaacctgtaagtgtcacatttatttctaaaactaggataataatagtatttattccccggattgttgtgaggattagatgttagtacatgtaaatcagtacaatgtctagcacatactaaacactcactagatattagtaattattacactcactagatattagcgattattaatagcttaggaattgagcctgaataggctctggagttaatccagtattcaatctttttattaaaacctttgaaaatggttataaacctcagtgggtttgggcatctgtacactttttactaccagactagatagtataagcaaagcctggtggcagttcagggttggttcttagaagatcagagtgctaaaatagctagctcatcatgagctgaggacttccaggatgactagttggacttgctgttcagttgggacttcagcaacacaagtccagacaaatgggaccatgatccaggtcttcaagagcaaccctcaggctttctgcagagtgtaaactcctcaagaaagaggcttttctatcttgtccatgactgtatcctgagtttctagaatagtgtttataacacagttcatgatcaataatcattttttgatgaataaagagttggacatatatgattatactcccttactataagggagagtgggacagataatacaagcactcaacgcagaatgaatcatgagtaagagaaaaccaagactcaaagagtttcagtaaggccacagcatataataggtatcagagttaagatttaaaccctagattatttccaccatgtcaaactggctttccagaacaatatactaagtggtattccaagtcccaatacgcctttctatgctctcacaccgtggacacaagctttctgacctcagtcccttcaggaagagagagagagaagagcaacagtaactgtaagaggaaaaatcatcaaattctgaaataagggccaaagaaccatataagatgacacgagtcccattttacagatgaggaaactgaacacagaaagattaaataacgtgctcaaagtcatgcacagctcttatgtggcagagccagaattcaaaccatgatagtttggcctcagtatacacacataagcactctatcactgcctcagatacgtagttctgtgtctcatagtgaagaagttga

SEQ ID NO: 1243549 - DNA, 4001 bp, Homo sapiens
ccagtacctcctcctcctcttctagtgaaacaagcatgtgcttctcacctctgttctgaaggcttgagctcacatctttcataataaccaaggtctccttgactttctgactgggctggaccaggcttggcttgggcaagaaggtgaggaagtgctccagcactagctggtggatggtcttgggcccgttagtggcatctcgaagtaggtcttggcccagcttggagtctggcggaactctcagtataaaggactgctttggctttgggggcataggaaccacttttgcagccatcatgccttgcaaccacacaccacactcgtttcgcggggcctccagagccacctcttactagaggaaatctgccagagagccaagctgtagacagagaaaccagggattacccaaaagaccaggcacggcattactgcactccaatatgtggcatggctggtgaggctacatgagatctaaagaaaacgacagctgggatagggaaatcataactgaaacgcagtatttgaacaagatatgcttaggaagatgtgaaaggaagatcctgagaatgaaaaacagagactgtgcaaacctcaagtccaaagggaagggagtaagggtggagcggagaaggccaaggtccagcctcctgagaaatacaaagtgtggccaggtaccggtggctcacacctgtaatcccagcactttggaaggccctggcgggtggatcgcttgagtccaggagttcaagaccagcctgggcaacacagcaagacaccgactccataaaaaaaaaaaaaattagctgggcgtggcgacacaagcctgtggtcccagctactggggagctgggaggattgcttgtgcccaggaggtcgaggctgcagtgaactgtgatcgcgccactgcactgcagtctgagcgacaaagcaagaccctgactctaaaaaaagaaaggaaaagagaaaggaaagaaggaggaagggaatcagggaagagaaagaaaataaaaggaaaaagaaagaaaagacagaaagaaagacggtgtgtaaaacccaccaggaataggttaaatcaggcttggagaaagagcaatgggctagaagacaggaaatctggggtcaataccgaggacatctgcctaaaagcaggttggtcactgaatctggccatactgtacccctcgaaccgaagctccctccggtgccctttgggcggggaggcggttggtgactctcccggggagcagatgcaaggccgaggaggtgtccacacaccgcctgccgactcctctccgccgtcaaagctctgctgagagcggcaggcgacatcccactaaggaccgccgggccaggctcactctggggcctcttccgctggtcaaggaacacctttaccgtaaagctcagcgtgcgcccctgcctgaggcgctcaccaggctccctacccggccttgctccctcagcaacggacacgctccgctccccagaggcggcctcagcctggttcccgccctcacggagcccctcacctctcggggcctctgcagcccctgagcgtttgctggggacggctcagagactcaggctccgggagagatagaaaaactaggcgcgagcggtcgagccctcccctcgcccttccgagtgccctcacaggtcgccggcgactattcgttcgcgccgccgccagttgaggagaacggcagggactcggtgccttctgggaagtcgggcgctctgcggctgtgacgtcacaaccggtgccttgtttccggtgcagaagcctggtctccccgttcggagccggcagtctgcgcttgagacgttaagacttgagacaggccagaggagctctcagggccggagggaggccaggacggctgtagcctctctgtggttctgcctggaagacggaaggcaggtggttggctctagtcatccacgacgggctggcacctctccagctgcggccagtctaaccccagggcctgctgggaaatgtagttcgaatgcaaacaaccaatggacgaccgtcaggcgcggcggttggggcggggcaggcccccccaccgccccaccccccgcccacccagcgcccgcgctccccccaccccccaccccgccacccccctaccccgccactcccccaccgccctactctccccaccccccacccccctactctccccaccccccaccccccaccccgccaccccccacggcgccaccccccaacccccacccccctactctccccacccccctactctccccacccccctactctccccaccccctactctccccacccccctactctccccacccccccaccccctactctccccacccccctactctccccacccccctactctccccacccccccaccccctaccctccccacccccccacccccctaccctccccacccccctaccctccccacccccctaccctccccacccccctaccccgaggcttaaaggaagcaagctatctctccgaccggaaaatcaagacgcctccgcggtttccgccttttactgcggttctccagtaaaaagactgcggaggcggacagggtgtggccgccatgggactccgcccccgctctggtgactcccataggttagagatggggcaccgacattgcccactccagcttgctaacttctacactgctgtccgcaccggccgtcttgtttttaaagacatcttaattgcccttctcctactgtctcggtttcctttctcaatttcagcttcctacggaggccgaacagagttttgtgtttgtgcgttgtatccacactcggttcgttccccagtgacgcactgatcagggttcggacaacttgtgggcagggatggccttatttctcgatgtaataccagcctccagaaagttgacaaaagtaaaaatataaatgaatgcctcttcttaaagttaattatacctgactaatggctgacgatggcttaaaatatgttacaaagaaacgagtatgaaaactgtgtggcaccaagacattctagaaaaataaggaatatctgccttttcagatcaaaatttactaaaaagcctccgttaatcaaagcattatggtttgaattatgaggcaaaacagataactgagatgtcttgaagtaaaatataaacctgtgtgattgtattttttaagaactttttcttgactctgttaacaaacaagaaatagactggaagataattgtaaagattagctacacaaaagattatacattcctaagacaaaatgaacccctgccaactgacaaaaagcaaaggcaatgaggagctcttcccgagaggaggaaaactaattggtcattaacatttaaaaagatgcttaaccacactactagtcaagattatcacttttaaagggaaccacatttttcacctatcaaacaatgaaggtggagaaataggcactcctttcgctggtagtgtggtgtgtgaagtcatcttgtaatatatattaaaattaaaagtacaagtatgtaccctttgaccttcacaatctcatctgtgaatctgatgtctacaaatttcttgtagaattctttgtagtgacaaaaactagaaatgacatgcatgttcatacgtaaggaaaggagtaaattggtgcattcatactctggaaattacccagctatgaaaaagaatggattggaactatatgtacacctggagggatggccataaaatattacatgaaaaagtttcagagctacatatattatgcataattatatttttggaacaaacaaaacaccttgtgtatgtttgtgttgagggatacacaatagattattaaaatggttactcatgggatggccaggcgcagtggctcatgcctgtaatcccagcactttgggaagccagaggtgggctgatcactggaggttaggagttcaagaccagcctggccaacatggggaaaccccatctgtactaaaaatacaaaaattagcc

SEQ ID NO: 1243550 - DNA, 4001 bp, Homo sapiens
gtgtgaagatgcccagaaaaagcacaaaatttctaaaattccacatcaacctaactcaataattcatctgatttatccttaaaagatatttccctcagaatgtttgggtaaaactgacactacagaaagatgcacactgtttattctgtggccttactcacacccagcacttgagaagaacttcctctttccaacactagaattgactccttttccaatatacaccatcctaacttgaatttataactaacacagaaacctatcttagactccagtacctcctcctcctcttctagtgaaacaagcatgtgcttctcacctctgttctgaaggcttgagctcacatctttcataataaccaaggtctccttgactttctgactgggctggaccaggcttggcttgggcaagaaggtgaggaagtgctccagcactagctggtggatggtcttgggcccgttagtggcatctcgaagtaggtcttggcccagcttggagtctggcggaactctcagtataaaggactgctttggctttgggggcataggaaccacttttgcagccatcatgccttgcaaccacacaccacactcgtttcgcggggcctccagagccacctcttactagaggaaatctgccagagagccaagctgtagacagagaaaccagggattacccaaaagaccaggcacggcattactgcactccaatatgtggcatggctggtgaggctacatgagatctaaagaaaacgacagctgggatagggaaatcataactgaaacgcagtatttgaacaagatatgcttaggaagatgtgaaaggaagatcctgagaatgaaaaacagagactgtgcaaacctcaagtccaaagggaagggagtaagggtggagcggagaaggccaaggtccagcctcctgagaaatacaaagtgtggccaggtaccggtggctcacacctgtaatcccagcactttggaaggccctggcgggtggatcgcttgagtccaggagttcaagaccagcctgggcaacacagcaagacaccgactccataaaaaaaaaaaaaattagctgggcgtggcgacacaagcctgtggtcccagctactggggagctgggaggattgcttgtgcccaggaggtcgaggctgcagtgaactgtgatcgcgccactgcactgcagtctgagcgacaaagcaagaccctgactctaaaaaaagaaaggaaaagagaaaggaaagaaggaggaagggaatcagggaagagaaagaaaataaaaggaaaaagaaagaaaagacagaaagaaagacggtgtgtaaaacccaccaggaataggttaaatcaggcttggagaaagagcaatgggctagaagacaggaaatctggggtcaataccgaggacatctgcctaaaagcaggttggtcactgaatctggccatactgtacccctcgaaccgaagctccctccggtgccctttgggcggggaggcggttggtgactctcccggggagcagatgcaaggccgaggaggtgtccacacaccgcctgccgactcctctccgccgtcaaagctctgctgagagcggcaggcgacatcccactaaggaccgccgggccaggctcactctggggcctcttccgctggtcaaggaacacctttaccgtaaagctcagcgtgcgcccctgcctgaggcgctcaccaggctccctacccggccttgctccctcagcaacggacacgctccgctccccagaggcggcctcagcctggttcccgccctcacggagcccctcacctctcggggcctctgcagcccctgagcgtttgctggggacggctcagagactcaggctccgggagagatagaaaaactaggcgcgagcggtcgagccctcccctcgcccttccgagtgccctcacaggtcgccggcgactattcgttcgcgccgccgccagttgaggagaacggcagggactcggtgccttctgggaagtcgggcgctctgcggctgtgacgtcacaaccggtgccttgtttccggtgcagaagcctggtctccccgttcggagccggcagtctgcgcttgagacgttaagacttgagacaggccagaggagctctcagggccggagggaggccaggacggctgtagcctctctgtggttctgcctggaagacggaaggcaggtggttggctctagtcatccacgacgggctggcacctctccagctgcggccagtctaaccccagggcctgctgggaaatgtagttcgaatgcaaacaaccaatggacgaccgtcaggcgcggcggttggggcggggcaggcccccccaccgccccaccccccgcccacccagcgcccgcgctccccccaccccccaccccgccacccccctaccccgccactcccccaccgccctactctccccaccccccacccccctactctccccaccccccaccccccaccccgccaccccccacggcgccaccccccaacccccacccccctactctccccacccccctactctccccacccccctactctccccaccccctactctccccacccccctactctccccacccccccaccccctactctccccacccccctactctccccacccccctactctccccacccccccaccccctaccctccccacccccccacccccctaccctccccacccccctaccctccccacccccctaccctccccacccccctaccccgaggcttaaaggaagcaagctatctctccgaccggaaaatcaagacgcctccgcggtttccgccttttactgcggttctccagtaaaaagactgcggaggcggacagggtgtggccgccatgggactccgcccccgctctggtgactcccataggttagagatggggcaccgacattgcccactccagcttgctaacttctacactgctgtccgcaccggccgtcttgtttttaaagacatcttaattgcccttctcctactgtctcggtttcctttctcaatttcagcttcctacggaggccgaacagagttttgtgtttgtgcgttgtatccacactcggttcgttccccagtgacgcactgatcagggttcggacaacttgtgggcagggatggccttatttctcgatgtaataccagcctccagaaagttgacaaaagtaaaaatataaatgaatgcctcttcttaaagttaattatacctgactaatggctgacgatggcttaaaatatgttacaaagaaacgagtatgaaaactgtgtggcaccaagacattctagaaaaataaggaatatctgccttttcagatcaaaatttactaaaaagcctccgttaatcaaagcattatggtttgaattatgaggcaaaacagataactgagatgtcttgaagtaaaatataaacctgtgtgattgtattttttaagaactttttcttgactctgttaacaaacaagaaatagactggaagataattgtaaagattagctacacaaaagattatacattcctaagacaaaatgaacccctgccaactgacaaaaagcaaaggcaatgaggagctcttcccgagaggaggaaaactaattggtcattaacatttaaaaagatgcttaaccacactactagtcaagattatcacttttaaagggaaccacatttttcacctatcaaacaatgaaggtggagaaataggcactcctttcgctggtagtgtggtgtgtgaagtcatcttgtaatatatattaaaattaaaagtacaagtatgtaccctttgaccttcacaatctcatctgtgaatctgatgtctacaaatttcttgtagaattctttgtagtgacaaaaactagaaatgacatgcatgttcatacgtaaggaaaggagtaaattggtgcattcatactctggaaattacccagctatgaaaaagaatggattggaactatatgtacacctggagggatggccata

SEQ ID NO: 1243551 - DNA, 4001 bp, Homo sapiens
tccagtacctcctcctcctcttctagtgaaacaagcatgtgcttctcacctctgttctgaaggcttgagctcacatctttcataataaccaaggtctccttgactttctgactgggctggaccaggcttggcttgggcaagaaggtgaggaagtgctccagcactagctggtggatggtcttgggcccgttagtggcatctcgaagtaggtcttggcccagcttggagtctggcggaactctcagtataaaggactgctttggctttgggggcataggaaccacttttgcagccatcatgccttgcaaccacacaccacactcgtttcgcggggcctccagagccacctcttactagaggaaatctgccagagagccaagctgtagacagagaaaccagggattacccaaaagaccaggcacggcattactgcactccaatatgtggcatggctggtgaggctacatgagatctaaagaaaacgacagctgggatagggaaatcataactgaaacgcagtatttgaacaagatatgcttaggaagatgtgaaaggaagatcctgagaatgaaaaacagagactgtgcaaacctcaagtccaaagggaagggagtaagggtggagcggagaaggccaaggtccagcctcctgagaaatacaaagtgtggccaggtaccggtggctcacacctgtaatcccagcactttggaaggccctggcgggtggatcgcttgagtccaggagttcaagaccagcctgggcaacacagcaagacaccgactccataaaaaaaaaaaaaattagctgggcgtggcgacacaagcctgtggtcccagctactggggagctgggaggattgcttgtgcccaggaggtcgaggctgcagtgaactgtgatcgcgccactgcactgcagtctgagcgacaaagcaagaccctgactctaaaaaaagaaaggaaaagagaaaggaaagaaggaggaagggaatcagggaagagaaagaaaataaaaggaaaaagaaagaaaagacagaaagaaagacggtgtgtaaaacccaccaggaataggttaaatcaggcttggagaaagagcaatgggctagaagacaggaaatctggggtcaataccgaggacatctgcctaaaagcaggttggtcactgaatctggccatactgtacccctcgaaccgaagctccctccggtgccctttgggcggggaggcggttggtgactctcccggggagcagatgcaaggccgaggaggtgtccacacaccgcctgccgactcctctccgccgtcaaagctctgctgagagcggcaggcgacatcccactaaggaccgccgggccaggctcactctggggcctcttccgctggtcaaggaacacctttaccgtaaagctcagcgtgcgcccctgcctgaggcgctcaccaggctccctacccggccttgctccctcagcaacggacacgctccgctccccagaggcggcctcagcctggttcccgccctcacggagcccctcacctctcggggcctctgcagcccctgagcgtttgctggggacggctcagagactcaggctccgggagagatagaaaaactaggcgcgagcggtcgagccctcccctcgcccttccgagtgccctcacaggtcgccggcgactattcgttcgcgccgccgccagttgaggagaacggcagggactcggtgccttctgggaagtcgggcgctctgcggctgtgacgtcacaaccggtgccttgtttccggtgcagaagcctggtctccccgttcggagccggcagtctgcgcttgagacgttaagacttgagacaggccagaggagctctcagggccggagggaggccaggacggctgtagcctctctgtggttctgcctggaagacggaaggcaggtggttggctctagtcatccacgacgggctggcacctctccagctgcggccagtctaaccccagggcctgctgggaaatgtagttcgaatgcaaacaaccaatggacgaccgtcaggcgcggcggttggggcggggcaggcccccccaccgccccaccccccgcccacccagcgcccgcgctccccccaccccccaccccgccacccccctaccccgccactcccccaccgccctactctccccaccccccacccccctactctccccaccccccaccccccaccccgccaccccccacggcgccaccccccaacccccacccccctactctccccacccccctactctccccacccccctactctccccaccccctactctccccacccccctactctccccacccccccaccccctactctccccacccccctactctccccacccccctactctccccacccccccaccccctaccctccccacccccccacccccctaccctccccacccccctaccctccccacccccctaccctccccacccccctaccccgaggcttaaaggaagcaagctatctctccgaccggaaaatcaagacgcctccgcggtttccgccttttactgcggttctccagtaaaaagactgcggaggcggacagggtgtggccgccatgggactccgcccccgctctggtgactcccataggttagagatggggcaccgacattgcccactccagcttgctaacttctacactgctgtccgcaccggccgtcttgtttttaaagacatcttaattgcccttctcctactgtctcggtttcctttctcaatttcagcttcctacggaggccgaacagagttttgtgtttgtgcgttgtatccacactcggttcgttccccagtgacgcactgatcagggttcggacaacttgtgggcagggatggccttatttctcgatgtaataccagcctccagaaagttgacaaaagtaaaaatataaatgaatgcctcttcttaaagttaattatacctgactaatggctgacgatggcttaaaatatgttacaaagaaacgagtatgaaaactgtgtggcaccaagacattctagaaaaataaggaatatctgccttttcagatcaaaatttactaaaaagcctccgttaatcaaagcattatggtttgaattatgaggcaaaacagataactgagatgtcttgaagtaaaatataaacctgtgtgattgtattttttaagaactttttcttgactctgttaacaaacaagaaatagactggaagataattgtaaagattagctacacaaaagattatacattcctaagacaaaatgaacccctgccaactgacaaaaagcaaaggcaatgaggagctcttcccgagaggaggaaaactaattggtcattaacatttaaaaagatgcttaaccacactactagtcaagattatcacttttaaagggaaccacatttttcacctatcaaacaatgaaggtggagaaataggcactcctttcgctggtagtgtggtgtgtgaagtcatcttgtaatatatattaaaattaaaagtacaagtatgtaccctttgaccttcacaatctcatctgtgaatctgatgtctacaaatttcttgtagaattctttgtagtgacaaaaactagaaatgacatgcatgttcatacgtaaggaaaggagtaaattggtgcattcatactctggaaattacccagctatgaaaaagaatggattggaactatatgtacacctggagggatggccataaaatattacatgaaaaagtttcagagctacatatattatgcataattatatttttggaacaaacaaaacaccttgtgtatgtttgtgttgagggatacacaatagattattaaaatggttactcatgggatggccaggcgcagtggctcatgcctgtaatcccagcactttgggaagccagaggtgggctgatcactggaggttaggagttcaagaccagcctggccaacatggggaaaccccatctgtactaaaaatacaaaaattagc

SEQ ID NO: 1243552 - DNA, 4001 bp, Homo sapiens
gccctggtggggcctcatccacagcacaggaactggccggacttctgctggggtctcacactccttcctccacgccctgtctgtgtttgggtcttgaagggaaagaacctcaggccaggaatcagagtgcctgggtgccagacccagcgacacccctccccaatcaggcagccttcaggacgcagctgctctgcccctgcacagaatggtcatgaggttcacgcagataatgatggagaaggagctgccagctcaggaaagtcctggataaacacagggtggcgctggtcattaatcccccccgccgtgcgcaccagacagaagccagtgccagcagagaatgccaacatgtggggctctactgacatgcccaaggtgttcaaggcacacgggaagtggatgggaaactgaaccatgctaacaattctttgtgcttctatggcatgaaaaccatagatgatggcgtctcatgcctattatccttagagcctcccagtgaccctgcgagacaggtggaaatggcaggcatgtggtctgcattttacagatgacacatctggttcccagaggccagggactggcccctggcctgtcgctgactcatactcctccaactccaagcccggagacccaggtcccccacaaatagtaattacacacacacactcaaccacgcacgcacacacacacgggtagcaggtacaggaaggagaaaggaccgggagctcagacccacagagatgagaagctgtggttccaggtggagaagcacggggaaggagaacaggtttccctgtgtgctctgagcgctgctcagaaagaaaacctcactgataggacctccacccagacctcttccatctcctgtggccactggctagagaattcaccagcaaagcaaaactgttatgctgtaaattccagacagagggtactacccagcatgccaccttctctttgatctccccaccccagtgagtctaactcttccaggggtccagactctgtgccttgaaaatctcctccgcaccagcctcttctaccgcacacctccctcagccagccccatctgtacctccgggggtgtctccttgtcctgggtgtcctggatgcctccgccgtctgcagacattttctatttcagagctagaaagaacagctgagttgtttctccctctttttggccaagccccctccagcttctggccaggagcctagaagagcagacagaaaccagccctcgcttcctggacacccccaaagagccctgaaaatccccacgagtaccagcgctccctggtcccaatcggaaagaaagtctcccagatcctatccgatggtcccactctctgtgatgttttctgggtcctatttttgaaagaatgctattttgtattgtcccctttattgctgaagcaagagcctcgcatctcagtgtaaccggctcagggaaagccgaggctaaattggaatcgctatttcctgtcatcaggagcagaaagttctgcagagatcctgcagaacaggtgctggtggggccccgcccgtcaaggccagggtaatccaggacctgctgtcccccgaccccaggacatacaccgtgtgtccctacctgactcccatgcccaccaggaattcagaaatcaacctgcccgctctcagcagcccccctgcagctgcaaccacctgccccaggcctgggatgcccatcctgctctcggtcctggcagacaatgtccttctccttcccaaacccggtcctggcccccttctctcctgccagcttgaagccttccacctttgaccccatcccctcctgcaagctgatcatctgcgccggtctcgggatccagatgccctccccagcacccccttctcaccggggtggaggcagagggggcacctgcggcagtgggggccccctcccccgggaagggagtctccacagcctgcacggggcgggcgggggagttgggtggagactgggagtagggaagacaggaagtccctcccagatcccattccccatgcagccgcagccctacagcgttcccggttttgagggttccgggtgtggagtctcgagcctgggttgcacctgctcttggccgggaggtgactcccagagccgcaatgccagctcatgaggatggctttacccaggacgcgttcatgatgccagcaaggcagagccaccaaaacagaaaaatggaagatgcattttgtggaaagattgtgttatttgaaatttcaaagcgagcactgcagttgtcctcacaggtagaaagaagggcattttgcagggtggagagggcaggaccatttattttagcactcggggtttctgaaggttattgtctcctgagggaccctgaattcatttagggactcctagtcaagggccctctgggtccccccaagactggcacagaactctctccctaagagtgaacttgggaaacaggctgggaactccccccaatccggatgccccacaccttgggaagaagttggttaatccgattcttccaggcccatttcagcttggggatagagggtgtgatccagctataaatggggttctaagttctcaaacacgcctggcagctgcagattctgcctctcaggcaccatttccctttagaccctgagaagtaaggcctcaaatagagaggacagagactgtgctttactttctgggggaaggaaccatttctcttgggcaggcatgggggctgggtgtcaggaaaagggccaggggcccagtcctggaatcagattccaggaagtttccctaggaaacgtccccatgccactgtctttggctcaccagaatcccctgaggtgcacagcttcacacagtaagatgggcccagctgcctctgtaccagctcgtgctatgttgtgtgggcttttaagggtttgtttgtttatttatttacttatttgagacagggtcttgctctgttacccaggctgaagtgcagtggcacgatcatagctcactgtaccctcaacctcctggactcaagcaattcacctcaacctcccaagtagctggggccacaggcgcatgccaccatgcctggctaattttttaaatttttttgtagagatgggggtcttgctttgttacccaggatggtcttgaactcctgatctcaagcaatcctcccacctcccaaagtgctgggattacaggtgtgagccatcatgcccagagggtttaatttttttttttttttttttgaaatgaagtctcactctgtggcccagactggagtgcaatggcgtggtcttggctcactgcaacctccacctccctggttcaagtgattctcctgcctcagcttcccaagtatttgagattacaggtgcccatcaccatgccgggctaatttttgtattttcagtagagacggggtttcaccgtgttggctagtctggtctcgaactcctgaccttgagtgatccacctgccttggcctcccaaagtgctgggattacaggcgtgagccaccgcgcccagctaattttgttttttttttaacttagtttctaacattaaaaaattgacactcataaaactgattcttttatttttttagacggagtttcgctcttcttcccatgctggagtgcaatggcgcaatctcagctcaccccaacctccgcctcctgggttcaagcgattctcctgcctcagcctcctgattacctgggattacaggcatgtgccaccacacctggctaattttgtgtttttagtagagatggggtttctccatgtcggtcaggctggtctggaactcctgacctcaggtgatccgcccacctcagcctcctaaaatgctgggattacaggcgtgagccaccgcgcccagcctataaaattgattctttaaaaaaaattagaacatttaccgatgctggacccaccttccccaccttcagggtccactttctaggtggccacagtgcctgcttggcccctgtagcat

SEQ ID NO: 1243553 - DNA, 4001 bp, Homo sapiens
tgggaaagtcagggagggccctggtggggcctcatccacagcacaggaactggccggacttctgctggggtctcacactccttcctccacgccctgtctgtgtttgggtcttgaagggaaagaacctcaggccaggaatcagagtgcctgggtgccagacccagcgacacccctccccaatcaggcagccttcaggacgcagctgctctgcccctgcacagaatggtcatgaggttcacgcagataatgatggagaaggagctgccagctcaggaaagtcctggataaacacagggtggcgctggtcattaatcccccccgccgtgcgcaccagacagaagccagtgccagcagagaatgccaacatgtggggctctactgacatgcccaaggtgttcaaggcacacgggaagtggatgggaaactgaaccatgctaacaattctttgtgcttctatggcatgaaaaccatagatgatggcgtctcatgcctattatccttagagcctcccagtgaccctgcgagacaggtggaaatggcaggcatgtggtctgcattttacagatgacacatctggttcccagaggccagggactggcccctggcctgtcgctgactcatactcctccaactccaagcccggagacccaggtcccccacaaatagtaattacacacacacactcaaccacgcacgcacacacacacgggtagcaggtacaggaaggagaaaggaccgggagctcagacccacagagatgagaagctgtggttccaggtggagaagcacggggaaggagaacaggtttccctgtgtgctctgagcgctgctcagaaagaaaacctcactgataggacctccacccagacctcttccatctcctgtggccactggctagagaattcaccagcaaagcaaaactgttatgctgtaaattccagacagagggtactacccagcatgccaccttctctttgatctccccaccccagtgagtctaactcttccaggggtccagactctgtgccttgaaaatctcctccgcaccagcctcttctaccgcacacctccctcagccagccccatctgtacctccgggggtgtctccttgtcctgggtgtcctggatgcctccgccgtctgcagacattttctatttcagagctagaaagaacagctgagttgtttctccctctttttggccaagccccctccagcttctggccaggagcctagaagagcagacagaaaccagccctcgcttcctggacacccccaaagagccctgaaaatccccacgagtaccagcgctccctggtcccaatcggaaagaaagtctcccagatcctatccgatggtcccactctctgtgatgttttctgggtcctatttttgaaagaatgctattttgtattgtcccctttattgctgaagcaagagcctcgcatctcagtgtaaccggctcagggaaagccgaggctaaattggaatcgctatttcctgtcatcaggagcagaaagttctgcagagatcctgcagaacaggtgctggtggggccccgcccgtcaaggccagggtaatccaggacctgctgtcccccgaccccaggacatacaccgtgtgtccctacctgactcccatgcccaccaggaattcagaaatcaacctgcccgctctcagcagcccccctgcagctgcaaccacctgccccaggcctgggatgcccatcctgctctcggtcctggcagacaatgtccttctccttcccaaacccggtcctggcccccttctctcctgccagcttgaagccttccacctttgaccccatcccctcctgcaagctgatcatctgcgccggtctcgggatccagatgccctccccagcacccccttctcaccggggtggaggcagagggggcacctgcggcagtgggggccccctcccccgggaagggagtctccacagcctgcacggggcgggcgggggagttgggtggagactgggagtagggaagacaggaagtccctcccagatcccattccccatgcagccgcagccctacagcgttcccggttttgagggttccgggtgtggagtctcgagcctgggttgcacctgctcttggccgggaggtgactcccagagccgcaatgccagctcatgaggatggctttacccaggacgcgttcatgatgccagcaaggcagagccaccaaaacagaaaaatggaagatgcattttgtggaaagattgtgttatttgaaatttcaaagcgagcactgcagttgtcctcacaggtagaaagaagggcattttgcagggtggagagggcaggaccatttattttagcactcggggtttctgaaggttattgtctcctgagggaccctgaattcatttagggactcctagtcaagggccctctgggtccccccaagactggcacagaactctctccctaagagtgaacttgggaaacaggctgggaactccccccaatccggatgccccacaccttgggaagaagttggttaatccgattcttccaggcccatttcagcttggggatagagggtgtgatccagctataaatggggttctaagttctcaaacacgcctggcagctgcagattctgcctctcaggcaccatttccctttagaccctgagaagtaaggcctcaaatagagaggacagagactgtgctttactttctgggggaaggaaccatttctcttgggcaggcatgggggctgggtgtcaggaaaagggccaggggcccagtcctggaatcagattccaggaagtttccctaggaaacgtccccatgccactgtctttggctcaccagaatcccctgaggtgcacagcttcacacagtaagatgggcccagctgcctctgtaccagctcgtgctatgttgtgtgggcttttaagggtttgtttgtttatttatttacttatttgagacagggtcttgctctgttacccaggctgaagtgcagtggcacgatcatagctcactgtaccctcaacctcctggactcaagcaattcacctcaacctcccaagtagctggggccacaggcgcatgccaccatgcctggctaattttttaaatttttttgtagagatgggggtcttgctttgttacccaggatggtcttgaactcctgatctcaagcaatcctcccacctcccaaagtgctgggattacaggtgtgagccatcatgcccagagggtttaatttttttttttttttttttgaaatgaagtctcactctgtggcccagactggagtgcaatggcgtggtcttggctcactgcaacctccacctccctggttcaagtgattctcctgcctcagcttcccaagtatttgagattacaggtgcccatcaccatgccgggctaatttttgtattttcagtagagacggggtttcaccgtgttggctagtctggtctcgaactcctgaccttgagtgatccacctgccttggcctcccaaagtgctgggattacaggcgtgagccaccgcgcccagctaattttgttttttttttaacttagtttctaacattaaaaaattgacactcataaaactgattcttttatttttttagacggagtttcgctcttcttcccatgctggagtgcaatggcgcaatctcagctcaccccaacctccgcctcctgggttcaagcgattctcctgcctcagcctcctgattacctgggattacaggcatgtgccaccacacctggctaattttgtgtttttagtagagatggggtttctccatgtcggtcaggctggtctggaactcctgacctcaggtgatccgcccacctcagcctcctaaaatgctgggattacaggcgtgagccaccgcgcccagcctataaaattgattctttaaaaaaaattagaacatttaccgatgctggacccaccttccccaccttcagggtccactttctaggtggccacagtgcctg

SEQ ID NO: 1243554 - DNA, 4001 bp, Homo sapiens
ggaaggatgtggaatacacgagcaaaccccaggctgaagagccatccagtccccatcctttcatggccctgaagccttttctaggctttactgtaatgccttgctcatgtgactgtctctcctattaacacaggcccacaagctctcatcccaaagccagaaatccaaaacccgggtgtttcataactctttgacagcaaaacccaatgtcattcatttggcagcaccacctgacctgatataagcatatttataatctcaatttattccactaaatgtaaatgttcaaaattatggtggaaatattaataacatatatcttcagtttataaaatttcattgagctatacccactcgtgtgtttttctgtattgcacattatacatcaattaaatatcttttttttttttttttactgagagagagtctcactctgtcgcccaggctggagtgcagtggcgcaatctcagttcactgcaacctctgcctgccaggttcaagcgattctcctgcttcagcctcccaagtagctgggactacaggcaccagctaccacgtccagctaattttttgtatttttagtagagacgaggtttcaccatgttggccaggatggtctcaaactcctgaccttgtgatccacccgcctcggcctcctaaagtgctgggattacaggcgtgagccactgcgcccggcctaattaaaaaattttaactgatatgtttcattatttagtgttgccccagatccctctggagatgtgcttgatatatcgtctgtgcactatattatctttctcaaatttgaaaacctctgaattccaaaacacatctggccctgaggtgtcacagaagggcttacagacaccatccaaagccatttatccacaggtacatataaatgtatgacacatttataccttacattgttactctctactgaaaagtgtattatgcaattttcagtaatcgattttttgtttcaacaataaaaatacaaactggccgggcttggtggcttatgcctgtaatcccagcattttgggagacagacacaggatgattgcttgaggccaggggttcaagacccctttgggaagacaatgtgagacgccatctgtaccaaaaaacaaaaaaagccaggtggggctcctgtagtcccagctactggggaggctgaggaggaaagattgcttgagtccaggagtttgaggttgcaatgagctatgatcgcaccactgtactccagcctgggcaacagagtgagaccatctcaaaaaaaaaaaaaaaagaaagaaaagaaaagtaaaaagaaaatgaaaaaaatacaaaccatcttaataaaaaagggaagattcaaacaatatagaaatctgtaaaactctcccttcctcaataccattgtaccccccgacttaacagtctgacaaatgacgtcccagaccttttcctgtgcttttactaaaaaagtcatccatagcggggagaaaaggtgcttgatgtgtttctacataaatgagaccttactgcacagacattagcggcactatgagcttccgcggtatggatatgctctagtttcttaatcaatactcgagtgatgcattcgggttgtttccaattctttagtccatcctaagcactttatttattctgctcctcacaagacccctgaaaggtgcgcgcaccattctcatcctctggtgacttcgaagaagactttcctcgaagagggccaggactcaccagggtcgctcagcaggacacggcaggcgggaaggcgagccagccggagccccgcgctgtccaccgcagcctcgcccgcggggcgagcggcgatcgtacaggggcgtctgccgggggaccaagctggcagagcggcgcgggggaccagcacttcctagcagtgcgcgcgccctccggcctctgcctcggggcgctgatcccggccactcggagcccggtgcttgatgttggagccaggcggccagaggccccgtccccgccccggcccccgcccccgcccccgcccccgaaacacacaacgcccactacggcccaggagatcccacttccgccgcgagctcccggcgccggaagtcctcgcggggctcgctgggaaactacgctacgcaagcattccccagctcccagaaagccgttcgtccactgagcccgccttctccatgaccgatggccaatgaacaggaagaattctcaggctgcctattagaagacagaaactccatacgcgtcatacacctgcacccgggaggaaaggcgaggctctgcatctagatttacctcgttctcttttgtctccgcttttttttcacatttccttgcgaccctggcccttgagcgacaaaaaggggaagccaaggctggcccgaggaacggagagggcacatggcctagccacaagtggagcttctgctccgcccgaagggatgcgctggagcggcctcttccttctgccacggtctttctttgccaactagtaggtgagggccgaaaggccgcgggccgtggagctcgggccggggagactcttttctagcctcttgggtcccgctcctcccaattccctggagaggcgtcgagcttgctgggaagtgccctcgggtaaggggcgcggagcctcctgcggcgatcctctgtcttcgggtcgccttagcaggacgcggcaagcgggacactgacctggccggagtcccgcgttctctcaccagctgctttgtccacgagttgctgctgggcgtcaggggtcccacggcccggagggatctagagcaggggggctcggggtcctttccataccctcggatcctctcccactctctccacgcctcgacccggagatgatttcaggctccagatctctttcataaatggaaagagtttttttggtttgttttgtcttaattatgtaggtgttgcatgcttggaagagaaaatttagaaaattaattggaaaaccataaagatagctttctcgtgatagccacaaggcttgctccctcattctgctcatatgtcaccccctcaaggaggccttccccagctctgtaaacaacctgtgctcggcgttaacttttctccctaatgtttatcactacctgacatatacgtgtttcccacgactcaacgataagtgttcatgagggcagacactttttaatgccctatgacaagcacctagaattgtgcctggcacatggtagatgcttagtaaatatttgtttaatgaatgaaggtaaaaaacatttctaatacgaccatccaggaataagtactattcatgttttagtgtgttcttacagttttactgttcagacagttatatgcctgtgaatatatattatatatgtgtgtatatatatatatatatatatatatatattttttttttttttttgagacagagtctcgctctgtcacccaggctggactgcagtggcgcgatcttggctcactgcaacctccgcctcctggattcaagcgattcttctgcctcagcctcccgagtagctaggattacaggcatgtgtcaccacgcccggctaattttgtatttttagtagagacggggtttctccgtgttggtcaggctggtctcgaactcctgacctcaggtgatctgcccgcctcggcctcccaaagtgctgagattacagacgtgagccaccgtgcctggcggaattttcatattttaagtcccccacccttggacatttagattttttccatctttctgtatttgcagatatgcttctacgtacacctttattcatttgcttgaacatttccctgagaaaaactagaaatggaattgccagattactttgtgtacatgtttccaaactgtcctccagaaagaatgtaatgctttgaacttccacttgagaatcaaatgtttaccttcctctgttcctccagatttggacatttacagtgttcagccgttgttgtggcattccaattcaattgggaaacagctt

SEQ ID NO: 1243555 - DNA, 4001 bp, Homo sapiens
tttctaggctttactgtaatgccttgctcatgtgactgtctctcctattaacacaggcccacaagctctcatcccaaagccagaaatccaaaacccgggtgtttcataactctttgacagcaaaacccaatgtcattcatttggcagcaccacctgacctgatataagcatatttataatctcaatttattccactaaatgtaaatgttcaaaattatggtggaaatattaataacatatatcttcagtttataaaatttcattgagctatacccactcgtgtgtttttctgtattgcacattatacatcaattaaatatcttttttttttttttttactgagagagagtctcactctgtcgcccaggctggagtgcagtggcgcaatctcagttcactgcaacctctgcctgccaggttcaagcgattctcctgcttcagcctcccaagtagctgggactacaggcaccagctaccacgtccagctaattttttgtatttttagtagagacgaggtttcaccatgttggccaggatggtctcaaactcctgaccttgtgatccacccgcctcggcctcctaaagtgctgggattacaggcgtgagccactgcgcccggcctaattaaaaaattttaactgatatgtttcattatttagtgttgccccagatccctctggagatgtgcttgatatatcgtctgtgcactatattatctttctcaaatttgaaaacctctgaattccaaaacacatctggccctgaggtgtcacagaagggcttacagacaccatccaaagccatttatccacaggtacatataaatgtatgacacatttataccttacattgttactctctactgaaaagtgtattatgcaattttcagtaatcgattttttgtttcaacaataaaaatacaaactggccgggcttggtggcttatgcctgtaatcccagcattttgggagacagacacaggatgattgcttgaggccaggggttcaagacccctttgggaagacaatgtgagacgccatctgtaccaaaaaacaaaaaaagccaggtggggctcctgtagtcccagctactggggaggctgaggaggaaagattgcttgagtccaggagtttgaggttgcaatgagctatgatcgcaccactgtactccagcctgggcaacagagtgagaccatctcaaaaaaaaaaaaaaaagaaagaaaagaaaagtaaaaagaaaatgaaaaaaatacaaaccatcttaataaaaaagggaagattcaaacaatatagaaatctgtaaaactctcccttcctcaataccattgtaccccccgacttaacagtctgacaaatgacgtcccagaccttttcctgtgcttttactaaaaaagtcatccatagcggggagaaaaggtgcttgatgtgtttctacataaatgagaccttactgcacagacattagcggcactatgagcttccgcggtatggatatgctctagtttcttaatcaatactcgagtgatgcattcgggttgtttccaattctttagtccatcctaagcactttatttattctgctcctcacaagacccctgaaaggtgcgcgcaccattctcatcctctggtgacttcgaagaagactttcctcgaagagggccaggactcaccagggtcgctcagcaggacacggcaggcgggaaggcgagccagccggagccccgcgctgtccaccgcagcctcgcccgcggggcgagcggcgatcgtacaggggcgtctgccgggggaccaagctggcagagcggcgcgggggaccagcacttcctagcagtgcgcgcgccctccggcctctgcctcggggcgctgatcccggccactcggagcccggtgcttgatgttggagccaggcggccagaggccccgtccccgccccggcccccgcccccgcccccgcccccgaaacacacaacgcccactacggcccaggagatcccacttccgccgcgagctcccggcgccggaagtcctcgcggggctcgctgggaaactacgctacgcaagcattccccagctcccagaaagccgttcgtccactgagcccgccttctccatgaccgatggccaatgaacaggaagaattctcaggctgcctattagaagacagaaactccatacgcgtcatacacctgcacccgggaggaaaggcgaggctctgcatctagatttacctcgttctcttttgtctccgcttttttttcacatttccttgcgaccctggcccttgagcgacaaaaaggggaagccaaggctggcccgaggaacggagagggcacatggcctagccacaagtggagcttctgctccgcccgaagggatgcgctggagcggcctcttccttctgccacggtctttctttgccaactagtaggtgagggccgaaaggccgcgggccgtggagctcgggccggggagactcttttctagcctcttgggtcccgctcctcccaattccctggagaggcgtcgagcttgctgggaagtgccctcgggtaaggggcgcggagcctcctgcggcgatcctctgtcttcgggtcgccttagcaggacgcggcaagcgggacactgacctggccggagtcccgcgttctctcaccagctgctttgtccacgagttgctgctgggcgtcaggggtcccacggcccggagggatctagagcaggggggctcggggtcctttccataccctcggatcctctcccactctctccacgcctcgacccggagatgatttcaggctccagatctctttcataaatggaaagagtttttttggtttgttttgtcttaattatgtaggtgttgcatgcttggaagagaaaatttagaaaattaattggaaaaccataaagatagctttctcgtgatagccacaaggcttgctccctcattctgctcatatgtcaccccctcaaggaggccttccccagctctgtaaacaacctgtgctcggcgttaacttttctccctaatgtttatcactacctgacatatacgtgtttcccacgactcaacgataagtgttcatgagggcagacactttttaatgccctatgacaagcacctagaattgtgcctggcacatggtagatgcttagtaaatatttgtttaatgaatgaaggtaaaaaacatttctaatacgaccatccaggaataagtactattcatgttttagtgtgttcttacagttttactgttcagacagttatatgcctgtgaatatatattatatatgtgtgtatatatatatatatatatatatatatattttttttttttttttgagacagagtctcgctctgtcacccaggctggactgcagtggcgcgatcttggctcactgcaacctccgcctcctggattcaagcgattcttctgcctcagcctcccgagtagctaggattacaggcatgtgtcaccacgcccggctaattttgtatttttagtagagacggggtttctccgtgttggtcaggctggtctcgaactcctgacctcaggtgatctgcccgcctcggcctcccaaagtgctgagattacagacgtgagccaccgtgcctggcggaattttcatattttaagtcccccacccttggacatttagattttttccatctttctgtatttgcagatatgcttctacgtacacctttattcatttgcttgaacatttccctgagaaaaactagaaatggaattgccagattactttgtgtacatgtttccaaactgtcctccagaaagaatgtaatgctttgaacttccacttgagaatcaaatgtttaccttcctctgttcctccagatttggacatttacagtgttcagccgttgttgtggcattccaattcaattgggaaacagcttgatgtagcgtccccataaggtccacagtaattaaattttttttttttttttttggtgcggtagtgcaatttcatggc

SEQ ID NO: 1243556 - DNA, 4001 bp, Homo sapiens
gccatccaggagtaagtatgtaagtcctaataaactcatctacttgccaagctggactcgtccaaggcattctttggtctcttggctccctcccaaggggatagtttttttttttaaatacgattccaggttttttcctgttatgacattatatagattttctacataatccttgattacttttacctaattaaaccaagatggccagtgaagaactaactctcacaaaacactgagctcagatgtgtcatgagcaaattctttcaatgtttcggaaatgagtaattctaacactatgtaaaccgtagcagagcacagcaaagtaagtttcccaattctttttatggtgccagcacaatactgatgcaaaaactacagaccagtctcatttatgaattctaatgcaaaaattctatcaaggaatagactccaatagttcattaaatacatcatgagtaagtaggattatcccacgaagatactaattagtatatttttcacattaataaatcaaagaaagataaacacactgtccatctcaacagatgccaaagatgtttaacataattcaacatttgtgcctaattttaaaaacttacacactagagaaactctcatatgtaggaagtacgtacaaaaatattatcagcacattttaataacaaaacactgaaaacaacccacatgtccattgaaaatacatcgataaattttcatacagtttttacaatggaacattacccagaagctacacacagaatgaatttggaaacttaacattgaattatgcgagtcccagatgacttatacacacaatggtgccatttatatgaagctcaaaaaaaaaatttaagtacattgcttacagatacatgcatatgtaattattttttaaaataacagggctacaattaacacaaaagtcaatataactgttacctctaggggttggaggctgggagttgggttgaggaggaggaacacattgataaattcagcagtactggcaatcttctctttcttaattgggtggtgtgttcatggatgtttactactatatatgtaacatataaatatatattttaaataaatatataaaccagcaaggatggggtgaaattgaggacccaaaatgtaatacaaagaacagccaatgtgcttaactatactacagtgaacataaccacacttaagtggtaggaaagaaaaggggtaagcaactttggaaaacagtattttgactaaataccataagagtaaagacaaaaagacctgtatccaagtactgtactttaggtagtaaatttgcttttcatgggggtatgaattagcgattctgagactactaaatatattctaaaactgagtgaattcgtaattacgttgtagaagtcattcccaggtcactgtcaaccctgagccgagagaagcagggctgagttaccttttgggactgacactgctccaggagacaatgtcctccaaaagccgggctgcttctgctgccgggtgactgggaggggctctgcgctcccactcggccctaattcatgaccctatgtcaggagcctgggagcacacggtccatactcgggatgcacataggttaatgttcctgccagacctcagcatgtcaaaagacttgtggtatcacctcgggccgcttcacgcccgcaaatattccatcttttagctgcaccgacacatcttcccccgtcgaccaagtgctaaatgctcagggcctcgtggctgggacagcaacgtgcgtttccccttccaatgggcgcaagctattgagccacaaagaccaaagctggagtcgaggagcgcggaagagcaccccgggccgccgccctgctccctctcccagcctgggcctcctggcagcgtaggccacgggagaccctgcagcacccagggtgggagtgcgtctcaaccggacccagagcctgggggacagggcacggcacacagcgcccggagccctgcactcacctccgtagcggactgctccccggcgctgccggaagtgcgtcaccaggcggccgggcctctctaggagcaaggtcgctgcgcctcggtggtggtcacgcccggccagctgtggccgcatccctgtcggctagctcgggtctggcccacggtgactgttacccctggggaatggggcaggtaagaatcagagccaagcggggacccagcccggggaggtgaagctgcaggtgcagccacgtgtgggagtcttggaaatggaccagtggatggcgcgctgtcacacccaatgccccctttttctaacaaatagtttgtaatgtccatcttattctcctgacctgatattcatatataatggcctagaaaatcatacataacatacacacctacatattaaaaactaatgttatgccttaagtgtaatgaaagagaaaaaaaagaggaccgtcatctgtcgtttaaaaacacatacttcaatgtgtttggtcttggctgctgcaggagacctaataaggtggtcgcctttacacatagacgttgtctgagtgccacagccacaaagctgtgacttacattgttgcaaaagtcacaaaattatgatccaaaatggcaaacatgttttcgtgaagttctgaatgaaacacaggacaatcgtctcttgattatacaataattacattcctggaagatcagtgtatgttaaaactgtgcaaaaatacatgtttatccagaaaacaggtttagattcagataatttagaaatagaattttcacctacctgaatgttcagcaagacatttgaaagtgtgaacattttttcagtgggcaggactgtcctgtacattgcaggatcctggctcctatccacaacgctagtagcaatgttaccactgacaccaaatataacaaaatacctaccataaaattccaaaatgagccctgggggaagggagacagtactaaatgccactggattggacgacccttaaaatccccaccccctcacacaccccctaaccctggtaatgtgggcttttcttccttccagctctgatccatccaacgctgctgcactggagactggtatttggctcccacttgcctctgtggcttcttatcactcccattcattccctgactctacctcagccctacatgctaaaaatgctgttctctaaatctagaatgcccttcccttcccattcctaccctccatcttgactgttactggaagtgtgagctcaaatcccattttgcatgggaagcaagccttccctcatcacccagaataaggcaggacactcatttatgtgccatcacagcactgtgtacttacttaatggtgatagtttatttatatgtctgtcttctctggtggctgcagggaacagacactgtatctatcttgttcaacatcatcatcctcagctagagaataactggcagaaagaaggagagcaataaacatttgttgttgacaatggtccaaaggctccagccctaactcttaggcagaagcctactttgtgtgtccccaagggtaggatatgtcttatgccttggaccttgacagtgaccatggccaggtgcccttctctgccttgccctgaccctgatcttcactgttttccaaaatgagttcattaagaaaatgattgggcagagtaatagctggggattacgttgctcttgtcaataagttctggttttcacttctttctagggtcagaaatcaggagtgaggacttgttgaaagaaataggaaggaatcagatcacataaatgctggccccaaatgtttgcatcataaacccattgcctaattttacagttgagaaaataaagctctctaaataaccacaaagctcctactcctacttcagacatatcagaaaaatgagataataatgcacaaaccaagtttcaaaagctctatggtaggtctggagagatggagatcagttcttgtctgtcagcccctgttcttccattcttataaggttaca

SEQ ID NO: 1243557 - DNA, 4001 bp, Homo sapiens
aaccctgcgtcattcaagtggttctaaatcgcctctgttctgcataaaaaagggctctactgagactcccttcccttcccccagccccaggagaacccacaccaccaactgcaggtctttcattccacaggtgagaacctgatcttcagaaattccttctccttcgcatcattgctacatccagctagtgtcgggggcaacccccaagcccctcctccctcccacctgcccagataactgtgcctcacccctctcctttacagcctgggggtccctttgggggctggggcctagcagctcctgcagcctggggccagggcttcgctcagtctccattggctccagcttgaagctcggtgactctcgtgctgtttccagaggcaaaggctcctccaaaagcacttctgttccccgcccatggtttgtgacctgggaaccaacccacatcactcatcatcacaacagggcccaagaggaagggaaattagtataggatactgagagcaaaccttcaacagagaacctcaggcgatccctttgggcccaggtaacagaaaaatggtttacactaaaggcttttttgatcccatgtgcagggggaggggttagggaaagggcccactcccagagcacaccttccccacacagctcttaagatacacctcactcccttttgctctccccaccttttctaggtgcttctattcctcactataggataggctaaattggggtagccctggggaccaatgacctcagggcctcggtgccaaattatctttcaaagttcacaattaacggaggcccagctttgcagagaagaccagaccgtggaccctaacataacaacaggtaacaagtactaagcactcataagctagtagtgttcacaactttacatgctgctctccctctaagccctagaaagtatgttaatatcctcattttacgaataggaaaacaggccgaaagagatcaagtaacttgccaaagtaacaaagctagtactagcagattgaggatttgaacgctggcgatctaactccatggctaacactaactgttgcagggacaccgcctccgcgtggaaacagggcactcttcactgctttcgttcatttgggggaaaatctggaggatgagtgttccaggttaaatcacaagtcctcttccccacgtaaggtctactcagggcaatttacttgaattcgaccgggggcgcaatgtcccagtgctcagggctaaacaaaccacagataaaacagctctctctctctctcacctgttgtctcagtctcccaagctctctctgcatatcctccacaagggtcaccgcttcttcgccgctctccggatgcagctcctgcaccctgctctggatctcctggggcaggatggtcaggaactgctctaacaccagcagctccaagatctgctccttcgtgcgcatctcaggccgaagccacccatggcaaagctcttggagccggctgagggcttcccggggaccagctgcctcttggaagcggaaccgtctgaagcgcaagtgggaggcctcggggctcggtcctgggtcaggtgggggcagctcctggctccaggcgcagtcctcctccagcttcactatcaggagcccttcccgttcctgggagcccgggcccgacgccatcgtcaggtctccagagcgccttagcccgaaaccagccgtgcccgcctacgaaggcgccctgaacccatgtaaggttggacggcgccagcaggagcccggggccgggggctcccagtccaggccgaggagccccgctccagcccaggcgcggccggctccggcgcctaggcctcagtcggtcccaggcgccgccacgccggccccgtggcccatctgcgccaggacttccccgaggcaggaaccgagcgccacgcttctcaccctatatagaggacccacgcaagactcagacctctgctcccacgccggaaatctcagcgcgcaagttaggcgtccacaagcccacggcgcctgctcgtgaccaatttccgggtcacgttttgcgaactccagcgcccattaggtcaggtttctccacacactcaccgcctaccaatgagaagggaagattggcctacggggactggatgagcgagggaccaattggagacgagaggcggggccacggggcgcgccctgaaattctgggagtgactgggggcagggcagctggatccaagcgaagaaaacaagcctgaggtcgttgtgactggcgggcaacctgggttagaattactccggagcgcttgggaaaacgcagatcccagggccacgcgctctccagtgcgtcagtgtcggggtgagacccggaaatctgaattgttaatcagcttccccggatgaatcctttcccaagccaggccccacccgcttcggctactctgggctggctgaagatggtcccattggcccctgcggcctcgtcggctccggaagccaggggctcctcggcatgtcggggaggccagggagctagccgcccgcccagtcagtggcgccgcgtggcctgctgcgcggggcctgctgggagatgcagtccgcggcgcggcctcgcgactgcgcgtgcgccctgggcgagcgcccaagagcccggcggttctgaaaccccgagtcccgcggagaaccctgctgggctttgggctcgcttctgcggctggacgtcccagaggagcgctcgggtctgggttcgcggcacctgcttccgattttagaccgaattttaaatctgcccgagatgtgcagcgcctgcagttcattctccaagtttcagtctcttacccagccctgcaagggcgggatctgcctccagctccgccgtggactgtgatagttgggggcgagtggcaggagggccgcagggccgattccctattgggcgcggttgtgggctttgtgtcggtgagcggggctgcccagttgtgaggcggcccaggtcctccgggccatgagatccgcaaatggaagcgtcctgggatagaatgtgacaatcagttaccgtgtattgagcgtttatatgcagatcgatcctgaaaacacgttagtatgaagcagatgctattagcagccccttcctacaggtggtggcactgaagtcatttacttgggtcacacagctagtctgtcgtcaaaggtgaggctaccatgatagtagagggtaatatgggattaaaggggtttgtgatgactaagtgaaaagagtactgatattttagtttttttcttttttttttttttccgagacggagtttcgctcttgttgcccaggctggagtgcaatggcgcagtctcggctcactgaaacctccccctcccgggttcaagcgattctcctgcctcagcctcctgagtagccgggattacaagcgcccaccaccacgcccggctaatttttgtatttttagtagagacggggtttcaccatgttggccaggctggtctcaaattcctcacctcgagtgatctgcccgccttagcctcccactgtgctgggattacaggcgtgagccaccacgcctggccttttttaaaaattttattccagggaagatgacagatccacaggctgtcgtggcagatgcagagccagcgaccccatagcactcaaggtccagtttggaaagccttgtttgctccctaggaccattctggtggttttaggcattcctgttcttttgtttttgagatagggtcttgctctgtcgcccaggctgaagtgcaatggcacgatcattggacattcctatttcaagagacatagattctagactcataaccaattgcagaagactctagcctcaaaaccacttttctctgacatttactatgtaatctcaggcaacttatgtaatctcactaaaccccaaacttcagtttcctcatttgttttgagggactactatacgcacctcacctcatatcactgggttaggatgaaatgagcggagctacacag

SEQ ID NO: 1243558 - DNA, 4001 bp, Homo sapiens
ctcagggagtggtaatgctgttggaatacagacatatctggctcaagtgtcaagtcaggtcacggtatcatttgagacattctcctaccccaatactgctcattaaaatgctcagggaccatcctcccagatcctgcactgtgccccatggacaccgcagccgagtttgcaccacctcactggggtggggtttttgttttttggtcctttgggagtttttctcccttcacaaatctgaatgaatctagggggcaggaatcatttgtgactgtttcccctcaataccagcaaacgattggctgaccagcaatgtgtctccaagggatgaaaactagctttgaagaaataaaatccttatgtcccaaggggttatctttttaggttaagggtgtcccaggagatttctctcagccccagggcatccagctgctcccctgagggactacatttccataccttgggcggtcctctaacaggaggtgacctggggctgacagtcactaaacactccaggagacatggccactgtgggcatcttgagtcatcccagacagttctgaaattcaggaacaggaaaagactggatagagggtggctatacagggccctgtaaagtttccaaagcaaaacctcaagtcaaaagacattctttccgataacgtgtctgtgcctggggaagatgaatgaaaaagaggcacagttttttttgcagtggagtgtcagggattttttattctctgctttcctctcacgtgaaatgtatgccaaaaaaacacaaatctttaaaaaagtgtcatccactgctctgtgaaatcatgattaatgagtaaaatactgtctgaaatgtacaataaatgaccaatagttaagaatgtgaactggagaggggaagttggcctttggaaatgtcgggaaggaactggaaatttaatattttattgcaagcccagttagactgggggaacacagtggtggacttgagactctgcgtgctacacgttaggaaagcgcagggggaaaaccagttcccctgggcagtgttaagatgattaatgagcaggcgattatacggaagtggttatagtgccccaggtttctagggagaaaaaccaaaaccaaactcaaatgcttttcttgtaaattacaactttaggggaaaacaaaattcagacttaacgaaccacaaagctccaattcacctccacctgcatagtctaaataaggcaactacaaactgtaacccatcggttaatttggtctgcttcctcatgcaccttataaaaacctttccttcaagcccctctggggatctccgaaccacaaaccaggactgcaggcttcccatgtcacaaatcgctatttgctcaaattcttcaacgttttaacagtgactccctttaattcttaagaggagtagtgactgaggaccccacagggcacggtttcttcccacacaccgaacctgggtctcccctgagacgctcccgtcctcaccgcacaatctgggggagacgcggggctgcgacgcggagctgcccagagagggctccggccagggacgaggtcgctctgcggggtcgggatgggacaggacacgcggggtcccggctgccggcctggccgccatcttgcagcggaggggaccgagggccgagctgcaccagttgggactcggggcccagaccccgaggctgactgcggggaggcccgggtgcccctacagcgggttcccgccgcttccgaccaccgccctccctccctctggggacccccgaccccgcacactcaccatttcccagcttccgggatgccctggcgtcttagctacgaatctcccagtgcctgcaagtcgcagagcaacagaggttctgtttattctcagaacgcgaagccgcctgggcctcccagaacgaaagactcggagctgtggcgaggagacccgagctctaactggagccgacgaaggcccccgccaaatcccggaagccgcccctgctctccggcttcactcctgattggacggtttccactccagcgcccctgattggataaagctccatgccccgccccctcattattagtgccttttttttttttttttttgaaagggagactggctcattgaggtggggccgcctgctgcgggtattacagctaattaaggggtgagctgcgacttgaaatacacttgctctttcccttacctggttctgcttgtataagacatcttattagctaattaagtttaagaagaagtatatttagacacctttaaagcaagaaagaccctcatcccgtcccttagcacctctcttaccgcactgtaccccactgctaacgccaccgtgggagggggcccctcagctgggaacagaaggccgtacacttcattcacgtgttttcaattaggccctcgcatgatacatagactgaaccagtgcaaaagcatcttataggggcatgcaggctggggtcccaggaggatgttgcgggccgtggtggaacgtggaagaggggctggcctattcttctaatctacaactctgcccgcatctcctggagtctgcatcactggtaacggggccgctgactgtccgtctgtctctccttctcaatcccttcaagctcagggaagaagggtccttggcagcgacagggctgggagctcagttcctctgggccgtgctggctcaggctctgtggccacggactcctcagccctacctctggtttttgcttttgttttgagacagggtctcactctattgcccaggctggtgcagtggtgcagtcatggctcactgcagcctccggggctcaagcaatcttcccacctcagcctcctgagtagctgggactacaggcacatgccaccatgcccggctgatttttgtattttttgtagagatgaggtttcaccatgttgcccaggctggtctccatctcctgagctcaagcgatcctcccaccttagcctcccaagtaactggggctacaggttaatagtcagttcgccaactcctgagctcaagtattctgtctgctttgacctgccagaatgccctattcctgtttttctggagtcttggagctagtggcgctgcagcacctcgtagtcttccggctgagtagattctcctagtcttctggctgagtagaaggtgggagaggaggtgggtgtcaaactgggccagggccctcggccgccatctagcttggttaaactcccacttgggacagatcaggctctgtgccttattcagtgagacgtgtggaacaaatgcttccctccccaaagcagaaacatccctgattgctgacagtcaggattccatgcacttgtcttggcctggggcatggctgcctctcaccctctcacccagttctagtcgctgcactctgtggcctccctgccaccagattaggtgtagacaacgggtgtgggacagggctgctgacaccactggctgaccaaacccctttcccacactgaagggagaaaagacaggaggttaggggctcccaaaggcagcactgcttgtgacagcaccacgggagtccttagggcctactaaggggctgggctggaactcaggatcaactctgcctgactccaaagcccatgcacctccatggacctcacaactcaagcagcttccctaggcctttgaaatcctggagattgactcttttgcgatagaagaaagattccttttgattctcatccttctagtactcttcacaattggaaataatccccaccagagaatgcttctgaaatgtcttggaaacatgtagaataatttgggaaaatggctgaaggctgagtttaagaaatcaaggcctaacattctatttttcatttcttataggagagatttgaaagcacttataatggactcaatgtgtctgcaaattatttttgtcccctttcagtatttgtaagctgttgatgattttcaatacagattaactcaaactactgtgactgaaacaatctt

SEQ ID NO: 1243559 - DNA, 4001 bp, Homo sapiens
ccccagggttccaccctcggtgctggggcagccgtggcgccgtctctttgtcccatggccacttgactgccagcgcactgtccagcaagaaggccttgcagctggagctggtatccatggtgtagtcgtggccctggtcgcagccccacacgacctggatgacgccgcagtactcggaggacagtgtcctctgaaggtggggcagggccccgcagctggccgcatgtccatgcacccaccccaccaagccgtgcaggcactgggggctggatgtgatcagatccactgcagagagtcaacagagatgtcagatccacggctggtcggcacccagcccaccctccaccgggggaggactcacccagacacgctccctcctctgcccctgttgggggctgggcaccgaccctgcaaaggatcagtgtggccatgagcaggacaagcaggcggaggttcacagcgctcgtcgtacgggaccctctcgagatctcaaacctcagcggtccccataggcaactttctcttccctcaccccagctcctcccagttcatctctccacaacagtcccagggctgttggcactgaacccgggcatggcccattccccccacccagaggctcccgcggaggcacgccctgtccctctctcaacacccgtcacactgcagtactgacagcctgaacgtgctctgaacagactagggcgtactttgcacaaggcttccggcgaccagccggggaggcgttgaccctctgcaggaaggacttgagaaggctgtggcactggtagaactgggcgtggcagctcttgcagacaaacggagacaaggtggggtcctggcggacagccacaccaagcaggcgctggaagtcccgtacgagcacgcgctcctctgcggatggcctctccatgctcgctccaggcgccctctcggagatgctgcgcaggcttctcgaggaaaacttcccgtggcagaggcgacagtgacccatggcgagagcccggcctgctcctgcacagagcggcaggaagtgttagcagctggcaaaggaggctcctgagcacagggcgtcccggactccaggtccgagggcagcgcctgcagcgcccttcgcgcggctcccggacacagcaagcggctcgggcgcgcggctctcggcgggacaagccgccctgtgggggatgtggccgctggtccaagaaatctttcaaatttcaaaggcctctaaggcctctccagcgaagcaacttcaagagtgaaacctggaactgcaccctcctcccagcgaccgcgagacccggggcaggcgctgcgccctccaggaaacgccgcggtttcctgtctgccaattgcaggtgccgcctcctttccggctccgcgagggcacgaagcaggggagggcgattcccacgcgcgggcaccccagggcgacctgcccgcggtgacagcgctcctcacgccgggtcccttctggccgagcccgcggccggggaggccgggccggcgacgccggcgtcacggagcgcgaggaaaaccgagccggccgcccagcgcctatcccgacgcagccccgagtccgctacgcccttggccgggtggaggagaggccgcgccggcttccgggcgtcagtgcggctcctcccacgagcaacccctgccgcgaccccaacccgccacgcccgggccgcggacccacctgcctcgtccgcgccgtcctcgcccgcgtccccgcaggaccccaccgggccccaggcgcgccgcgccgtcgccccgtccaccctcggcccaccgctaagggaagggcggccccgagtccggctgacgccgccgccgccgtccgaggccccgcactgtcgggacgacccaggagacaggaagcggcccagccggtcccgcttcatggcagcggaggacgccagcagaatcccgcgggtgctgcccggcccgaggttcctagaggacccggcgttaggctccgctcggcgcgctggaagcgaggcggggcgggggaggggcggagcgagaagcaaagcgaggcgggcggggcgggccaggggccaggggcgggaccccgccggccgaggttccacccgcggtgccagcgcccccgctcgtaccgctcccctctcgggcccgagggcggccgtgcccgcctctgtcgccaatggagcgctggcctggggcggggcggtgggcggaggggctcgccgacacctcacgacgagtcctccagggagaggcgacgcggccctcaccgcctcttaccgtgggagacggaggcgcggggcgggcaggcgccggcggaggccacgcggcgcgcaggtggcgggcgggctgcagaaaggggaggggggccggggtctcacgtagagaggggcctggctgccgcggttagacgcccatggcaactccgtgaggggcccttctcgccagccccgtctcaagacggcgaagaggcccggctccgtcgcgacaacccacccggactctgccgcccccgccactaacacccgtggggcccgcagtacgcgcggagggggcccgtcgccggaagtgcggccgcgtcccttcctgcggtccgctgctcgggcggctccagcaccagcgccggctgcgttccgggcctccggtcgcccgtccagcccctcggctaccgccgccgcctcccccgctcggcgccatggccgctgcggccggggacggcacggtgaagccgctgcagagcgccatgaagcttgccaacggggccatcgagctggacaccggcaaccggccccgggtgaggcggggcgggggcggggcttggccgctgagggtggcccctggagggacccccgcccggggagggcgaggacggggccggctcgggctggagacttgggagcgggcgccagccgggatcccgggccgcggttcccgggcgaggacgggggcggggcgcagccgggcgtgcagtgaccttggacagctcagatcctgcggaccttggctttccactccgctcgctgagccggtgcatcacagcctgggctccacctgtagaggagatgtagcaggagggtccgccaggccaccttccaaaatccgagtgacgggcaggtccgtgcgttcgtgcatttttctgggcagagatggtagatttaatccggttgccacaggggacggcatgcagagaaggccacatacctgctcatttgtgatgctgtttgcagtcgtcttaggaaggaaaagcaggccggaggggtgtggcccgttcctgagatggggccgaatctaaggttggcgaccaggtagagaagctggcccagccacacccggctgcccaaggagggaaggagcctgcctgtgcctaggagaagcctcgttcctgaatctgctgctttccccaagttggtttttagggcagcaggtgcccccgcaagtcagaaatcctgcctggattatatttcgtctttctctctgaggcatagacttaaagataggaaacttaacagctagggataaaacaaaaaaacatagcatattgctgggcgctgtggttcacgcctgtaatcctgacactttgggaggcccaggcggtggatcacctgaggtgaggagtttgagaccagcctggccaacgtggtgaaaccccgtctctactaaaaatacaaaaattagctgggtgtggcggtgcacacctgtaatcctagctccttgggaggctgagggatgagaatcacttgaacccaggaggcggaggttgcagtgactcgagatcctgccactgcactccagcctgggcgacagagtgagactctgtctcaacaaaacaaaacaaaccaccattctgtggttccaatgacctgtgccttgtcagaggggtcacacagccttgaaaggtaacagttctaggctcctgtgtgcactggaaatacgtaactcgcaggttctgggaaagggatttctcggaacttaaaccgggaagtgatttgaaaacttccagtatcactcccttt

SEQ ID NO: 1243560 - DNA, 4001 bp, Homo sapiens
caacagtcccagggctgttggcactgaacccgggcatggcccattccccccacccagaggctcccgcggaggcacgccctgtccctctctcaacacccgtcacactgcagtactgacagcctgaacgtgctctgaacagactagggcgtactttgcacaaggcttccggcgaccagccggggaggcgttgaccctctgcaggaaggacttgagaaggctgtggcactggtagaactgggcgtggcagctcttgcagacaaacggagacaaggtggggtcctggcggacagccacaccaagcaggcgctggaagtcccgtacgagcacgcgctcctctgcggatggcctctccatgctcgctccaggcgccctctcggagatgctgcgcaggcttctcgaggaaaacttcccgtggcagaggcgacagtgacccatggcgagagcccggcctgctcctgcacagagcggcaggaagtgttagcagctggcaaaggaggctcctgagcacagggcgtcccggactccaggtccgagggcagcgcctgcagcgcccttcgcgcggctcccggacacagcaagcggctcgggcgcgcggctctcggcgggacaagccgccctgtgggggatgtggccgctggtccaagaaatctttcaaatttcaaaggcctctaaggcctctccagcgaagcaacttcaagagtgaaacctggaactgcaccctcctcccagcgaccgcgagacccggggcaggcgctgcgccctccaggaaacgccgcggtttcctgtctgccaattgcaggtgccgcctcctttccggctccgcgagggcacgaagcaggggagggcgattcccacgcgcgggcaccccagggcgacctgcccgcggtgacagcgctcctcacgccgggtcccttctggccgagcccgcggccggggaggccgggccggcgacgccggcgtcacggagcgcgaggaaaaccgagccggccgcccagcgcctatcccgacgcagccccgagtccgctacgcccttggccgggtggaggagaggccgcgccggcttccgggcgtcagtgcggctcctcccacgagcaacccctgccgcgaccccaacccgccacgcccgggccgcggacccacctgcctcgtccgcgccgtcctcgcccgcgtccccgcaggaccccaccgggccccaggcgcgccgcgccgtcgccccgtccaccctcggcccaccgctaagggaagggcggccccgagtccggctgacgccgccgccgccgtccgaggccccgcactgtcgggacgacccaggagacaggaagcggcccagccggtcccgcttcatggcagcggaggacgccagcagaatcccgcgggtgctgcccggcccgaggttcctagaggacccggcgttaggctccgctcggcgcgctggaagcgaggcggggcgggggaggggcggagcgagaagcaaagcgaggcgggcggggcgggccaggggccaggggcgggaccccgccggccgaggttccacccgcggtgccagcgcccccgctcgtaccgctcccctctcgggcccgagggcggccgtgcccgcctctgtcgccaatggagcgctggcctggggcggggcggtgggcggaggggctcgccgacacctcacgacgagtcctccagggagaggcgacgcggccctcaccgcctcttaccgtgggagacggaggcgcggggcgggcaggcgccggcggaggccacgcggcgcgcaggtggcgggcgggctgcagaaaggggaggggggccggggtctcacgtagagaggggcctggctgccgcggttagacgcccatggcaactccgtgaggggcccttctcgccagccccgtctcaagacggcgaagaggcccggctccgtcgcgacaacccacccggactctgccgcccccgccactaacacccgtggggcccgcagtacgcgcggagggggcccgtcgccggaagtgcggccgcgtcccttcctgcggtccgctgctcgggcggctccagcaccagcgccggctgcgttccgggcctccggtcgcccgtccagcccctcggctaccgccgccgcctcccccgctcggcgccatggccgctgcggccggggacggcacggtgaagccgctgcagagcgccatgaagcttgccaacggggccatcgagctggacaccggcaaccggccccgggtgaggcggggcgggggcggggcttggccgctgagggtggcccctggagggacccccgcccggggagggcgaggacggggccggctcgggctggagacttgggagcgggcgccagccgggatcccgggccgcggttcccgggcgaggacgggggcggggcgcagccgggcgtgcagtgaccttggacagctcagatcctgcggaccttggctttccactccgctcgctgagccggtgcatcacagcctgggctccacctgtagaggagatgtagcaggagggtccgccaggccaccttccaaaatccgagtgacgggcaggtccgtgcgttcgtgcatttttctgggcagagatggtagatttaatccggttgccacaggggacggcatgcagagaaggccacatacctgctcatttgtgatgctgtttgcagtcgtcttaggaaggaaaagcaggccggaggggtgtggcccgttcctgagatggggccgaatctaaggttggcgaccaggtagagaagctggcccagccacacccggctgcccaaggagggaaggagcctgcctgtgcctaggagaagcctcgttcctgaatctgctgctttccccaagttggtttttagggcagcaggtgcccccgcaagtcagaaatcctgcctggattatatttcgtctttctctctgaggcatagacttaaagataggaaacttaacagctagggataaaacaaaaaaacatagcatattgctgggcgctgtggttcacgcctgtaatcctgacactttgggaggcccaggcggtggatcacctgaggtgaggagtttgagaccagcctggccaacgtggtgaaaccccgtctctactaaaaatacaaaaattagctgggtgtggcggtgcacacctgtaatcctagctccttgggaggctgagggatgagaatcacttgaacccaggaggcggaggttgcagtgactcgagatcctgccactgcactccagcctgggcgacagagtgagactctgtctcaacaaaacaaaacaaaccaccattctgtggttccaatgacctgtgccttgtcagaggggtcacacagccttgaaaggtaacagttctaggctcctgtgtgcactggaaatacgtaactcgcaggttctgggaaagggatttctcggaacttaaaccgggaagtgatttgaaaacttccagtatcactccctttatcctctcagaaaagtatttttttaagccactgaatgaatcacccttgagttgcacaagaaggaaacattgcatagaatgaaaaatgacagcaaactgctgaggtcacttccccaggcccactgaatgagaatatcagttcctgtgctggagagaaaggcagtcagaggagaaaatgaggtccagctcgtccctggctctctctctctctcaggtcctgatgtcttttccaagtctggagagcagcgatgctgcctgtgccctgcgcagaaaaccgtgttccggctgcagctaaccaccgcaggctcaatgtctctgggtgtatctcagagataagcaggtggtggtgttccttgcttatcccacaagggcacctggccggaataatggagtcacttccctccactggcctgaccccactctttctctttcctggacacaggaggcatacacggaatacctgaggagcatccactatatctcccaggtgttactagaagaagtggaaaccactaaaggtacggctcagccagccgggcgcggtggctcacgcctgtaat

SEQ ID NO: 1243561 - DNA, 4001 bp, Homo sapiens
accccacagacgaagggcttctgctcagcctgcacgcactggtgctccagcaggtcagtggcctggtggaagatcttgagacactgtgtgcactggaatgagcggtcatggcccgccagacactggtgctcatgcggactggacaggtgcgccaggtcgtgaccacacacgccacatttggggcctggctctcctgctgcctgcaggggtgcgtgttgtgggggctgcaggccggggtctggctgcaggaggatgccatagacggcacagcccagggggttctccgccgtgcccggaggcagcgtgtgctctgccagggctggcggtggctctgcatggtgctgaggctgcggtggctgtggctgctgcggctgcgtctgtggcggctgttgccagctttccgacatgcttgggaagatgaaacagggtttggagagtaatggcttcagtttcccgcttcacgtgacccaatccagagagagaagctgcccaatcacagagatggacaaggacctcagacaaggcacagaagaggggctggtcagacagcccgagtcagtaaccaagcggacagactacaaggctctgcctacaggacatgggggctcttcaagggagggtcccagcagtgccggggagactctgccttccccagtgatccgttctgtagagaagagagaaagtatgagctcgaggaaggaacaagcagcagtttcctgggccttctccctgtcctgcccgcactcaccacaccatcacaaaccacacatcggggaaggcagaggtgctcagggctgcaggactcctcccttcttaggcaatcagagaggtctgcagccagctcagctcctccaggcagaggaaatggcagcggcctccacccccacccacctcagtgccccgcccctgggccaggacatcccagcctccacaagtcccctccagcttcctgccaaccctttagctgagactcacaggtgagagtccggggttatctgcctacaatacagaatcctccttaaggcccgcagctcctctcctgttgctaccctgagtcttaatacgggccacaccacttagagctaaggaggccagacctcccaggtctgagagcccagtggcaaatggcctctgacagtcaatatttaggacaactacgtggaaccaaggaccatttcaaaaactctcacctatgagggactgaccacaccccttcaactatccctgaccacaggcccattctctctccgcgtgacaggatgggtggccctacaggaaccagagcccataggtgatgggggctagatgagagggccacagaaccacccaggcttgatgtccacacagcagaacttcctcactctggttctctcccagaactcacacacacacacacacacacacacacacacacaaagtcctaaatcctctgaatctcatagtgtcaaggcctgcaggaaaatgtaagaaactgccctggtctgccttggcaatgcaggatgcagcatgctaaccacagagcatttctcatcacctctctagagacaactccattcccttactccaagcctataaagttctgggtaattgttggaaggtaaagcccacccagcccaggcaaatctctaactcaccactttgtggcagcatgaggtaatgccagcgagagggaggaactttcagagtcagatgcaacccacttccaggttcccagctcatctgcctcttacatttaaaagtttgtaagttttctcctgagcagaggaagaaggaaggagaagccttcacaggacagtctggcctctaactgctctgccaaagaaatgtaagagtcaggctaaaagctgtcatcctcagcatcttccggaagggagggaggagaggagcggctgctctgggtggaggcagcaggttgcttgagcaagcaggtaccactctaagccttctcgggacagagagggggaaggtgggcttctctgagcgcctgtaggtccgctgtgccaacccactgttttgtttgctttttctggcatgaatggctgtcagacagtgtcccctggcttggtctgcagcaccccctgcccaccctggccctcctgcagcaaggtgcagccaggaagcctctgtgatcactccgcaaaggggagagaggaggcaaggagaggcaggggaggccccccacctgcgccccaccccgtctcttcttcctccctgagaaaccgaatgaaagccgatcacctcccgccggccctgcctgcaggcccagctgggctgcgtcctgtcagccctcgtccgggatggcccggccgctgcgacccgagggcgagccccgagggcggccgggctggagaaaggccccagggctacaggccgggcccaggaagcggctgcgcctcgaggcccggcctgggccgcccagaagctcaagaggccgctaggtcgcggcggaggggcgcgggggggcggccgggccggcagaggaaggggtgcggcgggcgcgggggtggcccccagatgcggccccgggcgccccgccgctcacctgctccaggccgcctgcagggcaggcgcggggcgagcggcgaccagctgctctctcggccgcccctttattccggctccatccgcggcggcgcggcctacgcgcgctgccaatccccggcctcgcgtagcggctgcggccggaccgggggcgggggacgggctagcggcggccggaacggaggaagcgacgcgcgctgccggagtagcggggccggggcgaggagcgccgggagggcgggcggacggaccgatggccttgcggagacgggcggacgggcgggcggcgcgggggccagggaggcggggccgggggaggagcggcatcccgggcggcggcggccaatgcgggaggagcgggcggcgcggagcgaggccgccccctgccggggaccccgtggccgggccaggtcggacaagccgggtgctccgggcggttttcgagtcgccaggcctgggcgcctcgactaaccgaggaagggcgctctgcttccggccaccccgctcgggcttaggggagggggctccgggtgaccgccctcggcccggctctgcgcaggagaggaggggcctcctagaggctctggtctgccacaattgatccgcccctaactgctcagcttggcttttaggggcttggactttgggctggtttgaggagggggctccaggacctctgatcctggccgggctcggggcaggcaggggtctccgctgggtctagtgcgctgacccgggactgtcgtgtctggtatgtctggtcccgggtggctgcagacagcagcgggcagaaaggtgagggccctgagcgatatatgaaatgggtacacgaaggctggggaggtcccagcggggtgccgggaggctgcaggtgaccagatccgcgtgcgcagccggcagacagcttggagtcggtgggctgaatcttcaccactgtcctgccgggttccgcccctcccggctccgccccgaggcggtgccagcccaggccccgcccctgggagggcgcttccggcacagcggaactccgggtgccggttgaggttgctggtggacctgctctggtggtcttggatgaggccccatgagcgcggcgcccctggtgggctacagcagcagcggctccgaggatgagtccgaggacgggatgcggaccaggccgggggatgggagccaccgtcggtgaggagtgaggaagtctctccggagggcgcgcgcattcaccctagagccagacgggacccgaatgtctgggggtggagtggggagggaggatgcggggcggctctgggaaggaaaaggggacgcaggaagaaaggaggatccagaagatatacccctcccccccaccccagacaaagctccagagtggccccacctggctagggccaagttgggaggccagacctgggttcgggtccagcctcgcgctggcccactctatcgcctggcacacatcc

SEQ ID NO: 1243562 - DNA, 4001 bp, Homo sapiens
cggaccgcaggtccggggcggcctcccttgggggggcagcccgggccggccgaggccgctcgaaggcggggggaggcccggggggcgcgccggggccctgcctgttgcaatgcggcagtccggggctcccgatccaagcggcggtcccagcggcgcggggagtccggaggccactcggccgagccgagttatgcaaaaaaaaaaaaaaaaaaaaaaaaaaaaaagccgcccccctcctcctcccaaccccccgccggcccccggcccctgcggccccctccttccctcccccaccctaccgccaccctcaccctcctcctccttctcctcctcctccgccccttgccggatttttgtgcaaagtttgcaggcgtccggccacgcagcccggtgcggagctcacaatgaacccatctgaggagggggaacggggctggagtcgagggtatctcaaggggggaggagaccgggaggcggtcgggagcgcggaagctcagtaccccccaggaaaaaaaaaaaaaagaagccttcgaattatcccctgccgcacaaaaaaaaataataaatattaatggctcaaaaatgcccaagcgcctggtttggagattatgatggatggggggcgggggtccctcaactcagcctacttggaggggaggctcgaaacggccgcagtggctcggaagccgcggctcggggcccctggctcacgcccccttctctggctctcggatcggcccggcgccggccccccggaggaggaaggggcgcgcgggggcgctcaggcggcggccggcaggcgcgcccgtgccccgggcatcgctcagcccgtgcgccgggccgccgctgcctgccctcgggctgcggtgctcagcgcgaggcgcgcagccgatccccaggccggtgccaagtcgccggccccgctagctgcctccatgggccaggggctcggagaggggggaggcggcggccgcggtggcggaagaggaggacgagcaggcggcggcggcggcggccgggctcccgtcctcctgggcagcggcggcggcggctgcgccccggctcctccgcgctccagccggcgccggcccgcccgccagcctccctcgcgctcctgtcttctttgtggtcgctggctctcctcctcccgatccggctgctggggctgcactgcagagacacataataaagccaggcttggctggaaatgtagccgggtcccagcaggaggatgtgaggagcggagtcccggcgggggagcgctctgatcccgtggggcgccccgcactgctccggctcggatcagacggagagagggccaacagcaccgagcgatggacagcgctggaaatacagctccggccgcccgcaaaacccggaccgtggtggcggcggcggcggcggcggcaggcacggcgcgggcgcgggcaccgcaccagcacgcggggccggggctcgggcgctggctgcaccgggggcaggaggagggaacacacttagggcccacgcggctgtcaagctcgccaagacgcatgagcctcacaaactgtaaaaagtgaaagaatgggggagcaaacggagttgggctgccctagtattgccacctcgcgatgtatgcctcacgcacatgaactatccagggacctggctctgccaggttggcttttgcccaccggtcggtgttcaaagaccacccctgccccacatccaacaaattcttccaccactgggctaaccccgtgcgccccctacacccttatttgtagaattctcgcgcctggtgtgcacttcctctgtccgactgtaaaaggaacaccttacccctgagaccttgcaggagcaccccctccccgcgcagttgtcagaagaaataaaccagctgctactttctgcgaggttttacccagccgccagggggcgccgcgcgtcccccgcagctcctgaaccggctgagactctggtctccgggcaggcccgggaagggttctgacttgggaaaagtcttccccagacggctcccctaaaccgttcctcggagcctctccctccccaactagctgcaggcggccaggtctcgggtggggagcggccccgacctcgcccccctcccgggtgagtggcgccaccttgggccggcgcgccccggagccaggagaacggagcgggtgcacggcgcggcgctgggggttatcaatctctcggatcgataagttgccacttggagaggggagggctacgtcccctcggagacgagttacccagggcaacctttcacggaaaaacccgctgcccgccgagaacagcgccggggccggccgggccgcggcgcccgccccacgcagggtgcccgcgccccgccgctccccagcctgccggccagccgggcccggccccgctcagctctctccgcggtcccgccgggccctgctcgccaaccccgtgctgggctgattgccgaggtagatgccacccacgcacccccgcggctggggagcgcgagctggaggatgcggagaggcctgaggcaggggggccaggcgcgcgcgccctaggcagtctcagaggtagagtcgggtgacgggctaaacgcgacgcctagctggacaccctgacagcggcagcgggcgagcgaggctccccagaggggcggaggccaggaccgagacgtcccctaactagacctaagccttgagggccgcccctccccaggttagcgctaccatccccaggccacagtcctccccagcttgtgcgtccaagagtgtccaacatctcggccttcccggagggaataggagcccccccccccacgcccccgcggcccagggatggacggagttgggctgaaccgggggtgccaagggccgaggcgagggcaggggccgcgaggcgcctgggaaggagccaggaaggaggggcagaatcagccgctcccccacccccgccggcgcctgggatcgaggcccgcggagagtggctgacaggcggcagatggcacacgctgggggagggggacgattggcctcggctctggggtgcccccgccgcgggctgcctctgctagaggtagggggcggggaacggcccccagctcgcccgcccaggctttctggggggctggagattgcggatcctgcccagccgggagtctggagagtgagggggcggacaaaaggagcgcggtggggaatgcgtgtgcgggacgaaagaggggccgtcgggggagaggggtggttggagtcccacggggctgcccttttccacccctaggggcctgctgaagactgaggacggaggtgggggcaacaggatggggagcccgcaatagcccatcctgacctaatccgaaaggacgagatcctggagccgctcacaaagttttccgggccccctcccacgcgtcgcctgcacgtatgtccgtttcccgacgctccgccctcccccgccaagttcggcgtctcccagctcagcggcagtcagggtgcagagggagcccgaccttgtccccgcctcggcccgtcccgcttcttctgaagcttgtttcatttttaactccttccagaaaaatgttgttttaaggaaaatctcaaaggaacaaaaagccaatagtgccttccttatttgcaatccccacccacctctgagctcggactgcaagggcctcaagggacaccaggtgacacctgggccttgcttctcacgggtgaccttggaccagaaagggtcattttcaggtgtgttttataccccccacctgcctacttctggcagggaatagggggtccagtcccctcccctatgagaaggggcccctctgggctctccttcttcgccggaaagtgaacagctgctcctgccctgcttggaggagtggctgtggaaacccactgtaagctgtaaggagcaggagccaccatcataaatgcaagagaaattccaagttgaggtttttgagaacaagtaagactttgcccacaaaaaggtgcatcttccttcaaagt

SEQ ID NO: 1243563 - DNA, 4001 bp, Homo sapiens
ttaattcaaaatgccaaataatttaaaaatgtattaagattccccttagactagaaagcaaaaaggagctttcatttgtctgttaaaaatcaccttgggtagtagattgaagtttagctcttaagacttgatccccacaattgggcttttggcaaaagctatgggttccatatgtccacaaaatgtttcatttaaaatatatgtgcttttaaattggtctctgaccatttctatgccacagtctctaactgctccacgcattttcccaacccttggagccttgttcgcctcggaagctagactcttttatttgcattggaggtaacctatttccagcatgccaaaacctgttcactttcaaagccacttttggagattttatagcctgaaatggaataaaatttaaatttaataaaatttgagacctgaacaagaaaaaaaagaaaaactgaacgggtttaaaagccagctacccagacgcggaggaaaatattctaagaaaaccccacagggtggtggggcgggggcaggggcggggggcgatggggagccagaccatggatagcctgccaaatgtcatctggggctggctttagaagagaaccagagctggggaggcaatgcaattatttaaatccagaaagaaaaatgtttgctcccaaatttggcagcagatgattgcctctgattcttcccatttccaactgattccatgcaagcttaagtggaggaagcttcaggcccagaagaacgcacaggatgagggtcccacacctgggctcgaggcgtggtctgcaaagtgaaaagtcctgctctgtgaccagatgaacggagggtctcactctaaggccttcaggggtggcaaagcacatttttctttaaaccacaggttgtaacaagaagagatttctctcttcctttgtttctccctgtctctgcctttgtccctgcctggcagccccctcctctgcccctgctgctctctttttccctcccccggtgtgtgcgaaggccgagcctggctgtcactcaggcccttctgtgggcccagggaaggaggccacacggggctccccaggcctcagggtatttattaccacccccgacagcccagaccctctgcagcctccaaggctgtgctcaaaggcggtgaggtctgctgtgcacaaccatgaaagggcctctgggggatgcattcaatgcctccagttgggtcttcctctctctcccggagaaggttcaatcacttccacatccctatcctgctagaggaaagagctgggaaagccgaagatgagtaagaagaaacactccagcagtccctggttggctggtgaattccaacagcacgtgggcaggatctcctgatacaggagactgtgggagtatttgggctgaaatgacaacccgtttgcctaagtcacccccgcaggaattttttttttttttttctgaaatggagtctctctctgttgcccaggctggagtgcagtggcgtgatttcagcttgctgtgacctccgcctcccaggttcaagtgattctcacgcctcagcctcccaagtagctgggattacaggtgcccaccaccacgcctggctaatttttgtgtttttagtagagacagggagtcatcatgttggccaagttggtctcgaactcctgacctcaggcgatccacctgcctcaacctcccaaaatgttgggattacaggcatgagccaccacatccggccccctgcaggaatttttaaatccaagttagatggggtcaagatgatgttgctccttcatcctccccaggcaaggcccctagctgagtcagaagggatgagacccacattgtccaagagaactaagctctagttcgagctccttctgtctgcctacttcccttgccccacccctcagcccaaggcctcccctgctcacccctcttcttatgcatccatgtctttcttcttttacagggtaaaatccatccttctccaggaagttttcctgggggaataaatacaaaatttcttattgcaggctagtaagcatgtgcaatctcctggtgaaataacacttgtatacccatttgacagatgagcaaactgaggctcagactacttaacgacttgcccaggtagtcatctacgcagccaggatttaactgcttttccagatacacaagtgaattttcaaagcctctggatggctgatcccctgtcttgagcaaggtccttccctggggtatggcccagaggtcaggataggaggccctaaggcatcctcaccttctcttcagaccaccctggtgactaatgactctgggcaaagcagagaggcccgagtcggggacaaggcctgtgatcgaccttgaacttaagaagctccaagctctcaccagcgatgctaatgggccaggagtaacctgagccagcccttggatggaaactcaagccattatgcctggctggcctgctggtcggctggcatcactacctggacagaagcctcacttctccatttcacggggcttctgttcagagcaaccttttctcttgcaacaacaaaacagctcccatttatcaatcactgactaagtgccagacactctgctaagcactttacacacattatcttgtttaatcttcacagctgtgcagaaaaaaacgagtgttaatgctgcatcacaggcaaggaaactgaggctcagagaggataaggaagttgctcgagggtgcacagctagctggtaagctcaaagctggtgtctgaacaggcctgtgttcctaaccagagtcctatgctgcccttggaaggagattcttgcttgagattatggataatttgttttaatattttttcaaaatgctctgcaacattccgaaagggaaagaaaaaagttataacttgttgggggaaaaaaaaaggagaagaaggaggcagaggagacagtaagaggaaggttgggtaatctgcgaagttaccgtgatatgtggagggaaaatacacacacacacatacacacttgcacatgtacacacaccaacaggcttcatctgtcatgtatctgggattttgtgttaaaggggccgggcacagtgactgacacctgtaatcccatgggaagacagaggtaggaggatcacttgagctcaggagtccgagaccagcctgggcaatatagtgagacctctctacaaaaaaaaataaaaatttggtacacacctgtagtcccaagctgctcaggaggctgtgggaagatcgcttgagcccagaaagtggagattacagtgagccatataatgccacggcactccagcctcgatgacagagtgataacatctcaaaaaaaatttttttttaatccaaaagggtagtttttctcatctagggtttagattattagtgtcaaaactgggggggaatgtcccaaaataaattattccctatcatgcttctaagctacccaagagacttctaagcccacagccaggcattgcgtctccagccagacactgcacacgcttcctcagagtcctcccagcagtcccaaaggtagagattagagcccccctgtcacaggtagggaccctgagcctcacagagagtaaggtacaggcccatggttcctcaggtgacaagagacagagccaggttttgaacccaggtcagcctgcttccaaagcacttccaccctgcttgcaacttccaatcatgccaataccaagttgggggtgggggaggtgtgctgttgctaagtggtctcaggccaggagagagagctacagagatgctacacagagcctgagtggcaggagagtggcactcaaatcctcagctctggccagatttcaggaaggcaggagcactgggtggggagccaggagacctgggcaccaccagagctccaagataaacttgggcgagtcacttcccatctccaagcctttctaagcctcaaatgccattttcctgcagaacaggagcttttctgggtctcactccaga

SEQ ID NO: 1243564 - DNA, 4001 bp, Homo sapiens
cttggctggctctggctggtagtgggtggggagggagtgggggggctccggggacgggaaggggctgcccgtctcctgggggtgagtgggtgggtggaagaaggccgagggcccgagggggccggggagctggctttcctctgagctggggttggctgggctgctggacatcggcgacagggaagagcaggtgctgccggccgtgttggtggccggtgacggcagtggggactcgctgggggaggctcccactaccctcggtgggggcaggctgggtgtcccgtggggtgaaacctggggctgggccaccccgaagaacaggggctgagccccagggtctgtcattccgttgtaggtgaacagtgctggggagccgccctggctgcttctcacggctggcagcttctctctgggtcccggtgtcttgccagcagtgcccagggctccttggctgcccccctgccactcggggccccccgcggggaaaggcagccggctcagcatctccattccgtggggacttggccgggcggtcgggagcacttggggccaaggcaggggggcactctgggggaggcagagccgctggcctgggctgggctggccgttaaagaacatactcctggtggcagccagggggcccccaggaggtgtggggtaaggggctgctgtggggtcccacagctggggcagcctggcgggtgggggccctggggcggccagctcggtgtccggaggccccgggctggtgtccaccccactggctctgtacgcctgccctggaaagtgcctctggggtagggagctagggggccctctcgtgctccccagcccatcctgggctgaaggtggtctttcgggaaggattttggtcaggctcttgtgtaaactgtcagagaagggtctcggggccgagtgagcagctccaggggaagagagggcaccactgaggtcgctgtggcggttcaggccacctggctggccctggtagcagggcaggggtgagggcgcaggctgggtgggcagcgggtaggcagggcccgtgcccacggcctcctccggccacgctccctggggctgatggaaggcaaacaccagtggcccattggtgaatgcgtgcccagccacatccgcagggaagggttttgtgctggccccatgcagtgccgggaaggggaactggaaggaaactcccctggggctgccgccgggcctgctgcctttgggaataggttccggctcggcggggggaaccccgaaattagcacctgggaagctattctcagcagcgggaggccaggagtcggccccactggcctggtattcgggataggaaccgggctggagggggctggtgcccctgctctgggggggccccggggctgggggcctgggggtggcgcttggtgaggtatagttggtggaggtaaagctggagggtggctcctggaagcacctgtggaagccaagctcttcggcggcgggttgggcctcagtccttgggaggcccggcctgagtggagctccagtcccagggccctggggggtgtccacctcagggagctgggcagcctccagctgtgggttctctggtgtctcgtccagggtgggcttggtcctcgagctggcgatgcccagaatgtagcgctgtggggggctgccctctgccctgcccgccagccttgagggagcctgcaaggggcttctccccggtggggtctgggggctgcccctcttcccaggggtgctgctcggggcctggcctctcagggatgggggcttgagctccccgtccctggcctgccttggctgggcctcggggagctccatggcctgggcctggccgccagcctccctggcacccttggtggtcctggtagctggggtgttgtcctccagtggcggctgggaggggtgccccgggctgctggcaacttggcggggctgcaggtctccagtcatggtggggggcggcgctcctcgggggcgctccccaggcatggcccctccgtcctggcgctaggacgacgcagctgtccgaggggggccctggggagtgggctggacggccatcctcagccctcgatgggccccagggaagcctgcgctcatggtcctgagtggagcctggaaggaaaggtcaggggtgagtggggcagaggggctgggtggccctcgcctagacagggagcttctaggctctccatgcgggtgtggccgggccagaagcagaagaggctgcgtgcagccatcacagaagctccgcgcttagaagggatgctcggctcagcccctacctagaagcaggaagggagagggcatcccgccagatggaacagggacccttccctgtcttagggagaagaggggcggtggagcgcagagattgagtggagggggagggagggggagctttctggggtgtgaggaggccgcttacaggctcagagcagtcctcggccaggctgtggagaggacaggcacctgtgtggggcacaagctctcagcctgcaggaactgccccagggcagggtcctggcagcgtccaggagggcccaggtggatgcttacacctgccatggggagggccttgaggcaggaggctgcgttgcaggacataggggactgaggcagcagaggctcaacctgaacctctcagggcctgggcggctggttccaagcggggactcccctgccgtcagccagggtctccctgccaccaggccttacagggtaacctccagatcctgccgtcagccagggtctccctgccaccaggccttacagggtaacctccagatcctgccgtcagccagggtctccctgccaccaggccttacagggtaacctccagatcctgctccaggaagcccccagcctccagacggtgccggctcccattctggcacatgccagatgtagcaggagccgcttgcccagaggagcctggccccttgctcacccagggctggcttcacactcatcatgtctgttctcatgtcatgacatacgggactgtcctctgtgcggacaggactcagacccgagccattggctgtggccacgaggtgcgcaggccgctccgtgtgggggccccttctgacttgcccagcagggaccgggcgtcctttacacagcagagtgaggcagggctcagcccttgcaggcattgtccttgccactgacccctgggtcctcatggcaggcccagagaggcggatgacttggccagggtcacacagccagcagcagagcagctgggagctgaagggacaggcctcaggcctggagcactctcagagaccctgctgcctctgtggaggcgggggctgcctcctgaggtcacaggaccctcccaccggcctgagctggtggtgtctcatgcccctcccggagttcccgcactacagccgcctggggactcctaacgcagaggctggcaggccctctgtccccagcacgaggttggtacctgtacttccggctggctcttcctgctgtgcccagggactgcctgcaccggggaggagggtcctgcccaatttgggccaaggtctccagggtgggcgaggtcccagcctgcaaactccacatcacaccaccaaaaagagtcatgccagctggggggcccgggtgccccttcctcctctgcccccaccactgaggtacctcctgtcccatgaccccgggaggagggcccctttccctcttctgggatccactgccagggggcaaaggcctgggagtccttggggccaggattcacaggtgaggtttgttgagtgaataaatgatgctgggcgtctgagcactttcctgaactgcctcccttgtgctcacggtggctcagaggtgatctgtgattgtcgccctgaatttatgggtgaggaatccaggcacagagaggtggggaacccgctcaaggcctcagccagtgtaggcgaggtcctcctgggagggctggctcctagccctgcacatctcctgccctgcacatctcc

SEQ ID NO: 1243565 - DNA, 4001 bp, Homo sapiens
atgtgtatatttgttgtagagatgggatctagctatattgcccaggcttctcctggtctcttaatgtctgccccatcttagaatcttgtgtttctcaccatctatgtctctgagattttgtttttgtcttcctgtatgtccatctctccccatctctgtctttcatgtctttctctctgtctctgaccacccagtatctctgtgtctcactgtctctggtcatgaaatgtctgtcattgtggcccgtttcacactgtctctatatctgtttcccctgagatccgggatcagttgaaggaagaggagatccacatctaccagttccccgaatgtgactctgatgaagatgaagacttcaagaggcaggatgcagagatgaaggtgtgggaaacaaagaaggaaggcaggccgggcacggtggctcacgtctgtaatcccagcactttgggaggctgagacgggaggatcccctgaggtcaggagttccagaccagcctgggcaacatggcgagaccccacctctactaaaaatacacaaatttgccaggtgtgatggtgggcgcctgtaattccagctactcgggaggctgaggcaggagaatcacttgaacactccagcctgggcaatggagtgagaccctgtctcaaaaaaaaaaaaaaaaaaaaaaaaaagaggaaggggcaggaagcagaggaggcgggtgtggagattgaagctgggaaagagaaagtttctgccgtgtgagccaatggtgaacccctgccccctgccctccaggaaagcatcccttttgcagtcgtgggatcatgcgaggtggtgagggatggcgggaaccggccggtgaggggacgccgctactcctgggggaccgtggagggtgagtgaggccaggcaggggtcctaaggccagcagggagcccggggcctctgggtcaggcgcactcaacatgtgaagttggggtgggctttggtcccaggggatcctaggaggaaaggggggtcgctgggctgcagaccgcggaccctccgctagagtggcagcaggactttcctgtagacccgacccttacgggtgggttggacccgaaactccctgacgttcgctggtccgcgccgccccccctccagtggagaacccacatcactgcgatttcctgaacctgcgacggatgctggtgcagacacacctgcaggacctgaaagaggtgacgcacgatctgctctacgagggctaccgggcccgctgcctacagagcctggcccggcctggggctcgcgatcgagccagccgcaggtgagacccggggcggacagtatcagagcctccaaggtcccgcctcacccatgaccccgccctgaggactcgtccccaccacccgtgactccgccttcaccactcagacttctctctccctccctccctccctccctccctctctccgtctctccctctctccccctctctccccacccgctttgcctccggccctaacctcaaggaactggctccgcctcctagaccccaacctcgccccaggccctgcctcctgggcctcacccacaacctcaggtcccgctcctgattcctgtccccttcccactgtcccgcagtaagctttcccgccagagcgccacagagatcccgctgcccatgctgcctctggcggacaccgagaagctgatccgcgagaaagacgaagaggtgagcacgcacctcgcttccccccgaccgatgccccaggtccccctctggcttcgccaggtcaccgcctgcaatctcgccctgcacagctgcgccgcatgcaagagatgctggagaagatgcaggcccaaatgcagcagagccaggcccagggcgagcagtcagacgccctctgaggccacgccccgcccggccttacctcggctccgccttcagtcggcctcttgtccaatccccgcgccccacactgcccagcgccccccgggacctccgcgggtgccgccctcgcgcgggctagggggaggttctcccagcctgagtccgtagccccgccccggcgctggtcccgcccacccagacaccgcccacttcccggcccggggcctgcacaatctccgaccgcatcactgtcttccggagtcccccttcttctcccagactctgtcttcaataaaaactgagcttcccgcggccacgcgagccttctccttccttgcggaaaaaggcggcgggcgtagattgtggggccgacccccgcaggcctccaggccgcatccattcatttgtggggcgctcccacctgaggccctcgcgcagacactctgaaggcgccgcccataagaaacaaagatcagttaaattttattgggagccggggtggaggtcgggccgaacagaagcgtcgggcagcggaggcccgcgggtgcccctactcctggtccttggcgtcgccgtgcgtgatgacgtagcagatgtttttgtagtcgacgttgccgcccacgtcgggggggaaggccgcccacatgttcttgatctggggaaagacgtaggggcgtctcgcacaggcccttagtctccccggccccagcccctttgctgctccggccccgccccggtccccactcacctcctcctgggagaagcggtcacactgcgtggtcagcagctcctccaggctggagagaggtgacacaaggggagttgcgattgggttcctggttcctttccactccctcgcacctcatccccgatgccagccccagcctcccctgaaaacccaggtcactctacttccttcattggcctcccagacactcgcttttgccctctccgcccacatttgctgtgaaaatgcaatcttaccgcccattaccacaatcttaactactcccttacctctggcagtgcctaacccttcgtaggaatttttgggtttttgtttgttttgagacagggtctcaccctgtcgcccaggctggaatgcagtggtttgatcacggctcactgcaacctggaactcttgggctcaagggatcttcctgcctcagcctccggagtagctgggactataggtgtttgccaccactcccgcgaatttttttttttcttttttttggagacggagttttgctattgtcgcccaggttggagggcagtggcgtgatcttggctcactgcaacctccgactccagggttcaagcgattctcatgtcccagtctccctagtagctgggactacaggcgcccgccaccacgcccagctaatttttgtatttttagtagagacggggtttcaccgtgttggccaggctgttcttggactcctgacctcacatgatccgcccgccttggcctcccaaagtgctgggattacaggcatgagccactgtgcccggccagcccacgaattttttagttaagtttttagaaacagggtcatgctgtgttatccaggctgatctcaaactcctgtcctcaagtaaatcctcctgcctctgcctcccaaagcactgggattataggcctgagccacagggcccagccttggtagaaatttaaggaggctgtcagtgtgggagcagctggtggagtgggggaagggtcggaagggtgggggagccgatgcttacaacttcttcttgatggtgccctttccctcagggtccaagaccttgaaggctccggtgatcacatcctcagggtcggcacctgtgggggtcagagggcacatgaagctgatgggtccctgaagggtctgggaaaaggcagccggggccttggacccaggacactccactcacccttgagcttctccccgaacatggtcaggaagacggtgaagttgatgggaccgctggcttccttcatcatggcatccaactcctcattcttcacattgaggcggcctggagggggttgggggaagcatgggctggagcaggctcctggggccgggcctgcgcttcccactaattcagctgatcccattcatttttcagctgggtagactgaggccc

SEQ ID NO: 1243566 - DNA, 4001 bp, Homo sapiens
atatgtgtatatttgttgtagagatgggatctagctatattgcccaggcttctcctggtctcttaatgtctgccccatcttagaatcttgtgtttctcaccatctatgtctctgagattttgtttttgtcttcctgtatgtccatctctccccatctctgtctttcatgtctttctctctgtctctgaccacccagtatctctgtgtctcactgtctctggtcatgaaatgtctgtcattgtggcccgtttcacactgtctctatatctgtttcccctgagatccgggatcagttgaaggaagaggagatccacatctaccagttccccgaatgtgactctgatgaagatgaagacttcaagaggcaggatgcagagatgaaggtgtgggaaacaaagaaggaaggcaggccgggcacggtggctcacgtctgtaatcccagcactttgggaggctgagacgggaggatcccctgaggtcaggagttccagaccagcctgggcaacatggcgagaccccacctctactaaaaatacacaaatttgccaggtgtgatggtgggcgcctgtaattccagctactcgggaggctgaggcaggagaatcacttgaacactccagcctgggcaatggagtgagaccctgtctcaaaaaaaaaaaaaaaaaaaaaaaaaagaggaaggggcaggaagcagaggaggcgggtgtggagattgaagctgggaaagagaaagtttctgccgtgtgagccaatggtgaacccctgccccctgccctccaggaaagcatcccttttgcagtcgtgggatcatgcgaggtggtgagggatggcgggaaccggccggtgaggggacgccgctactcctgggggaccgtggagggtgagtgaggccaggcaggggtcctaaggccagcagggagcccggggcctctgggtcaggcgcactcaacatgtgaagttggggtgggctttggtcccaggggatcctaggaggaaaggggggtcgctgggctgcagaccgcggaccctccgctagagtggcagcaggactttcctgtagacccgacccttacgggtgggttggacccgaaactccctgacgttcgctggtccgcgccgccccccctccagtggagaacccacatcactgcgatttcctgaacctgcgacggatgctggtgcagacacacctgcaggacctgaaagaggtgacgcacgatctgctctacgagggctaccgggcccgctgcctacagagcctggcccggcctggggctcgcgatcgagccagccgcaggtgagacccggggcggacagtatcagagcctccaaggtcccgcctcacccatgaccccgccctgaggactcgtccccaccacccgtgactccgccttcaccactcagacttctctctccctccctccctccctccctccctctctccgtctctccctctctccccctctctccccacccgctttgcctccggccctaacctcaaggaactggctccgcctcctagaccccaacctcgccccaggccctgcctcctgggcctcacccacaacctcaggtcccgctcctgattcctgtccccttcccactgtcccgcagtaagctttcccgccagagcgccacagagatcccgctgcccatgctgcctctggcggacaccgagaagctgatccgcgagaaagacgaagaggtgagcacgcacctcgcttccccccgaccgatgccccaggtccccctctggcttcgccaggtcaccgcctgcaatctcgccctgcacagctgcgccgcatgcaagagatgctggagaagatgcaggcccaaatgcagcagagccaggcccagggcgagcagtcagacgccctctgaggccacgccccgcccggccttacctcggctccgccttcagtcggcctcttgtccaatccccgcgccccacactgcccagcgccccccgggacctccgcgggtgccgccctcgcgcgggctagggggaggttctcccagcctgagtccgtagccccgccccggcgctggtcccgcccacccagacaccgcccacttcccggcccggggcctgcacaatctccgaccgcatcactgtcttccggagtcccccttcttctcccagactctgtcttcaataaaaactgagcttcccgcggccacgcgagccttctccttccttgcggaaaaaggcggcgggcgtagattgtggggccgacccccgcaggcctccaggccgcatccattcatttgtggggcgctcccacctgaggccctcgcgcagacactctgaaggcgccgcccataagaaacaaagatcagttaaattttattgggagccggggtggaggtcgggccgaacagaagcgtcgggcagcggaggcccgcgggtgcccctactcctggtccttggcgtcgccgtgcgtgatgacgtagcagatgtttttgtagtcgacgttgccgcccacgtcgggggggaaggccgcccacatgttcttgatctggggaaagacgtaggggcgtctcgcacaggcccttagtctccccggccccagcccctttgctgctccggccccgccccggtccccactcacctcctcctgggagaagcggtcacactgcgtggtcagcagctcctccaggctggagagaggtgacacaaggggagttgcgattgggttcctggttcctttccactccctcgcacctcatccccgatgccagccccagcctcccctgaaaacccaggtcactctacttccttcattggcctcccagacactcgcttttgccctctccgcccacatttgctgtgaaaatgcaatcttaccgcccattaccacaatcttaactactcccttacctctggcagtgcctaacccttcgtaggaatttttgggtttttgtttgttttgagacagggtctcaccctgtcgcccaggctggaatgcagtggtttgatcacggctcactgcaacctggaactcttgggctcaagggatcttcctgcctcagcctccggagtagctgggactataggtgtttgccaccactcccgcgaatttttttttttcttttttttggagacggagttttgctattgtcgcccaggttggagggcagtggcgtgatcttggctcactgcaacctccgactccagggttcaagcgattctcatgtcccagtctccctagtagctgggactacaggcgcccgccaccacgcccagctaatttttgtatttttagtagagacggggtttcaccgtgttggccaggctgttcttggactcctgacctcacatgatccgcccgccttggcctcccaaagtgctgggattacaggcatgagccactgtgcccggccagcccacgaattttttagttaagtttttagaaacagggtcatgctgtgttatccaggctgatctcaaactcctgtcctcaagtaaatcctcctgcctctgcctcccaaagcactgggattataggcctgagccacagggcccagccttggtagaaatttaaggaggctgtcagtgtgggagcagctggtggagtgggggaagggtcggaagggtgggggagccgatgcttacaacttcttcttgatggtgccctttccctcagggtccaagaccttgaaggctccggtgatcacatcctcagggtcggcacctgtgggggtcagagggcacatgaagctgatgggtccctgaagggtctgggaaaaggcagccggggccttggacccaggacactccactcacccttgagcttctccccgaacatggtcaggaagacggtgaagttgatgggaccgctggcttccttcatcatggcatccaactcctcattcttcacattgaggcggcctggagggggttgggggaagcatgggctggagcaggctcctggggccgggcctgcgcttcccactaattcagctgatcccattcatttttcagctgggtagactgaggc

SEQ ID NO: 1243567 - DNA, 4001 bp, Homo sapiens
tattaaacgcttgcaaacaatactataacactatgactatccccatattacaggcatggaaagactcagagaatttaagtccttttgctggaggttataaaggttagaaagtagcaaagccaggccagcagggtggctcacacctgtaatcctagcactttgggaggccgaggtgggtggatcacttaagcccaggagttagaaaccagcctgggcaacatggtgagaccctaactctacaaaaaaaaatacaaaaattagctgggcatggtggtgcacacctgtagtcccagctactgggaggctgaggtaggaggatcacttgagcccaggaggtggaggctgcagtgagctgtgattgtgccactctagcctgggtgacacagtgagaccctgtcgccaaaaaaaaaaaaaaaaaaaaaaagtagcaaagcgtgatgtctaactaaggtctctctgacactcaagcccgtgttaatccctacattatattgtctatttggaaaacttggtatttgctattattattgtatcttattatattagcccattcggtaatttattacatcagttatcctgtgtgtacctgagaggacccaggcacacatcccttcctcaagaagcttagggtggtaggagagataagattaaagtatcaatggttataattgtgggtgcagaataactagaataactatgttgtcacaagagagataggagataaggaaataggaaccggcattacggcagagcgaagagaaaataatggagtggaatggaagataaggtgtcaaaggatgttgggactaacctgagcacgcacggtttggattggacactagctaaggcttttaattaggagactgggggacgctagggaaggttttccagaagagacacaggattatatctggacttagatcaagctggcgagagaatgcatcagtggagagaaaggggcagagaggaggctactgcaattgccaggataaaacagaatgaagcctgaagtagggcagaggcagtaaggatgaggaaggccgtgagggaggggacagaggccgtgaagagcccctcccggcctggcgcacagttggtgctccgaaagctcccctccccctatctccccagaggcacagctcacgtccgatcttccaggatctcggccggccacagccaagcatcgcagtccccaccggccgttacctgtccgtggcggcgcacggccgaggccctcacctgtgcgggcgcctctctgtggctccctctcctccgggcggtggagatctgggccccaaggctctaccgcgcgctccatcgccggcacgccgccctgagcaaggggacagacagcatcccgcggtcacgcagccatgtgtggcccgcggcgccctgccgctgccctctgccggccagcgcgggcaccgggcggcgtcgggtcccaggtacgggcgcggctcccggtgccccctgcccgcgccgccggccgcccctgcacctgctgctcctcccagcgcgcagccgccgctctcaccttgccggccgcctccggctccgccaccccggcgccctccggagctcctcagcggggtgcaggcgcccgagccgccagcggctccgggatgcaggctccgcgccaagccgggagcgggctcggacccaggcgtcccgggggcggccaccgggggcggggacgggaagcggaagcgcggggccgcacggagccgctctaggaccttggaggagctgcgggcctgtgggggtcgcccgcgtcggcggtagctctgtggccggcgggcggcagcgtgcggcccaggggctactctaagccgaggccggcggcccgaactcggtggtattaaccgtgtgcctcctgggctgcagctgggtggtgaggcccgaggctcttcgtaattgtggctgtgtgtctccagccacccgcgccgacctccccggccggccgacagcgccagccactccgacctgggagagacaaagaaagagggatccaaagacggacccggggaaaggggtgggggagagaccaaggcagacaaagggcggcggagaccccagacggggcggggcggggcgccgagacgtgggaaacaaagcggggctggtccgagaggccgagggcccggggtgggggtgggtatggaatgggggctgggctggggagaccgaggcaggagcagaggctagaggcagacaccgggtaaatgctgctggagagatggaatcagacctggggcccggaacagagaccctgagccagagactcacatcagagccctgagtcacagaggacgcaaaggcagagagagaccgagggacagcggctgaccaaaaataaggggagccaaagattagccgctagagacagagacgtagaaacggataagagataaagtcattgacgcagagtccgaggagcagtaagaggctgggagcctggagagtaacaggcccagaagcagaggaacaaaagacgatagtgagcgaaacgggcagagacaaagagaaagagacacaaagaaagaggcggccagaaagactccggacaggtcggcagccctatagaggccaggctcagggagaggctgaagaacaagccctgtttcccatcctggtgggcccctggctggagctgtgtttccaggttcccaggccctaggagcaagatcccagtatccgctctctgggcgggcttggttttggggtggagagagtgtctggaggtgtcttcagcccctctgccaatgatggtgggggtaactgtggtttatgcattaattcacatttattagcatcttagtgctaagccaagagttggggataaaaagttgaaacacctgcaagatttgtccttggagagctaccagtctaaaggagcaagtacacaaatcactgaaattagagaatttagctgggcctggtggcctgcccctgtaatcccagctgagaggattccctgaacctgggcattcaaggatgcagtgagccatgatcgtggatcgtgccactgtactccatgctgggcaacagagcgagaccctgtctctttaaaaaaaaaaaaaaagagagagagaatgggctgggcccagtggctcatgcctgtaatcccagcactttgggaggccaaggtgggaggatcacttgaggccactagttcgaaaccagcctaggcaaaaaagtggaccttgtctctacaaaaaaaaaacaaaaatttagcagcgcatggtagcacatatctgtggtcctggctacactggagactgaggcaggaggatcacctgagcccaggaggttgaggctgcagtaaaccatatttgtgacactgcccttcagcctgggtaatagagcgagaccccatctaaaaaaaaaagagaaagaaagagagactgttaaggtagttatatggacccggccaggtgcagtggctcacacctgtaatcccaacactttgggaggccgaggcaggtgaattacatgaggtcaggagtttgagaccaatctggccaacatggtgaaaccctgtctctactaaaaatacaaaacttagcagggcgtggtggcacgggcctgtaatcccagctactcaggaggctgaggcaggagtatcacttgaacctgagaggcggaggttggaaagagccgagatcacgccactgcattccagcctgggtgacagagtcagactgcgtctcaaaaaaataaataaataaaatttaaaaggccgggtgtggtgcctcacacctgtaatcccagccctttgggagccagaggcaggagctcacttgaggtcaggagttccagaccagcctggccaacatggtgaaaccccatctctactaaaaataaaaaaattagcagggcgtggtggcaggcgcctgtaatcccagctacttgggaggctgaggcaggagaatcacttgaaccccagaggcggaggttgcagtgagctgagatcgcgccattgcactccagcctgggggaca

SEQ ID NO: 1243568 - DNA, 4001 bp, Homo sapiens
ccaaatcttcttccttgaaccccaagtcatcttcctgtggggtatgttcaaactcattcggctgagaaatcacgttctcactccctagacctgaggaaagaaaaggaagttgtagaccctcccctttggctcggtacttatctttgacagcaacctctccaggaagactcccttgacaatctgtggtcacaggaaccccaatctctctgtcctctcaacctctggtgcacttactatctgtgcctctcaataaaaacttctttttactgtgcccttaatgtatgtcattcaccaaactcagcattagtattaaacgcttgcaaacaatactataacactatgactatccccatattacaggcatggaaagactcagagaatttaagtccttttgctggaggttataaaggttagaaagtagcaaagccaggccagcagggtggctcacacctgtaatcctagcactttgggaggccgaggtgggtggatcacttaagcccaggagttagaaaccagcctgggcaacatggtgagaccctaactctacaaaaaaaaatacaaaaattagctgggcatggtggtgcacacctgtagtcccagctactgggaggctgaggtaggaggatcacttgagcccaggaggtggaggctgcagtgagctgtgattgtgccactctagcctgggtgacacagtgagaccctgtcgccaaaaaaaaaaaaaaaaaaaaaaagtagcaaagcgtgatgtctaactaaggtctctctgacactcaagcccgtgttaatccctacattatattgtctatttggaaaacttggtatttgctattattattgtatcttattatattagcccattcggtaatttattacatcagttatcctgtgtgtacctgagaggacccaggcacacatcccttcctcaagaagcttagggtggtaggagagataagattaaagtatcaatggttataattgtgggtgcagaataactagaataactatgttgtcacaagagagataggagataaggaaataggaaccggcattacggcagagcgaagagaaaataatggagtggaatggaagataaggtgtcaaaggatgttgggactaacctgagcacgcacggtttggattggacactagctaaggcttttaattaggagactgggggacgctagggaaggttttccagaagagacacaggattatatctggacttagatcaagctggcgagagaatgcatcagtggagagaaaggggcagagaggaggctactgcaattgccaggataaaacagaatgaagcctgaagtagggcagaggcagtaaggatgaggaaggccgtgagggaggggacagaggccgtgaagagcccctcccggcctggcgcacagttggtgctccgaaagctcccctccccctatctccccagaggcacagctcacgtccgatcttccaggatctcggccggccacagccaagcatcgcagtccccaccggccgttacctgtccgtggcggcgcacggccgaggccctcacctgtgcgggcgcctctctgtggctccctctcctccgggcggtggagatctgggccccaaggctctaccgcgcgctccatcgccggcacgccgccctgagcaaggggacagacagcatcccgcggtcacgcagccatgtgtggcccgcggcgccctgccgctgccctctgccggccagcgcgggcaccgggcggcgtcgggtcccaggtacgggcgcggctcccggtgccccctgcccgcgccgccggccgcccctgcacctgctgctcctcccagcgcgcagccgccgctctcaccttgccggccgcctccggctccgccaccccggcgccctccggagctcctcagcggggtgcaggcgcccgagccgccagcggctccgggatgcaggctccgcgccaagccgggagcgggctcggacccaggcgtcccgggggcggccaccgggggcggggacgggaagcggaagcgcggggccgcacggagccgctctaggaccttggaggagctgcgggcctgtgggggtcgcccgcgtcggcggtagctctgtggccggcgggcggcagcgtgcggcccaggggctactctaagccgaggccggcggcccgaactcggtggtattaaccgtgtgcctcctgggctgcagctgggtggtgaggcccgaggctcttcgtaattgtggctgtgtgtctccagccacccgcgccgacctccccggccggccgacagcgccagccactccgacctgggagagacaaagaaagagggatccaaagacggacccggggaaaggggtgggggagagaccaaggcagacaaagggcggcggagaccccagacggggcggggcggggcgccgagacgtgggaaacaaagcggggctggtccgagaggccgagggcccggggtgggggtgggtatggaatgggggctgggctggggagaccgaggcaggagcagaggctagaggcagacaccgggtaaatgctgctggagagatggaatcagacctggggcccggaacagagaccctgagccagagactcacatcagagccctgagtcacagaggacgcaaaggcagagagagaccgagggacagcggctgaccaaaaataaggggagccaaagattagccgctagagacagagacgtagaaacggataagagataaagtcattgacgcagagtccgaggagcagtaagaggctgggagcctggagagtaacaggcccagaagcagaggaacaaaagacgatagtgagcgaaacgggcagagacaaagagaaagagacacaaagaaagaggcggccagaaagactccggacaggtcggcagccctatagaggccaggctcagggagaggctgaagaacaagccctgtttcccatcctggtgggcccctggctggagctgtgtttccaggttcccaggccctaggagcaagatcccagtatccgctctctgggcgggcttggttttggggtggagagagtgtctggaggtgtcttcagcccctctgccaatgatggtgggggtaactgtggtttatgcattaattcacatttattagcatcttagtgctaagccaagagttggggataaaaagttgaaacacctgcaagatttgtccttggagagctaccagtctaaaggagcaagtacacaaatcactgaaattagagaatttagctgggcctggtggcctgcccctgtaatcccagctgagaggattccctgaacctgggcattcaaggatgcagtgagccatgatcgtggatcgtgccactgtactccatgctgggcaacagagcgagaccctgtctctttaaaaaaaaaaaaaaagagagagagaatgggctgggcccagtggctcatgcctgtaatcccagcactttgggaggccaaggtgggaggatcacttgaggccactagttcgaaaccagcctaggcaaaaaagtggaccttgtctctacaaaaaaaaaacaaaaatttagcagcgcatggtagcacatatctgtggtcctggctacactggagactgaggcaggaggatcacctgagcccaggaggttgaggctgcagtaaaccatatttgtgacactgcccttcagcctgggtaatagagcgagaccccatctaaaaaaaaaagagaaagaaagagagactgttaaggtagttatatggacccggccaggtgcagtggctcacacctgtaatcccaacactttgggaggccgaggcaggtgaattacatgaggtcaggagtttgagaccaatctggccaacatggtgaaaccctgtctctactaaaaatacaaaacttagcagggcgtggtggcacgggcctgtaatcccagctactcaggaggctgaggcaggagtatcacttgaacctgagaggcggaggttggaaagagccgagatcacgccactgcattccagcctgggtgacag

SEQ ID NO: 1243569 - DNA, 4001 bp, Homo sapiens
tggtgcatgcctgtagtcccagctactcaataggctgaggtgggaggattgcttgaagcctggaggtagaggctgcaatgagcggtgatcacaccaccatagcctgggcaacagagcgagactatgtctcaaaaaaaaaaacatgtttggcctaccctaggacagtgttcacaaaccatctgcactagctaataaagggctattggggtaggatgaggttaatcaaagggtggacacccattagccaaggctgagaaatcttttgcagttgctttcctcaaaagggctcaggggccaggcagccacacttggtcacccaatgaccaaggaatctgcagctgcagaccccagcagcagggccccatttcctcacctgagggtcaaaatgcccccactcacccgctgcctgtgtttcctgggcttccgctgcagcccttccacaaggaccacggcctcctcaccgctctccggctgctgctcgcgtacccgagcctggatctcccccggcagcacagtcaggaactgctccagcaccagcagctccaggatctgctccttggtgcgcagctccggccgcagccagcggcagcacagctcccagaggcggctcagggcctcccggggcccagccacctcctggtagcagaagagccggaagagctggcggaaagtctcagggctggggtcctccgtctccacggagggctcctcttccaagcagaagtcctcctccaccttcacaatcaggatctcttcctgttccaggtcctgctccaaggttggcaggggctggaggccagggacagtggccattgcttccggtgggccttgttccttttcaggccttagagttgaacctgtctctctctatacctctggccagacacaggaagagagtttttttcagggccctgtggagagacgataaaaccatctgaagggcagccctggggctggataagccctttggcctgggaagcccctgccctggttccaaggccagctcaccccaccatggaaaaggaaaaggaagtggatgaatgtcatctttgttattaaccccctgttaattcccgggtaatttactgaagggctctgggctttgcttcctcactgggcaaacagagatgataacaggacctacacacacaggttgctgacagaactaaaagggatggctgggggcagtagctgacgcctgtaatccccgcactttgggaggcagaggagggcagatcacgtgagttcaggagttgaccacctggtcaacgtggtggaaccctgtctctacaaaaaatacaaaaattagcccgacatggtggtagcacatctgtaatcccagcaactcgggaggctgagacaggagaatcgcttgaacccgggagatggaggttgcagtgaactgagatagcgccactgcactccagcctgggcgacagagagagactcaaacaaaaacaatctaaaagggatgtttgcggtcagagctcgagaatcgttattttccatgattagagtgggtcctatatggaaggggttcctttggaaatctgatgaaaagtagggcctttctgcagactctgcctcaacttgatccccggtgtccaggtctggcgaaccctgaagcccctacgcggccccgtcaggcacccccgcgtgggtggtcacgacagccccccaattccagggtcctgggagagctgggacccccaggccgggctgctttcccgtctcatccctcaggtggagggtgagcggtacccgaggccgcggcacagacccgggtgctggcgcgggccgcgaaatcgaagcttcggccgggacccgcgtccccgcgccccccgcactcactggaagcgctgccggccgtgggcagttcggggcaggaccggagcggcgggtctcggcgggagtaggactgcgggcctcaggcttggcagccagggacgccagagccggggccgaagaccctaaaccaggggtgcaaaccaggccgtgcgggtgggcccgcaggcggcattgtgggtaacgtagccgtggcaccattggctaagccggccgttgggggcgtggcaacacggccgagtgggcgggtccgcgacgtgcactgtggttaatgtggtcctcaaaggcacgcattgtgggtaacgtagtccagcacctcggtgaccgcgcgagcgtgcggcgactctgcagcctctgggctactttcccagtcactgttccacacccgctccgctctcctctggccgcctcctccatctttaaagccagcaaagtcgtccgggcacggtggctcacacctgtaatcctagcactttgggaggccgacgcgggcggatcacctgaggtcgggagttcgagaccagcctgactaacgtggagaaacctgggcgtggtggttcatgcctgtaatcctagctactcaggaggctaaggcgcaggttgcagtgagccgacatcctgccattgtcctccagcctgggcaacaagagcgaaactccatctcaaaaaataaataaataaataataaataaataaaataaataaaggcagaagttgttcaagataaaactggaagagatgccaagtgcttgcgcccaccctcccccaagagggcccccaacaacgtccaaccccaaatatcccttgtcctgcctgcttctttctgacaacataataatgggcatcaatctttgttgttgttgttagagatgaagtcccaccatggtgcctaggctggtctcaaactcctgggcccaagcaatcttcccgcctcagcttcccaaagtgtcaggattacaggtgtgcccagccaggtatcaattcttgtatgtatgtatttatttatttagagacagggtctcactctgtcgcccaggctagagtgcagtggctcgaccttggctcacagcaacctccgccgcccggttttaagcaattctcctacctaacctcccgaatagttgggattacaggcacgaaccaccaggtccggctaatttttgtatttttagtagagatggggtttccccatgttgcccaggctggtctccaacggcctcaagcaatccacccacgtcagcctcccaaagtgctgagattacaggagtaagccaccgctcccggtcgcatcaattcttgagcatcaagcaagcaaaacacatttgtacttcgtttcttcctcatttagtaatagaggtactataactagacctaccggttcaacaaaacaaaacaaaaccctgaagctctgagagttttaagtattgaaccccccagagaaggtcaaacaggaagtacagaaatgggattggaacccaaatctttgattccagaacttcagctcctaactaccaggttaacgtagtttgcccctaatcctaacttgggcatcctaaggcccgtctcctatgctggattctcgctgcttttcctctttggttgaacatgatccggagtttccctctgcctggggtgcccaggaaagagtcccagcaccgagttcgggtgagcagcaacgcagcatacacagcaggcgtacactcaacgtacgccccgccccgcacaagctccgccccgcatgcgcgccccgcctcgcatcccggatctacccccggaatctcgcgcgtctttcccaaagcatcggctaggactcagcccgccggaaacaaatttggggacgccggattcaggaagctggcaggactacatttcccagagcgccccgcgccctccccggaggcagattcctgggcgctctagagggggtgggttggcggcctggagggtctcctcaagtggcggcactgccaggggctcggaggaaggggctgcagtctcccggtggcagcgtccttgtcgtcgagactgcgggcggttcccttgcgcgccctgaacctcagtttccatatctgttaatgggggacattaaccctcaaggttgtaactcattcaagaccattcatccaggcataataaatgcataaacgctgcacgtt

SEQ ID NO: 1243570 - DNA, 4001 bp, Homo sapiens
agcctgaccaacatggtgaaattctgtctgcactaaatacaaaaaattagccaggtgtggtggcgcatgcctataatcccagctacttgggaggctgaggcaggagaatcatttgaacctaggagaaagaggttgcagtaagccgagattgcaccattgcactccagcctgggcaacaagagtaaaactccgtctcaagcagagcttgcagtgagctgagatcgtgccactgcactccagcctgggcaacagagcgacactccatctcaaaaacaaaaacaaaaacaaaacaacaacaaaaaaaactctgtctcaaaaaataaattaaaataaaatgaaattagccagatgtggtggcatgcgcctgtagtcccagctacttgggaggctgggccaggagaatcgtttgaatccaggaggcagagattgcagtgagccgagatcgcgccattgcactccagcctaggcgtcgcagcgagactgtctcaaaaaaaaaaaaaaaaagaaaagaaaaggagaaagttgggcagcccaggaagaatcataaagagataaaggttacaggattctcccaacatccttccctttgctatttcctctcgtccccatgacactcattgctaagctcactccagcacttcatccaggcctaccccaccttctctaacggtgtgataaattaatcacttgggatttattattactcaacgagtgtggagtctagaaatgtgcttaatttaaaaattcattcaaattggagaagtaccaaatctgtaattttgggaaccattccagaaagtcacttttaatcctagcactttggggagccgaggtgggaggatagctgaaggccaggagttccttggcaaagcagcaagactccatctccataaagaagttttaggccgggcgcagtggctcacacctgtaattccagcactttgggagaccgaggcgggcggatcacaaggtcaggagattgagaccatcctggctaacacggtgaaaccccgtctctactaaaaatacaaaaaattagcagggcgtggcggcaggcgcctgtagtcccatctactcgggaggctgaggcaggagaatggcatgaacccgggaggcggagcttgcagtgagccgagatcgcgccactgcactccagcctgggcgacagagcgagactctgtatcaaaaaaaaaaaaaaaagaacttttaaaagtagccagacactgtggtatgcgcgcctctcagatactcgagaggctgaggcgtaaggattccctgagttccagacggagctatgatatcagcactgcactccagccagacaagcaacactccagcgacaaggccagaccctatctccaaacaaaacaaaacaaacagataagacattgagaaactctctcagagattcctccacaggtccctgctcccagttggtagttctgaaagaaggaagttggtaaaccattatgtgtgtggtcttggaacgaagaacacttggtcaaagggctatttggggctcaggagcactcctaccacaacaggcatgcccaactctcctccaaaggagggggtcaggcagagaccgaaagcagcaataaacttggacgaaaaaggtacctcgactcacctgggcctcgggcgtcgggggcatggacgccatttggcgggtggggaatgccttcttcaagacgccacagggacttcgtgacaaagctgcggggggagagaacagttcttaaagggaccaattccgctgccaagttcctccactacccctagcctccctcgattccctccgaacccccccttaaaaacctacgccgactgctcctcctcttggcccggcctcgaaaggggcccacttaccgctccgcggttaataacaggcctcgcgctccctgacaggagctgcagaaagcgacgcccgaccgagacgcgacgaagaacgccacggccactgcaaaactcccacgctctcatgctcctttacgcaggagctgcgggaaaagccgccggaagcgacccgccctcagccctctccgccatcctgccctttgattggtcgaagttctcccgaaggggaagtccttcttttgtgttgaccaattgaacaccttaaccgaggacctgtagccactgggcagctgcgagaggtagttttcctccttttctctaagcaaccatttccgcttccgctggcggggtctcctccgtgagctccgggcctgtttgcctgctgaagtagagtcttagggtgaccccagggggacgtaatgtttccgagaagaaggacagaaagaagactgggagacaccggaactcgaaagaaaatcggtaacaaaatgtgggttcggccaacagtgccctgtaggcctgaaatttcggtctggccagagcaaggtgattgagagggcgggggttcgggcctagcctgggcttgagctgtcctttgtgtcttgagcggatggtggggccgtggaacatgaaggagtatctttgtgtacgttcacaacgttcacatcggtgtaggccaggttgctggactctgactcaaagtgttatagaggcattacgtattgtacccgcagctgcagcctaagcgagctgcttcagcttcctagtcacaggatcccacgcgagaatagagccataggttagcgtcgcaggacgttgttcgcccccggatacctcacatgcagcctaccctagagccagtcatttcctattgtgtgctgggggaggagggagtgccctggtgtaggcatttggaattggaaaattgagctcctccccaagctctgccactgattggttggtaatcttggccagtttacaactttgctttcctcagctgcaaacagctcagagtgcctctctgggctaactcagagggtaatttcaaagattataagataatgtaagtgaaagaaattgccagtttataaaggtgtttggggaaaaaaaaagacgaaaatgataggtaccttgatagaaaagcctgaaaagtctcaacatatttccttattccagtgccaggcacattcctgtatctaaaagcttaatgaatggctgcatggttattaaaacaatattaggagatttgacaacttaggtaatgtgattttgtggaatatctgataggatagtttcagctacaagtaacagaaaacccaccgaaaggatgttcaaagagcagttacaggttggttaattcggtggcccagtgacaacatcaaggtcccagtgcttctctgccaccctaagcatgttggtaacgttgacaatagaatccaggtaaaatatacagacatgtattgtgtcatgtacccatcctaaactagttattaccaagaataaataattgtttggggcccatcatgcttcagcccctgtcactaggggaaggacctagcctcccttgataatctacctgcacaaaattagggctttgttacaaatgaaaaaaagagatgtggaaaataagttagataagaaactagcagtatctgccacaaatgatatctcttgacagctaactaagagctagaccttgtggggatggatcacaaaagaggtagctgtgaagtcccagtaaaggtgcttccaggacaggtggaagaatggtaagaacaaacttgcctacaggctagaccagtccaaagcatatatgttgaagaagagctaatagcctgtatatgaaggtgtaagtaaaggagatgttcatggttgagtcactgtggtgttcacgtagtcatctttcccttcttggtttgtgcttatctcttttttttttttttttttgagacagtctcactctgtagccagactggggtgcagtggcacaatcctgactcactgcaacctctgcctccggggttcaaatgattctcctgcctaagcctcctgagtagctgggactacaggtgcccgccaccacgtccggctaattttttttttttgtatttttagtagagatggggtttcatcatgttggccag

SEQ ID NO: 1243571 - DNA, 4001 bp, Homo sapiens
gccagggttcaggagttgagggttgcagtgggaattcctgagcacgcatgggacacagaatatattcaggggatggtgctgaactcagtaaggaaaaaggagactagagtgaggcggcaagctcaagatgggaagaaaatagaacgaatgcaaaggagaggagaccagcaaacagcaaactttccaggagcccctccttcagcccagtaaggcggggtaggccctagaggaagccggctgggggcacccagtgccaaaccacaccccggctgacagctcatgtccgcagcccccagccacagagctcctggagggcgtggggcctacaaggaatgagagcgggcagaggctgccacagtaagcatacgcagatgttcactcatgtcttgcatcagacctgcagcctgggtcgggacctcacgtgccaagaactccttagcgtcttctttccggaaggaagctacaggtgtgctgggaaacctagctgttggagagtgaggtcatgctatgcaggactggctggcaaggcaggccctggcaaagccaggaagcgccctgaggaagccacgggccaaggtcctctgtgactgttcctgcaccccagatctccccggggtctgggtcggcctcctcctgtcacatgacagactgatagaatctccaaatgtctttttccaaaaagggcacagactataagcccacaaattgctcagagaattgcagcatctcttcaactcctttgatgtaaacgtctacttaaagaaagaaaaggaaaaaaagaaagaacctacacctcaatactgctctgcatcacttctggggagaagaaagttagattcctggcagatgtcaccagccgaagccttctatgaacaaaccgggggaatttcacaatgctggaagcaaacaaatctctaagctcagcaaaccaacgggctccagccaggtgcccacagccagcagctggcagtgcagtgagggtggaggaacgctgcatggtaccctctgacccctccacggcttccaagtctgtacagtcaaaaacgtctcccattcactgcggagatgagcgccaaaggcggggggcggcggcgaggaggaggacaacttcctaacacttttctcccttcccgccaagaagcgcgagggggccttcccctccgacgggcaggtctccttccgaggctagtgtcacctccactccacagaggaaaacgtcagtctcggaaggagtttgctcagggtcatccaatgggggcccagaaacacagctgggctgagaatgcccagagtttgacgccctgcttccaggacggatggcctccgcagagtcccccttgccttgtttcctcgaatggaggaccctggaaaataaactcctgaagacgagcaggtcaccgagttctccatctgatcaggacccttcctgaggcccggcaggaacccccgggacacgggggaagtccccaggctgtccccacagggcttgccccctcctgcaacccgctcggccgcctccggcctccaagccccaacgccccgccgtcagccgcacggccgggaccccgccctgggtggccccaccaggcctctctcggaagccggcgccgccgggcccacggccggacctcagtgaggcaaagtccccatccggtcgccgggagccccgctgcccccgggccgcgcccccggcgccccgcacctggcgcagctcctcgcggcacacggcgcagtagcgctgctcgcagagcacccgcatcttggtagagcagcggtagcacaccgggtggtcgcagcggccccagcgccgtggcctccaggtctccgcagcacagcacgcagctcccgcctccccgctcaggagctgccgccgcctccgcctccatgtccgcgcgccgcccctcggcgccccccggccgccgccatggtccgggatccggcccccctctcggccggtcgtggcgccgagcggcctggctcccggcgggcccgccccttccgggcaaacgtcaccgccccacccagcaacgggcccgcccggcgcaagtgcgcgtcgcgacttccgcctcagcgcggcgccggctagagcggtggccctgatagaggccgctctaccatgagccgaccgctcgaaggtccgcgcggccacgcggccagccccgggctcctctgggccacgcgtgtcacgtcaacactcgccgggctccacgaactggcgttgtcagatgaaacacggcacaactggtttgcatctcagatgaacaaggggtcatgtcttagtgtaagtatagcccaaatattgatgggctaggctcatactaaaatgctgctccttatctgaaattgacatttaagtggacctgccgtatttgtatttgctaaatctggccaccttattaggaaaccggtctctggtatttggaacacacacaagcgtggtcccgcctccacttccctaatgccctgtttaaatccctacatgaaagacaacgtgaaaggcagcacgtggtgacgtccatctcgcagcccagggcagtctcgccaggcctgcccagaaggggcctctggaaggcacgaacggaacctgtcctctttacgctgggcccagcacaggacgtgtttggatggatgctgcagtaacagggcctcctccctacccttgagggccaggcacactcaggacctccctccctctgccatccagaaggcaggtccagatctaaaccctactggaaaagaggcagtaaattgtatcaatgagcctgaactttacttactttatttgagaccgggtcttgctcttgctgtaacacagtggtacgatcacagcacactgaggcctcaacctcctgggctcaagtgatccatgcccagtgaacttggactttagaaacagacacaaatgggcttgaaaccccaattttgccacttgaaaaaagctgtcaggcacagtggctcaagcctgtaatcccagcagtttgggaggctgggtggcccggattgctggagcctgggaatttgagaccagcctggcctacacagtcaggctccatctccacaaaaaaaatttttaggccgggcgtggtggctcacgcctgtaatcccagcactttgggaggttgggatcacctgaggtcaggaattggagacaagcctgaccaaaatggtgaaaccccatctctactaaaaatacaaaaattagccgggcgtggtgacatgtgcctgtagtcccagctactcggcagcctgaggcagtagaatctcttgaaaccgtgaggcagaggttgcagtgagccgagatcacgacaatcacgccactgcactccagccttggcaacagagcgagactccatctcaaaaaaaaaaaaaaaaacacacacgactagagtgcagtggcgtgatctcggctcactgcaagctccgcctcccgggttcacgccattctcctgcctcagcctcctgagtagctgggactacaggcacccgccaccacgccctgctaattttttttttttatttttagtagagacaggatttcaccatgttcgccaggatggtctcgatctcctgacctcttgatccacctgccttggcctcccaaagtgctgggattacaggcatgagccactgtgcctggccaaaacacacaaaaattaacggggcgtggtgacatgcgcctgtagtcacagcttctcgggaggctgaggcacgagaaacgcttgatcccaggaggcagaggtttcaatgagcagagattgcgcccctgcactccaacctgggccacagagtgagactccatctcaaaaaaaaaaaaagaaaactgggaaaagttattgtaaggatgtaagaagttcaacatcttggctgggcgcggtggctcacacctgtaatcccagcttgaaattggcactttgtgaggctgaggcaggtggatcacgaggtcaggagatcaagaccatcatgactaacgcggtgaaaccccatgtctactaaaaatacaa

SEQ ID NO: 1243572 - DNA, 4001 bp, Homo sapiens
gcagacccagtgcctgccatggtgtcatttctctcacccagtcctcccacagcctggtgaggagacccaggaatcaggctgtccattttacagattagtacatcaatgcctggggaaacctctccaaggtcaaggctgggaagtggcagagctaagatgataaaagcagggctccatatctggctcacccctgtctctgagagcacgaggtgaccttgggagtcatgtgagactcatgctcatgggaggctggcaggagacaggtgatgaggacagctcatggggagcctgctggcagtgagaataggctggagaaattcctgggacccagaggtttcccaggctagaaaaggaggagttggacccagggactaggcctgctggtctgcacccatgagctggaaccatactccccaccaaagccctcctatccccactcctgcccggaccctccttctactccttttgtcctgctttcttgaggctgtttcccaagcctagcctggcactgaataggtgctccagaaactttgttgaatgaatgaatgagtgagatgtccctagcccctggaacacctgtttggtctaatgcctttaaagatcagtttgcaaggggatggcagcaaaggagcaggagttccaagtggccccctggtaaaataaataaataaataaataaataaataaataaaaacagccagctgtcactccaaaaatggtgagatgagttcaggatgagggaatggggccacaggaacaaagcgcttgaaggaggtcccacaccatttacaccctgcagagaatccctgggtggggcctggaaactttggatggctgtgtgaggtgggcgctgtgtgcacaggggcagtggggcaagggagacatggcaggaggcgctgagaggtgaccaaggtgaagcaagactggctgcaccctgccaaagagcggtaggagagacagaagttagcgtttaggaagtaaattaatttcttcatctctgcagctacttaagctccgagaatcccccctccccgcctgtaagtgtctttggggtggtggaagcggagacctctgccacactgggggctgcctgatgtccggtccgggaaggatgccctgctgtgtttgctcgggacaggtaagagtttgtggacctcgatggtctccaaaaaattctcccctagtggtccagagtaggagggaaagggttaatgacagggccgacacagagcatggacgtgggaagaccgagggaggccgaggcgctgggagcccaggcgccaggcacgccagcctgagacctcgcgatggccccactgcagagggagggaatgaggagccgcctcccgagagatgtggggaacggcccagggtgaccctgacatggaggcggcgggaatgcggccgcccggcccggcccccccaccgcttggctccggacttctgctcccccggagccgcgacccccgtcccgctgctgatacagagcctgggcatccgcccctgccccggcccccggggtcccggctccttccagcactgccaggctcctccagggctgcgctggcagcgctggtccccggccccggccgatccctcttcccagaatccccaggctcccctcccccgccaccgacccccgcgcttcccagaatcctcggccctccgcgccccccgcccgcccccaccccggccacagccccgggcgcgggtggggggctcaggcccgggctcccggcccccgcctcccgggccccattgttccccggcggccgtcccgggcactccaggccaccccccgggaacccaggcgtccccaactcacggctctggggtctgggaaaagccggaaggcggaatccagccccaggggacttaaccccttcagtgccctgcctcgggggacggactgggcgccgaggactctggggtccttctcaaggggtgattccaggctgaggacccggggaccagttcagggtgactgggacggagcaggaagtgaccccagcttcccgggcccctctagcctggagtcagagcatcagctctatgggatttaaccctttgcctcccgcagcctggggaaaaaaggggacagcggtgggagcagggaggaggctgggacgacgcccctgtccccgtctccagtgggagcaggcagcgtgggcatctgggagagccccgatgcccgcgagggtccctgggcttctggccgctcttcatttcgcaggggctccgccggccgcgcccggaaagccctatctcagatttggcggctgctgatcccctgaggccagtctttgtttggactaaccctgggatggggctggggtgggagcaggggctggcagagcagacctgagagggaacaccctacgcactaaacatggccttaatgcttgatggaagtcatggctgcaggagttgggactgcaggaacaagcacagccgggaaggatttgcaatagcctgtgttccagcccctcttctccaaacacctcccctcagaggaggaaactgaggctcacggtggcaggaaagaagccagtgggggttccctggccaaggagggagaacctcttttctcatagctcagagggcacccggctcacagcagaagaaacctttaaaaacccaggaacactggtggcctctcaacgtccaagttatctatgctcgcaatttttacagcctttctttcttgtcttccttatcacagtcccatgggataaggttgcccatcatccccatttcaccggggaggaaaccaaggtgtgagaagcgactggtgtacttaaggccacctgattctttcagttcaacacactgcattattattcctgggcactgtggttaacactggggtgggcatacctctgagatgcatggaaattgggctttctacccttgggaagtttggtattgtgtatgtgttacaaacacagaggaatcctgggagcgtgcagagggctctgtccagagactgagaggctggggggaagaataaaccaaaggtcagaaattactaaaggcagctgggtgcggtggctcacgcctgtaatcccaaccctttgggagaccaaggcaggcggatcacttgaggtcaggagtttgagaccagcctggacaacatggtgaaaccatgtctctactaaaaatacaaaaattagccaggcgcagtggctcatgcctataatcccagcactttgtgaggccgaggcaggcagatcgcttgagcccgggaggcagaggttgcaataagccaagattgagccactgcactgcagcctggacgacagagtgagatcctgtcgcaaaaaaaaaaaaaaaaagaaggagggagggagggagagaaagagagaaaaggaaggaaggaaggaaggaaaagagaaaacaggaaagagaaaaaattgctaaaggccaggcctggtggctcatgcctgtaatcccagcactttgggaggctgaggcagaagggtaacttgagcccaggagtttgaaggctgggcaacatagtgaaaccctgtctctacaaaaaacttaaaaacaattagctgggcagggcgcggtggctcatgcctgtaatcccagcactttgggaggccaaggtgggtggatcacctgaggtcaggagttcaagaccagcctgaccaacatggagaagccccatctctactaaaatacaaaaattagcccagcgtggtggtgcatacctgtaatcccagctgcttgggacgctgaggcaggagaagcgcttgaacctaggaggcggagattgcagtgagctgagatcgtgccattgcactccagcctgggcaacaagaccaaaactcggtctcaaaaaaaaagaaagacaacaacaacaacaaaaacaaacaattaccctggcgtggtggtgcatcgctatggtcacagctacttgggctgaggcaggagaatcacttaattctgggaggtggaggctgtagtgagccatgattgcaccactgcactccagc

SEQ ID NO: 1243573 - DNA, 4001 bp, Homo sapiens
gatggatggagcagttctcggtgccgagagagctctgggaggctgggaaagtggcgctgacagtcggagcagctgagtgaggggggtgtgtcctccatggggcaacgtagcagaaacctggaggttcagaaggagcagacacgtggcagcaccttcctctggtggaggggccaaggcctaggaagagggggcagtggtcaaaaggaaggcctgaattaacttcgcctcttggctctacgagcaacaagttcacctgaggtcactgagaggttccccaagcatccatgcccaaggacctaatttctactagatccaatctgcaggcaccatcatttaaggcttccctgtgcacaagcttcccaaatataggagctcccctaggcttaagtcatccctacaggtatagctaaggaaattaaagttgagagagatgcaacctacttctgatcacagacctgttatgttcttcagaccagactcaaaaggcattactgtcctttaagaacagtaggaatctgctccctacaatcctgaaacaaaaattttctgtgacatcttaaaaggacaccaaaaccttctctaggcctttcaataagagaagtccaaatcttcctacttcatctctcagctaaacagagtagctgagaagcactgaaaaagcagctgtttcctccagttaatagctgaggacctgagaggagaggttagaggcctccttcagggaaagggctggcttgttcccccaccaccccgagtcatttcagtgtcacaaggtctcttttccttgtgacaagagagttaagagagttaagactctcttaactgggccaggtgtggtggctcacgcctgtaatcccagcactttgggaggccgaggctggtggatcacctgagttcaggagttcaagaccagcctggacaacatggtgaaaccctgtctctactaaaaatacaaaaattagccgggcgtggtggtgggcacctgtaattctagctactcaggaggctgaggctgaagaactgcttgaacctgggaggtggaggttgcagtgagctgagatcccaccacagcactccagcctgggtgacagagcgagactccatctcaaaaaaacaaaaaaccccaaaagactctcttagcgacttcttttatctacttcccttgaactcaaactatcttccatcttgggaataacatcaataccaggttgtaatgtcacttcattgcctaccttttctctcccatgcctcctgatcttaccctcaccagtctttctcatttttttcttctgcctcctctcttaatactgatgatgacagcaactcatgaagagtattatattaccatgtgccaggcactgtgctaactatattcattgtgttactcaatcctcagaacacacggcaatgcctgttattctagttcacgtaacagcaaaccccctgactgaggcggtcttcatcccaaagcccttgctctctcatgccccctacatcgtcttgtccttctccaactctgactcttcttcccatgggaccccagtacaactgtctccgaccgtaaaccccttcactgaacctgcccccggaattctcacctcacaaagcccctttgatcaaaagtcccctcccctagtcaaccaccaatgaagtcctctgacctcactcatctcgtctgccaatttcctctcaggacgcctacctcgcaccggcggccccctctccttcccgccgcgggcgcgtcagttggggaccgcgaacaagagcgcgcctgcgcactgggacccttaccctaactgcagccgcgcgccccaaggggtggctgtcggggggctctcgcgctcccacacacgcacactcagccagggttcccgggaggtgggagggaagggaaagagggaaaggagaaggggggaagaggaaggaggtagagaaaagagggcgcagctggcatgagccaggagtctactcccagctctacggacacttcctattgttactaggaaacaggaagtgtccttaggtgcaaaagcttccccgcgaaacttccgcttcgggagcactgcctgtcccgcctccgagccgcagttttacgcagacacacttccggcgctaagttctaggtctgcacggctgactccgcccacgtaggtcacaacgcggcgtctttgcacgctaagctagccacacttccggcaagagcagctagaatcgttccggtgcatattgaataggcgcagaaagggagaaaaagattctacagccctggccacagtactttggtgacacttttcgtggggctctctggaggacttttcccaaggcagatggagaaaacttcgtgaaacccactccttgctattaaaggaaatgttgtggaatataattggacttaggttttgcagagcttgagcatggcctttttgtcctcccaccttctggttcttgaagacattgccggtgacctggccccagactaacacaaggcgggcgtataccgtcagcctgcctggcgtccccttgcctcagcacacacagagacctcttgcaagatgcttctctgccgccataggctggaggttccccgggaactttcccttccttcctagctgaggaagatccctcacttccgctcgccgcgccaccggtcccacctccccgccccccgctgggtcctagcgccggcccctgtttggcagggtccgggctccgtcggtgcgaggagccgacgccgacgccacggagtcagcacaagtctcatcaggtaggaaacgtcggcgggaagccgcgagggccccgggcagctcccacgcggccacgatccgagctggcctcagtttccctgcgggcgccgagggcgggccgggttggcccagcgcgagcagcgcgggcggggcgggctgtgagcggccccgggcgcattgcgggcccagcaggtcctagaacccgccggctgtctccgcggttctgggctgcggacacccaggctcggcccgcgcggctgctggcccggcgcggtgtggtcccgggggtcctagagcccgccatgttttgggtttttgtcccggtcgcgtggcccgcgctgcaagatcccaggcgccggcggccccctcccctgctgaggcccggccaccactcccgcggtcctagagaacgccatcttgcaagcctttgtccctcattcggccttccgtccattcatttgttcatctcctcatccttcgttcagtcctccttgccacgtcctccgaagccacgttttctgaggcttataaccggggtcctgccctccaggggctgcctggctggcgggggcgccgcgtacagacggttgcgaggagcgaggagctccgggtttctgcaactctcggctcctcggcgcgcttcgtaggccccaccgcccttcaaactcccacaaacttaagggaccccattttactgatgaggaaactgaggtccagagcggcgtggggcccttacctctctactgccataaagtattcctgagggcactagggaagggggttcttgaaggatgtaaaggggctttcccgttggagaaggcaggcaagggctccccgagcccaggaaactgcatctagaggtggaggattgagaattgtggctggaggttcggtcgctgccgggaggaggactctgtcgctggagctgaggctggaaaagtaggttgggatcaggttgtgaactggcccggtaggaggcctaggatatgattagcgctcacttctgcagggttcatccgctcactacgtcactcctggccgtgaggcctgtgtggtgactgcttgtttagagatgggaagattgaggtgcctcctttttctcctcatccctgccccagggtcctagcctaggatttttggaaattgaatctttgcttgcctagtgagacagcagaacttcatccccttcctaagccagtagtgaggcaaagcaaggcttcatcgccacgacagggagcccactgtgggatattgggg

SEQ ID NO: 1243574 - DNA, 4001 bp, Homo sapiens
ccctggagtgcagtggctcaatcatagctcacttcagcctcaaactcctgcactcaagcaatcctcctgagtagctaggactataggcacccaccaccacacctcgctaatttattaaaaattctttgtatatagagatggaggtctcactacgctgccgacagtggtctcaagaactcctggcttcagatgctcctccactatggcttcctaaagtgctgtgattacaggcatgagccacagtgaccagcacccctcctctctaatttcctttatggtgtcatctggacaatactccttgcaagcttaccatgggcaaggtatcattctaagcattttgtgcataatactcaactactcaagccaactgcacagctgcctagcagttcattatgagtgaatgtttgtgttccctgtccattcatatattgaaattctaactctcattgtgactgtatttggagacaaggcctttatggaagtaattaaggctgaatgacgtcataagggtatggccctggtccagtaggattagcgttcttatgagaagtgacaccacaaagaaacaagcttactagtcacggtcccagccagtgttcaaatcccaaacacctgctctctgagccctgactattgctttgctagcattacacatcttatggtttggctgttaattcttcatcaccagcaccagagtccaggctggcaaagggctaggaaaccgatcatctgcctcctctacacccagaaccctgtgtggtgacccaaaacaaatggaaagaaccaacctcagatgaaatttgaacccaggtctgtagcctctgcctcctccacagtaggagtttgtgagaatgtccaccaataactgtttattaactaaattcctccacctttccaactccacaaggctcaactattgccccaatatcccacagtgggctccctgtcgtggcgatgaagccttgctttgcctcactactggcttaggaaggggatgaagttctgctgtctcactaggcaagcaaagattcaatttccaaaaatcctaggctaggaccctggggcagggatgaggagaaaaaggaggcacctcaatcttcccatctctaaacaagcagtcaccacacaggcctcacggccaggagtgacgtagtgagcggatgaaccctgcagaagtgagcgctaatcatatcctaggcctcctaccgggccagttcacaacctgatcccaacctacttttccagcctcagctccagcgacagagtcctcctcccggcagcgaccgaacctccagccacaattctcaatcctccacctctagatgcagtttcctgggctcggggagcccttgcctgccttctccaacgggaaagcccctttacatccttcaagaacccccttccctagtgccctcaggaatactttatggcagtagagaggtaagggccccacgccgctctggacctcagtttcctcatcagtaaaatggggtcccttaagtttgtgggagtttgaagggcggtggggcctacgaagcgcgccgaggagccgagagttgcagaaacccggagctcctcgctcctcgcaaccgtctgtacgcggcgcccccgccagccaggcagcccctggagggcaggaccccggttataagcctcagaaaacgtggcttcggaggacgtggcaaggaggactgaacgaaggatgaggagatgaacaaatgaatggacggaaggccgaatgagggacaaaggcttgcaagatggcgttctctaggaccgcgggagtggtggccgggcctcagcaggggagggggccgccggcgcctgggatcttgcagcgcgggccacgcgaccgggacaaaaacccaaaacatggcgggctctaggacccccgggaccacaccgcgccgggccagcagccgcgcgggccgagcctgggtgtccgcagcccagaaccgcggagacagccggcgggttctaggacctgctgggcccgcaatgcgcccggggccgctcacagcccgccccgcccgcgctgctcgcgctgggccaacccggcccgccctcggcgcccgcagggaaactgaggccagctcggatcgtggccgcgtgggagctgcccggggccctcgcggcttcccgccgacgtttcctacctgatgagacttgtgctgactccgtggcgtcggcgtcggctcctcgcaccgacggagcccggaccctgccaaacaggggccggcgctaggacccagcggggggcggggaggtgggaccggtggcgcggcgagcggaagtgagggatcttcctcagctaggaaggaagggaaagttcccggggaacctccagcctatggcggcagagaagcatcttgcaagaggtctctgtgtgtgctgaggcaaggggacgccaggcaggctgacggtatacgcccgccttgtgttagtctggggccaggtcaccggcaatgtcttcaagaaccagaaggtgggaggacaaaaaggccatgctcaagctctgcaaaacctaagtccaattatattccacaacatttcctttaatagcaaggagtgggtttcacgaagttttctccatctgccttgggaaaagtcctccagagagccccacgaaaagtgtcaccaaagtactgtggccagggctgtagaatctttttctccctttctgcgcctattcaatatgcaccggaacgattctagctgctcttgccggaagtgtggctagcttagcgtgcaaagacgccgcgttgtgacctacgtgggcggagtcagccgtgcagacctagaacttagcgccggaagtgtgtctgcgtaaaactgcggctcggaggcgggacaggcagtgctcccgaagcggaagtttcgcggggaagcttttgcacctaaggacacttcctgtttcctagtaacaataggaagtgtccgtagagctgggagtagactcctggctcatgccagctgcgccctcttttctctacctccttcctcttccccccttctcctttccctctttcccttccctcccacctcccgggaaccctggctgagtgtgcgtgtgtgggagcgcgagagccccccgacagccaccccttggggcgcgcggctgcagttagggtaagggtcccagtgcgcaggcgcgctcttgttcgcggtccccaactgacgcgcccgcggcgggaaggagagggggccgccggtgcgaggtaggcgtcctgagaggaaattggcagacgagatgagtgaggtcagaggacttcattggtggttgactaggggaggggacttttgatcaaaggggctttgtgaggtgagaattccgggggcaggttcagtgaaggggtttacggtcggagacagttgtactggggtcccatgggaagaagagtcagagttggagaaggacaagacgatgtagggggcatgagagagcaagggctttgggatgaagaccgcctcagtcagggggtttgctgttacgtgaactagaataacaggcattgccgtgtgttctgaggattgagtaacacaatgaatatagttagcacagtgcctggcacatggtaatataatactcttcatgagttgctgtcatcatcagtattaagagaggaggcagaagaaaaaaatgagaaagactggtgagggtaagatcaggaggcatgggagagaaaaggtaggcaatgaagtgacattacaacctggtattgatgttattcccaagatggaagatagtttgagttcaagggaagtagataaaagaagtcgctaagagagtcttttggggttttttgtttttttgagatggagtctcgctctgtcacccaggctggagtgctgtggtgggatctcagctcactgcaacctccacctcccaggttcaagcagttcttcagcctcagcctcctgagtagctagaattacaggtgcccaccaccacgcccggctaatttttgtatttttagtagagacagggtttcaccatgttg

SEQ ID NO: 1243575 - DNA, 4001 bp, Homo sapiens
cgtctcaaaaaacaaacaaacaaaaacaaaacaaaacaaaacagaaaaccaagatacgtgtcctccgccttttttttcctgttccccaggctggaatgcagtggcctgaccatagctcactgcagcctcgacctcccaggctcaggccatcctcccaccttatcctcccaagtacccgggactagaagtgtacatccccacgctcgggtaatttttttatttttatagagacgaggcttgctgtgttgcccaggctggtcttgaactcttgggctcaagcaatcctcctgcctcagcctcccaaagtgctggaattataggcgtgagctattgtgcccagcctagaaacatgtcattaatgtagaggctgagaaaaagaaaaaaaaaaatgacctagacaaaccaggccccactcacacctcctggtctccacaaaagaccctcagaactgcccaactccaaaccccgccccctttccagctggcctacaacggaggccaatctgacccaatcccattctcagagatcaacctcaaggtggttgccacctctgcccaatcaggggcaccaatttctcccacatgcctagcccctccccttggatctgccatgcccaccttcccattggctcactttaccctgagactcaaacccaggccccattggctgcagcaacgctgtcgccctgccccggaaggcgccctgccccggaaggcaccctcaccgctcatggttgcggaggtccttgagctccgcataggctttgccgcaacgctcacagctgtagggccgcaggccagcgtgagtacgccggtgcttgcggaacactgaagggtcagcaaagctcttgccgcagtcggcgcaggcgtaaggccgctcgcctgtgtggccacgctggtggatcttgagcttggagagcgcgccataggccttcgggcagtgcgcacagcggaagggcagttcgccagcgtgcgaggccaggtgcacgcgcaggcacacgggctgcatgaagcggcggccgcactcggggcacggaaagggcttctcccccgtgtggctgcgcccgtggctgcgcagctcgggtgccgtcttgtaggccttggggcatagcggacacgcatagggcctaggcttggccgcggagcctgacaccttctccccactggcttcctctgccttagcttctgtctctggctttggcttcacctcggccacctcttcagagcagtctgccggcccatgtgtggcagcgtggcgcgctgccctgggcgcgtttggaaatgtcttggtacaggacaggcacttgtagcggcggcccgagcgcttgtagccgggggctggggaccgggcctctgcagcctccacttccatggccttggtgaacggggtttctctgcaagagaagcaaagttagaccaaagccacataccttcgccactcctgaaagcctcagagagaaccctatctcatctgcatttctcacctcggaacccacacatccttcctgcccagcattcctggctctgacatcctgcgttcgtttcctccctgatctgctcattgaagaaaggagttggaccaagtgtccgcagagccactaagaaaggaggctgagggtcacaaaagattcacctacacgtccccccccgcccccaacgggcttttccaaacactgtggcattcccagaggcccaggttccatctgtctcaccatcttccttcttcagctcagtgtccaagaactatgccaggataaagagtgtacccagacgtgggcctggcctgaaggtctccaagcgcccagaaaagacagacctgggaccagaaaagggctgagccaatgggctaaatctggtagctggcactgtctggaagtgacaggtccccagcatttgtgttttctttcctcctctggatggttagtcctcagagacagcaactgttcacacagaattctggccttgcacagctgtacgggcctccgccccagactggaatctgtccactctctgctctggaatcttgttggcctgttcccacaactctggtaatggagaatcactcaaggcagcctgagccattgctagcagctggaagcctctttctgagtcataactgatgtatctgatctaacatggcctcctgggataccagctctagctgagatccctactttctggtccagaacccagacgccctccacccagctgctcctggggatcatggttgggaggaaacaggattaatggctgtattagtcttaacaccagctcatcctccctgggggatgaagggaagaggattatggcagatccacttaaggagtgctcagcagctgctgctgggggaaggggtctgaggagtgggggctgcagggagccaggtgtgcccagaggctagggggcctacgttctacttgcagccctgtggattactatgagacctcagtgaaatgagtgttgtttataagactatttccgcccggctgggcgtggtggctcacgcctgtaatcccagcactttgggaggccgaggggggcggatcacgaggtcaggagaccgagaccatcctggctaacacagtgaaaccccgtctctactgaaaatacaaaaaaattagccgggcgtggtggcgggcgcctgtagtcccagctactcgggaggctgaggcaggagaatggtgtgaacctgggaggcggagcttgcagtgagccaagatcgtgccaccgcactccagcctgggcgacagagcaagactccgtctcaaaaaaaaaaaaataaaaagactatttcctcatctggacacgttaggggttggtggcttctaagttatgacactggggttcaggaggaggaaactgagctgagccacgagggtgctaggggaaatacagagactcagggccccttatgccaggaaagggcgggagaagcagcttacctggttgacccagggaggacacaggagcccctgacgcgtggcaagggccacatccttaaagtcagcacccttctgcctgaaatcccggcctcaggcctgcacgctgccctccctccccaaccccatgcagccggtcttctcccaaaagtaatgaatgatgtttcctgttccctgctcaagaactttccatggcttccaccacaccatgcaaatccccaggtccttcctgcttgttccaaatctgacaagtccttcactggagccccacttccaccaggaggatcctcaagcatctcccctttgggtttggccccaatcccacaaaactccatcttattctcacttggttatttcacttttcccactaaatcctagggcttagccaggtgtggtggcatgcgccttaagtcccagctacgtgggaggctgaggcgggaggatcctgtgaacccaggggttcgaggctgcagggaactatgatcgtaccactgcgctccagcctgggcaacctggtgagaccccatctctactaaaaataaaaattagcagatgtggtggcatgtgcctgtagtactgcctacttgagaggctggggtgggaggactgcttgagcccaggagttcaaggctgtaccactgcactccagcctgggagacagggcaagacactgtctcaatcaatcaatcaatcaataatcaatcctggggcttgaagataagttaaagggactgaattctaacctttctgatgacttgaattcttcctacagtttccaagggatccctccctatttctggatgaggtactcactacctcttccagacggtttctggagagtctgcctgataatgttcctccttaataaaaatgatagcttgggccaggttcagtggctcacactagcactttgggagaccaaggcgggtggatcgcttgagcccaggagttcaagacaaggcgggtggatcccttgagcccaggagttcaagaccagcctgggcgatatagcaaaatcccatttctacaaaaaatacaaaaattagccaggcatggtggagca

SEQ ID NO: 1243576 - DNA, 4001 bp, Homo sapiens
cctctgcctcctccacagtaggagtttgtgagaatgtccaccaataactgtttattaactaaattcctccacctttccaactccacaaggctcaactattgccccaatatcccacagtgggctccctgtcgtggcgatgaagccttgctttgcctcactactggcttaggaaggggatgaagttctgctgtctcactaggcaagcaaagattcaatttccaaaaatcctaggctaggaccctggggcagggatgaggagaaaaaggaggcacctcaatcttcccatctctaaacaagcagtcaccacacaggcctcacggccaggagtgacgtagtgagcggatgaaccctgcagaagtgagcgctaatcatatcctaggcctcctaccgggccagttcacaacctgatcccaacctacttttccagcctcagctccagcgacagagtcctcctcccggcagcgaccgaacctccagccacaattctcaatcctccacctctagatgcagtttcctgggctcggggagcccttgcctgccttctccaacgggaaagcccctttacatccttcaagaacccccttccctagtgccctcaggaatactttatggcagtagagaggtaagggccccacgccgctctggacctcagtttcctcatcagtaaaatggggtcccttaagtttgtgggagtttgaagggcggtggggcctacgaagcgcgccgaggagccgagagttgcagaaacccggagctcctcgctcctcgcaaccgtctgtacgcggcgcccccgccagccaggcagcccctggagggcaggaccccggttataagcctcagaaaacgtggcttcggaggacgtggcaaggaggactgaacgaaggatgaggagatgaacaaatgaatggacggaaggccgaatgagggacaaaggcttgcaagatggcgttctctaggaccgcgggagtggtggccgggcctcagcaggggagggggccgccggcgcctgggatcttgcagcgcgggccacgcgaccgggacaaaaacccaaaacatggcgggctctaggacccccgggaccacaccgcgccgggccagcagccgcgcgggccgagcctgggtgtccgcagcccagaaccgcggagacagccggcgggttctaggacctgctgggcccgcaatgcgcccggggccgctcacagcccgccccgcccgcgctgctcgcgctgggccaacccggcccgccctcggcgcccgcagggaaactgaggccagctcggatcgtggccgcgtgggagctgcccggggccctcgcggcttcccgccgacgtttcctacctgatgagacttgtgctgactccgtggcgtcggcgtcggctcctcgcaccgacggagcccggaccctgccaaacaggggccggcgctaggacccagcggggggcggggaggtgggaccggtggcgcggcgagcggaagtgagggatcttcctcagctaggaaggaagggaaagttcccggggaacctccagcctatggcggcagagaagcatcttgcaagaggtctctgtgtgtgctgaggcaaggggacgccaggcaggctgacggtatacgcccgccttgtgttagtctggggccaggtcaccggcaatgtcttcaagaaccagaaggtgggaggacaaaaaggccatgctcaagctctgcaaaacctaagtccaattatattccacaacatttcctttaatagcaaggagtgggtttcacgaagttttctccatctgccttgggaaaagtcctccagagagccccacgaaaagtgtcaccaaagtactgtggccagggctgtagaatctttttctccctttctgcgcctattcaatatgcaccggaacgattctagctgctcttgccggaagtgtggctagcttagcgtgcaaagacgccgcgttgtgacctacgtgggcggagtcagccgtgcagacctagaacttagcgccggaagtgtgtctgcgtaaaactgcggctcggaggcgggacaggcagtgctcccgaagcggaagtttcgcggggaagcttttgcacctaaggacacttcctgtttcctagtaacaataggaagtgtccgtagagctgggagtagactcctggctcatgccagctgcgccctcttttctctacctccttcctcttccccccttctcctttccctctttcccttccctcccacctcccgggaaccctggctgagtgtgcgtgtgtgggagcgcgagagccccccgacagccaccccttggggcgcgcggctgcagttagggtaagggtcccagtgcgcaggcgcgctcttgttcgcggtccccaactgacgcgcccgcggcgggaaggagagggggccgccggtgcgaggtaggcgtcctgagaggaaattggcagacgagatgagtgaggtcagaggacttcattggtggttgactaggggaggggacttttgatcaaaggggctttgtgaggtgagaattccgggggcaggttcagtgaaggggtttacggtcggagacagttgtactggggtcccatgggaagaagagtcagagttggagaaggacaagacgatgtagggggcatgagagagcaagggctttgggatgaagaccgcctcagtcagggggtttgctgttacgtgaactagaataacaggcattgccgtgtgttctgaggattgagtaacacaatgaatatagttagcacagtgcctggcacatggtaatataatactcttcatgagttgctgtcatcatcagtattaagagaggaggcagaagaaaaaaatgagaaagactggtgagggtaagatcaggaggcatgggagagaaaaggtaggcaatgaagtgacattacaacctggtattgatgttattcccaagatggaagatagtttgagttcaagggaagtagataaaagaagtcgctaagagagtcttttggggttttttgtttttttgagatggagtctcgctctgtcacccaggctggagtgctgtggtgggatctcagctcactgcaacctccacctcccaggttcaagcagttcttcagcctcagcctcctgagtagctagaattacaggtgcccaccaccacgcccggctaatttttgtatttttagtagagacagggtttcaccatgttgtccaggctggtcttgaactcctgaactcaggtgatccaccagcctcggcctcccaaagtgctgggattacaggcgtgagccaccacacctggcccagttaagagagtcttaactctcttaactctcttgtcacaaggaaaagagaccttgtgacactgaaatgactcggggtggtgggggaacaagccagccctttccctgaaggaggcctctaacctctcctctcaggtcctcagctattaactggaggaaacagctgctttttcagtgcttctcagctactctgtttagctgagagatgaagtaggaagatttggacttctcttattgaaaggcctagagaaggttttggtgtccttttaagatgtcacagaaaatttttgtttcaggattgtagggagcagattcctactgttcttaaaggacagtaatgccttttgagtctggtctgaagaacataacaggtctgtgatcagaagtaggttgcatctctctcaactttaatttccttagctatacctgtagggatgacttaagcctaggggagctcctatatttgggaagcttgtgcacagggaagccttaaatgatggtgcctgcagattggatctagtagaaattaggtccttgggcatggatgcttggggaacctctcagtgacctcaggtgaacttgttgctcgtagagccaagaggcgaagttaattcaggccttccttttgaccactgccccctcttcctaggccttggcccctccaccagaggaaggtgctgccacgtgtctgctccttctgaacctccaggtttctgctacgttgc

SEQ ID NO: 1243577 - DNA, 4001 bp, Homo sapiens
ttcctcttccttcctgtttgggacatctcctgggaaaccggaattaagttacacttacaaacacttttgcacagactgtctcaggttatagaatgcttttcacttaaggcagtgagggaagttctgtccagtgattaacacacaggctttagaacaaggtaaacaggattcagatctcctaaaagtgccttatctgagccttggttccttatgcatcaaatgggaataataatggcttttgacttcacagcgttactggtttagctgagtagatgcatgttaagcacttaggaagtgctcaggaagcaggggctattatttatttatttatttatttatttatttatttatttatttatttttgagacggagtctcactctgtcacccaggctggagtgcctggttggactgggctcccagtcctcacaggaccgctgtcccatgttctgaaaactttgtaccaggtctgccttctttactcctctagtacccaacacagttgaatttctttagggatgctggaagtgggggcctgaaaagaaactctgctagacaggaagccctggaaaaccaagtggggggacccgggactatccctcacctctccgagctcctcccagtctttcccccttctcaggatcctgggcggcggggctccaagcctcactctcctgttccatccaagagatgagggctggtttggggcctgggaatcctgggagagaacagggatcacagcgcgggcctgagaggccatcgtgggaagatggcattcccctccaggctgagggcaccccctcggagcttatactcaacctggaaggggctgcagtgctgctgcctgaatgaaatggatgcgggtgaaaacactcccgagggggtacctgaagccctgggaacgggaggtggctgctggtgttggtgcaagagtgcgggattagggctcacagtcctctcggcccttctacatcatctcccctgtgaacccggtgaaggaggagggggctcggacccggggctctcaccgagcgcgcccaggtggccgtaggtctcctgcatcacgtcccggtacagagccctctgcgcgggccgcagacagccccactcctccggggagaagtacacggccacgtccgcgaagctcacagtcccgggcttcctgcaaccaggccgggtctccccgggcctcggcgccaggagcggggctgggggcggcgccatggggcctcgcagccccgatcggcggccgccaggtccctggagccgccgcctccccgctcccggcctcagctgtcgttgtccacaggaagggcggccccgcccagccgtggcgtccgaacgcagccgaggcaaccgaagtagcagggactggctgctagggattcgaggattctgatagggacaaatataattcctcagtgtttattcacttcatggccgcttggacatagacacccgggttaagggacccggaaggtgccttctgaaaatatggcgaccacccttcaattgtcacaggctgctcttaagggcgccattatttgaccatatcaaatatggagcctttctgacttctctggcctcatcgtcccacttgcccttaaataaagccgcttcggctgctttttctagtgggggaggcggggtgtctgggaagtagaggagaggcttcttgccttcaagaaagatgtaagggcccgaagcttcacttacccctctgtacccgcaatacgcaacggccgatgattggcgacgatcccggaagaagctgcgcggtgattggcctgggactggcggggcatttgaagggaccccgcggtcctgaagcctctgttgacagactggagcgcagcggagacctcggcatctgcggtgctcgggattgtgtcccctacggtctcttaccgtgcctcccgatggcgggagctggaatttggtccccagaccccttgggaagacgcgcacaccctggcaaaccatgtgtacacccgcggtagaagcaggtgcgtgttttacagtagcttagctgcggagtccacccagcccctggcatccgcagctcggctcgctcaggctctagaccgaagctgcaggcgaaggaacgtgcttggtgaggatggaatcggaatggggaagttttaaattaaatagtaattgttgctaacatacatgaatttattttttgtttgttttgagacagggtcttgctctgtggcccagcagtgcgatcctagctcactgcagactcgacctcccgggctgaagcgatcttctcacctcagcctcccgagtagctgggaccacaggcgcacacccaatgcttggctaatttttaaattttaaaacagagacagggtcttgctatgttgcccaggctggtctggaactcctggcctcaagcaattctcctgcctcggcctcccaaagtgctgtgattacaggcatgcgccacggttcccagccatttctactttttctttgagaaggagttttactcttgttgcccaggctggagtgcaatggcgctatctcggcttgcccaggctggagtgcaatggcgctatctaggctcaccgcaaccttcgcctcccaggttcaagcgattctcctgcctcagcctcccaagtagctgggattacaggcatgagccaccatgcccgtctaattttgtatttttagtagagacggggtttctccatattaagtcaggctggtctcgaactcccgacctcaggtgatcctcccgcctcagcctcccaaagtgctgggattacaggcgtgagccacggcgcccggccctgccatttctacttatttacgttgttccaaattatcaaagatagcatcaactttcaaatcctaattttttttttcctgggaaaccttcctcctttagccttcagtctcctctctaaactgggttgggcctcagttcttctcataccgggtctccccttcctgctgtcctgggttgtatcttccgcttcctagatttaaggtctttatttttcagccaagatgggtcatcctcatggctggtggcattggactgtaaatactagttgccttcatccccacatttggaatatacctgcaatcatacaggatgcagaatactgtttgctaagcgtggggctggttgctggagataacaagcaaggcctaccaggtccctgctgtcattctggctctggatctacttgcttggctcccctgccagccctagtatatcgagccttcctttttattcaatagtgttttttattgctgacttttcagtcaagatttctttgtgttttctggcctacccttgctgtttttcacctgaaatgctttttggcttttagtgtgactcctgctgatctcatatgcatatgttattaattgattaattattaattgttaataattaaatattattaatatgcttacattattaccttgagttctggaactgcctcactgcactccatgtggtgaatactgtagaaattatataaggaaaaatatatccttagaaatgagtattttttaaattttgaaaatatttaatttaggcccagcccagttgctcacacctgtaatctcagcactttgggaggctgaggtgggcagattgctttaggccagaagttagaaaccagcatgggcaacatgctgaaactccatctctactaaaaatacaaaaattggccaggtctggtggtgcacacctgtagtcccagctactcaggaggctgaggcacaagaattccttgaacccaggaagcagaggttgcagtgagcaagatcatgccactgcacttcaacctgcgtgacagagtgagaccccgtctcaaaaagaaaaaaaaattgggctgggcacagtggcttgtgcctgtaatcccaacactttgggaggccaaggcgggaggatcacctgaggtcaggagttcgagaccagcctggccaacatggcaaaaccccgtctgtactaaaaatacaaaaattagctgggtgt

SEQ ID NO: 1243578 - DNA, 4001 bp, Homo sapiens
tccctgcctcagcctcctgagtagctggaattacaggcgcccaccatagtgcccggctaatttttgtatttttttagtagagacggggtttcacgatgttggtcaggctggtcttgaactccggacctcaagtgatctacccacctcggcctcccaaagtgctgggattacaggcatgagccaccagccggccggttttcaaacctagatgcacatctgaatcagctgaggctatttaaaaaatggaagttcctaaacattcacacgagtgaatgaatagctctgggatggggtcctggaacctgcgtttttaccaagttccccaagtgatttagatataaccaatggccatttaacaaccttggcaaaaattaactgaaaagttttaagcaaggaaatatcatggtcagatctgaatcttggacagctatccctggtcttgaagaatctggctctgaaattccagcccagacagctccatcttctactatgggtggatctgggacccttctacctgaatggggttaagcagagccttgttggattctgaggagattgcagtatgtccttcgctgataagggtcatcctgccgtaagagcagaaagaggcccctgcatcccaggcagctgttccccatgagctcccttcaaccaaaacccagaaaactctgagaagtttaggatctctttggtccaactcaaaggtggctagaggcagagatcctggaaaggaggcagagggtagcacctgttaaaagctcactgattctggctggctgcaatggctcacgccagtaacccctgcattttgggaggccaaggcaggaggatcgcttgaggccagaagttcaagaccgaactgagcaagacaatgtttctacaaaaaaaaaaaaaaaaaaaaaagacgaagaataagcccactgattcattcacacagtggaaaactgcagcttgcagactgacataggaatctctgtgtggtggaccggccccacaccaccagacacaagaggctgggaagatgaatatactaaatacgcggcacccacccctagcccaaccaaaactctggacagagccgttagaggtagaacgttataggagggctgcaggctctgcgtggttatttagcactcacttctctggactgttagccctctcgggtactcctgcggatctagagcagccggttcccagtcatcggtgtttcgttccaaccaggagatgagggctggtttgggacctgcgcaccctggggaaagagaacaaatcagaaggccagctcctagatcacgccgagtagtatctccccgacggcacctcctgctaagcccctgcccacctcccctgacaacctggtcgcctgccaggaccgtggcctccctgcctacaccctctccggctcctgcatcccttcgcgccccgcggcagcggatggggccggcctcaccgagcgcgcccaggtgaccgtaggtctcccgcatcacgtcccggtacagggccctctgcgcgggccgcaggcagccccactcctccggggagaagtacacggccacgtccacgaacttcagagccctcggcctcctgccccttttccgactgggtctggcctttcctggtccctgcgcagggagcggagccgaaggtggcgccatgggacccgagaagccggcgccacggccttccgtgtccaggcctcggccctcgggcgctggcggcccctgggatcgaggagcccctgccggaccagggctgagcgtggccggggaggcccggagggaatcggaattggtcgcccgcggggctaacggaaaccttttgctgttattcaggaaactcctgcccgaacttgggtgaaaggcaccggaagatgccttcggggaaaatggcggcgctgctaccgcaccgcctttgcctggaacacaggcagcttccagctatcgattttattgaccggagcgccatgccggcttcctaacctctttgccctcaagtgtaatggcgctgcgattgggcttcacgccgtcttttttcccctccccaatacgcgcgttcattggacgagagccgaagatcgagcgttctgattgggtgctagcaaaggcggtccgtttgaacgaagccaagagctgcataagggcaggaagctggactgctaggatcaggcgactacaaggagttgtgaagcgacttgcaccgacctgggggcagcaagaggccccggggctgctttccgctgttcgactctggcaggctcagccaatcactgaaggagggaacgatttgagcgatggagccactctggccgagttagagctgagattatcctgagttccttttactggtgttctcagagcatccttgactttggagaatggttatcttctttgtttgccctttaggggagggaattatggttagcatttcctgggggcaggcgccatgcccagcatattacatatttcatctttattattttttatttttattttatttatttatttttgagacagagtcgtgctctgtcgcccaggctggagtgcagtggcgaaatctcggctcactgcagcttccacctcccacgttcaagcgattctcctgcctcagcctcccgagtaagtgagattacaggcgcgtgccaccactcctgactaatattcatatttattagcagagatggggtttcaccatgttagccaggctggtctcgaacttctgacctcaagtgattcacccacctcggccccacgaagtgctaggattacaggcgtgagccactatgcccggccttatttttatttttttgagacagggtctcactctgttacccgggcgggatggaatgcagtagtgcaatctcagctcactgcagcctctaactcctgggctcaagcaatcgtcctgcctcagccttcagagtaactgggactactggtgtgcactaccacgcctggctaattttttatgttatttgttgagtcagggtttccctgtgttgcccaggctggtctcgaacccttaggctaagtgatcctcctgcctcgtcctcccaaagggctgggattactggcataagccacagcaccggagccattagttattcgctttttttttttgagactgggtctcattccgttgcccaggctggagtgaaggcatgcacccacagtgctctgctaattttttgtatttttggtagagacggtgtttcgccatgtttcccaggctggtctcgaactcctgagctcaagcaatccgcccacctcggtctcccaaagtgctgggattacaggagtgagccaccacacccagcccgttattaattctttactagcattttgtgaaccaatggttatcatcctggttctactaatgaagaaacgatctcagagggattccatgagtttccagggccatactgctagtaaggagtggggaataaagatttaaacctggggcagacagagcctttattcataccactgataggcatccttccttcacagtatcctaatttgcttgctaaaccaggaatccacctgagctcttgttttcttctcaagttcaatattctgcataatctccctacattattttcacgtgacatttgttcaacgtacaaagcatagtgctaggcaattgggagagcgtacataaataagtcataggccatgctttgaatggagcttacagtctagtaaagcatataaattcacaatgaatcataacagaatgatacaagcatgtatgtgaaaggcactgaactgaaaattgctgatggaacaagccagcacccaccccattagcctccacattttttttttttttttttttttgagacggagtctcgctctgtcacccaggctggagggcagtggcgccatctcggctcactgcaagctccgcctcccgggctcacgccattctcctgcctcagcctcccgggtagctgggactacaggcgcccgccaccacgcccagctaattttttgtatttttag

SEQ ID NO: 1243579 - DNA, 4001 bp, Homo sapiens
caaaatatgtgttaaccaaagttgcttaaatttctccccttctccaaggtgcctgaggtttgtcccacccacagcctgagtcaacattcaacccctctttatgcccctcctaagaacaggctgacttcagggtgaaacattctctgatcagggatctgatttagtccaggagtcgtgcccttcccctcccaccttgaatcatgtttgctcctccctatgaaagaaaggccttttctgcttcaactgtgagatccacaaatatcttacagttggtgctttcctcctcttgcaatactcctttacaattaaggcacttcttacctatatccagatgttttatttgaccaagtcaagaaacagccccaggacactaacaattccaccctcagaaagagcttcccaatctcccttccagcccaacctcgaccacatccgcctgtgaatcccctgctttccagaactctgcagcttctcccagtaacaaagggctccctccatggctgctgtgaacctcagggacacctgaagggggcgctccccaggaagaactaactgggccttcaatgacctccttttgcaggctcaaataagactgaggtcttctatgcctagtcagggttattccacacacccgcttctcaattcgcaggctctctctttcaggtccatcgaggtggggtgccttcttcccatctcatcagctctccacaagcatctagcgagctctaaaacctaccccaggatagcaaacgtcagaccttcctccactctcctggcactgcacgccttctggggagtgctgccaatcctacctcaactgaagggacaggagcaggtgcccagccagtcagatgttcagtgacctaacaggtttcaggaaaatagcaaaatcactcaaaacagtttttatagaaaggaaggaaactgtaaggcacttacactttatacttcaacaggtaaggccaaaatacctctttcgagcaagaaacatgtcatttaattatttccataatagcagatcatttagtatatgtgaacacttctaggaggtgccaagtcctgtctcataacatttggcattaaagtcggacatccagatagcagtagaatatggaacacagatatccactgtcacaaatcctccactgcaaaagagaggacctgatattttaatgaatgtttgtaattgaccaattaatctagcacactttctgtggaaatgtattcgttttctacagccaaagtggaagagagattgtccctatttcttttccccagcagcattcctaagctgagccctgggattttgaaatcgctgctccagaggaccctaaaccacaaaccacggcggcaggcttcccatttcaccaatcgctgtttacctaaatcaaccctttaacgctttaagggtgactccccttaatttgtaagaggaaaaaggagactgggacaccacggggcacagtatcttcccacacacgaatcacacgccgacccgggatttcccctaagaccctcacgttctcaccgcacaatctcgggagacgccgggctgcggcgacccaaagacggctccggccatggcagaggtcgctctgcggggtcgggaggggaccggacgcgcggggtcccggctgccggcccggccgccatcttgcggcggaggggaccaagggccgagttgcgtccgcggggactcagggcccagaccccgaagctaacctcaaagagggttcccgccgcttccgaccgcccctctccctcttctggggacccccgacctggcacattcaccatttcccagcttccgggatgtcctggcgtctgagctacggatctcccggtgcctgccggtcacagagtaacagaggttctgtctattctcagaacgcgaagccgccttggcctcccagatggaaggactgggagcccctggtgaagagactgagctcttactgcagccaacaaaggccaccgccaaatcccggaagccgcccctgctctccggctactcccgattggaggatttccactccgacgccactgattgggtaaagctccaggccccgccctctcactcgttctgctttttgaatgggagacaggctcattgaggtggggccacctgctgagggtattacagctaatttaaggggtgagcttggacttgaaatgcacttgctttcccgtacctggttttgcttgtataaggcatcttattagctaattaagtttaagaaggagggcatttgggcacctttaaaacaactttttaaccgttctaataacacaggaaagaccctcatcccatccttagcacctctcatcacacggtaccccactgctcaggacataactgtgggactgcagaggaaactgctggggtttttggggagcatgcaggaggcttcaacagccaaggtaacggtggcttcccttgggtgtcacttaaaatcttggggtcagggacatcttttatccagttggctcagggaaactaacagacaggaggattgtaattttttttttcttttctgaatttccaagacataaaggactatccaagcatcccaaaaggcattcaattatacataaggctgagggcctccctgctctggagagggatggcctggcagccaccagctgcagtgagctgagatagtgccactgcaatgggccttaaacttgccctcttgtagacaggccacctccacacacccgcttctcacatcgcaggctctaaccctccggtccatcaaggtgggctgccttcttcccatgtcattagctctccacaagcatctagttagctctaaaacctaccacaggatagcaaacgtcagaccctcctccactctcccggcactgcacgccttctggggagtgctgccaatcccacctcaactgaagggacaaatctgggcaggtgcccagtcagatgttcagtgacctaacaggtccagcatgcccagggcctgaccccacagcctagcacccctcccccacctggccttcaatccagcctttcttctccaatgacgggatgttcacctgtgccacaatcccattagtctagtgacgaggccaggtaaatcccagctgagtgcctgtgactccaccctcttacttcccactcaggtgacattacaagcataaccttgaatttgagctaatttatacatattcctctcctagtaacctgtttgacaacagccctcacaatccagagactggggcagcaggttccaaaacctcactttattccaatgtgaaatgaagacatgatggtttaaaaatgagaaaaagttcctgataagctgtgggggtgcttcacttgccagctcatgcccattccctctgaaacaaggtgtctgttacccataaacaactctctgtaaagccccaggtagaggtcacagctggacgtggctccctcaggctcacagggtagcaatctcctcccccagtccaggcttccacagcaggcacggacaggtgcagagagggagtggccatggcctgtggggtcccctgccaccctcagagctagtctctgcagaaggtgctgtgtggtaagcagcagggctccacagagaggtgacaacccttcctgtgtctgcaacctttccccaggatccatgattcaaccctggctccctaggccccttacccagcacaccctccgtgtgtcaggcagctcaggttaaaatggggagaatgatatattccgactgtagacccgaaggttctgtccatctggggtacagggagtagggacgccagtcagagcctgtggtagcgcctcctgctgggcctgagggcagacaggccagggctgggcacagggacatctgggggaccaccactgacaaacctgtccctctcagcctggagctacggccaggccaatcatgattaataaaaccactgcagccttcatcctgccacaaaactaaagtggaccccaacccccagccctgccacaaagctctgctccccat

SEQ ID NO: 1243580 - DNA, 4001 bp, Homo sapiens
ctcgcccctgtggctgtaaatgtgctccaccagtgtggagcgccaggcgaagctcttcccgcacacgtagcagccgtgacgctggtcagctcgggggacaggggggtgggcaaaaaagcgggggcgactccggcgccgggccttggacagctgctccaacccggcaaagggggcttggggagccttcagcccaggagacccggcggccacagggtcgggcttctccagggctcccgtcccttccctttgtctttcctcttccttgtttctggaatctgctgaaagataaggaggcgagagttcaggcttggctcatcctggtcattgaatcccacagcccgcgtggacagggacaggcctgctggacccccgactgctcctaggagatggaggagtgacacctgttcctcggctgcagagccagacagagcctggagggagggaacagtccattccgcctccgggctggggaaatgtcaccgcgggggaagggcagagatgacgtgaacatctgggcctgatctggaataagaagcggacacctggggatattccaggcagaaggaacagcaccaagaaaggcagaaccaggagggcatggccaagttcagtggggctggatactctgcaaaagctgaggcaagaactaaaggaaggaaatgggagggcgggatgtgggggcataggaaccatagtgcaggaaaacgactggagcgggtcatgatgtggaggtagagtcaacagaacctagaggccgggtgcagtggctcatgcctgtaatcccagtgctttgggaggccgagatagaggatcgctagagttcgagaccagctcgggcaacacaccaagacctctacctctttaaaatttttttaattaaaaaaaaaaaaaaaaaaccagccaggcgtggtggcgagtgcctttacagtgttaggtactctggaggcccacgcgggaggattggttgagccgattgcttgagcccgggagttcaagactgcagtgagctatgatggcgccactgcacctcagcctgggcaacagagaccctgtctctaaaacaaaacaaaacaaaaaagtccccggagtgtagtgaccacgcagaggtgaggactcaggggcgggtatggcagggccagagcccccatcacagcccctttctaggctgcatcccggagccaggcaggggctcagcctcctggccgcagttgaggaggcagttcagagaggaaactgctaagcaggtagctggaggtggcagagggtaccgggatgggacaggaacagagaagtccccatgggactgagcacccgatactccacctgggtccgcttctgtcggacacttcgccacctccggatcctgggcagccggatcccacagttcggccttctcctccacccaggagatgagcgccggcttgctgcctccgactcctgggggagaagaacgcaaaccccacgctgcgaggaggccgcctgcccggccccggggcccccaactccacacgcagctcccagaggcgcggcagggcctgtggaggcgcagggcccaggcaagcaggtggggctctcaccgagcgcgcccaggtggccgtaggtctcccgcatcacgtcccggtacagggccctctgcgcgggccgcaggcagccccactcctcccgggagaagtacacggccacgtcggcgaagctcacggccccgggctttctccactcggatcccgccccgtttgggtcccggggagggagcggggccagaggcggcgccatggggactgtcagccccagcgacggatcggtcatctcccctggccaggcctgggcatgcggaacctcccgcgcccgagaacacttccccggcccggtaccaagggaaggagggacgtcagtagagcccccgaaggcccactagaggggatggaaactaagggccgatggctgcgagtccatggtcagaactggacgatgtcttcaaataaaacggcggcagcgcgacctctcgacctttgcccctgcgcaattgtacccacgacgacgcccccctccccgcgcccccgctccaggcccagttctctccttgccctaatccaaaatggccgttgcggctacaggcgccggccttgaaaaccagccgcgcatgctccggccccgccaggtgaggcggcgcagctcagagcttccgcccgggtttgcgggaacaaagcagcgccctgcggaaggcagccctcgtgaactcagaagttagttttcgtctctggacctttttataatcggacttcagcccatcactgtctcgttttgtcctcagaaacggcgacagcagcctcttcccaatgttgagagcaaaaagtgtgaacccagaaattccgagacagatctcaattacttgccaaggttgaggacgcgcgcgtgacagcctcaggaagtcctcacgacatgtgcccaaggtggtctgggcatagcttagttttatacattttatggagacatgagacatcaataaatgtatgtaagaagtacattggttctgtttggaaaggcggggcaacttgaagcaaaggcaggaagacgtgaagcaggaagggggcttccaagaaacagaaggtgaggcacaaacggttgcattcttttgagattctgattagcgtttccaaaggaggcaatcagatatgcatctgtgtcagccagcaaaggggtgactttgaatagactgggaggcaggttggccctaagcaattcccagcttgactttttcctttagcgtagtgatttgggggggtcccaagatttattttcctttcacaaaagccatggagtggatacaggagaacctcctctattgtaggctttttggagcttgaaattctgggagcttctagatggcggaagcagcggggagaatagggtaaggctgagaaagtcagagggccctctcttctaggagcttctcccatgtgctgtgcaggacgcctcccgaccgcctgtctccctctagctgcagccaggctcttggcttccctgacgtcctgcccctgcgcggatggcccaaggctcctaggctcaaacccagctcatccctttcttaccccaacctgcttcccctggggtctttatctcagtaaaagtcgccagctctcccctgagacctccttctcacacttcctgatggcctactctgtgctccacgtgacttcatacatgtcctgtgtactggagtcagagtcacctccaacgcgccttttagctcttagtgggttctttagttgaatctaggcccagattgagaatcgcctgtaatcctggcgcctgggaggtcggggcaagaggattccttgagtccaagagaatgagatcagcctgctcaacttaggagaccctatctcaaaaataaataagaaaaaatgaatcgacagcagacagactaacaggaggaaagaatacaaattgtacctgttttacatgtactcaggcatcttcacaagagagagcagtcagaaaaagtggctgaagccaggtgcttttatatttcttttcttttttttttttttgcagagacaagtgaacatttatttttatgtctttcttcctatgtgtatttcaagtctttttcaaaacaaggccccaggactctccagattcaattatgtccttgggcttggtcgactgctgcaggagtcttaaggagccttgtgcaaatgctagagtgactcatttaccaacattaaaccctaggatagatgcaacagagaagtactacttcctccatggaatgtgctgatttcaggcgacgtggcacccaatgtagaaaacgctggaatttttccttggaactggactgtgatgagaggtgcttgccatgaacataagctactgtcttttttttctttttttgagacggactttcactttttttgcccaggctggagtgtaatggcgcgatcttggctcaccgcaacctccgcctcccaggtttgagtgattctcctaccttagcctcc

SEQ ID NO: 1243581 - DNA, 4001 bp, Homo sapiens
gttccagtacattctgtgaatacctaaaacccccaacagcatctaactgcattatactattttctctatgtatacatagctatgataccttaatttataaattaggtacaataagagattaacaataaaacactgtagtaagagttatttaaaactggcggtgcgccgtggctcatgcctgtaatcccagcactttgggaggcctgacgtgggtggatcacctgagaccaggacttcaagaccagcctggccaacatggtgaaaccttctttattgtaaacacaaaaattagccaggtgtggtagtgcgcgcctgtagtcccagctacccaggaggctgaggcaggaaaattgtttgaacccgggaggtgaaggctgcagtgagctcagactgtgccacggcactccagccagggcagcaaaacgagattccatctccaaaaaaaaaaaaaaaagttatttaaaacttatgaactgtttatttctggagttttccatttaatattttttggatggcagttgacagcgggtaagtgaaacccagatacagtggggggagggggtactacagaaagtaaaaaagtagcctattttcagacaatgtctcccaagtaagcaacaagatgctcatcattctttgcaacacacataaagggtgccatgcagatgatttatacgaattttgtttttttttttgagatggagtctcgccctgtcacccaggctggagtgcagtggcgtgatctcagctcactgcaacttccacctccccggttgaagccattctcctgcctcagcctcccgactagctgggattacaggcgcgtgccaccatgcccggctaatttttgtgtttttagtagagacagggtttcaccatcttggccagggtggtctcgatctcctgacctcgtgatccacccatcttggcctcccaaagtgctgggattacaggcgtcaaacaccgcgccaggcctatatgaatttttaactgtgcttacttgatctggagaaaattacagctgacctctgtttacaaaatatcaacttgtaaaaaaggatattttatttacaaaatatcaagtcgtattttctttctgtcgctgatgtttatgaaatatcaactccaacaggagttggtgacgatgaaagtgaaactttctgctgactttgtatttctccaaaggtcatttagacttctaaggggggctgaggagagccgtgagcctcacttttcctgaagtgagccagcagaaacggcaccgaaattctgcccaggatgccaccggtattcaaagaagtggccagctccttgctgcccaccccggttccagaagcaaagagacacttcctatgtttttgcatcagtagaagctgctagccctgaggctcaaccgaccgcatgacatcggccggacacggaaatgccggcggaggcgggaaagagtctgcgggcgcagctgcaggcactgctgcccgccagcactcggattcgccacagcctgtgtctgcgacaggcgtgcccgtgggcactgggcaagcgggcagtgtcccagcgagcttcagccgcgcctctgggatacagctgcgaaaagcggggagagaatggtttctcgtgcccgacggtggccccgcctcaggctccagccgcgcggcccggaagcgccgcggccaccgcctacggaaaatggctgcctccctgcggccgccgccgctccagcggctccagggtcgaagccataggggaagccgcttctcggttacctcggccagcttggcttccgtggaggccgctcctcgctttctgaggctcaaacgcaagccaccgcccgaaaggccgccgatctgaggagcgcaaccgccagcccaccgctggcctaccgcagccctgtccaggtacagagccagagcgccggccggaagtggaagtgacgctttccgagggtggcgcaggcccgccctctggctaaggcgcctgagcccggcctacttcctcgccagagaaactgctgtcttccccggcggtagggaagggttaatgccaccgagtatccagacccgctgaagcctagagggccttgtaccggctcaccgcgtggctgtcgctgtctcgtgtccccagtgggggaggcgtcgcactgccgcgtctgttctgcgtggctgtcgggcggcgtttggtcccgggagcctcgccgggtaagggtcgcctcccagctgcgcgcgccgcgttctcgggcttcccgcggcccggccggccgtgctcgagctgttgctgggctcgtcgccgcctcctcgaggaagaggcattttgtccgggtcgggccactcgctaggtcagaaacagcggccccccgagggttttgtaccgttttctaggtctcgtgacgcattccccacaactattttttcttgaggtaggtttgaacctgtgaaataggttctttttctatctctccttgacagagaaacggagacctaagaagtgacttgctcagggtcacatagctcagcagtggcggccgctaatcggaaatagctctcctgttgtggtatcctctgcgttttccactccagtattcttccctggaaaatgggaaccttgttttcatcttatatctcatgcagcgcctaacatagtcacctggtaagataggcattccacacatatttactgaatcatagttataagaatctgagtgttttgggtgttcagtgatctctgaattaatccgtttttgtaatgtcagtctgtaccagttgagggattatttaataagtccagtatgagtggtttcggaattaccagtttttgtaacgtcagcttataccagtcaagggactatttattaagtcagctatgtgtagccaatattgcagagttgagtaagaagtctttgtccttaagcaatctcttgaaaggactgagcaatttcgtgaatatcagtaacacaagggtaagaataggacataaactgaatgctgtgagaactccaagaaaatccaagttgatttggggttgggggaaattataaaagaccttgagggattttgtccacagcagggaatggagacactttccaggcagagggaagggtaggagtaaaggctttaaaagctggaaacattagactgtgagatcttaggtacgtttttactgagttgggctgcatttagaggaagagttttaaaagttagaaaacgagtttatgtggcacttatactggagtcctttgaatgggaatgaaaagagtgcatttaagaaagtaaatcctggccgggcgcggtggcttacgcctgtaatcccagcactttgggaggccgaggcgggcggatcatgaggtcaggagatcgagaccatcctggctaacatggtgaaaccccgtctctactaaaaaatacaaaaaaaaattagccgggcgtggtggtgggcgcctgtagtcccagctactcgggaggctgaggcaggagaatggcgtgaacccgggaggcggagcttgcagtgagccgagttcacgccactgcattccagcctgggcgacagagcgagactccgtcgcaaaaaacaaaacaaaacaatacaaaaaagtaaatcctggagcaccatttgagcgttttggactgagctgctttctatggcagttcatctaaggtaagtttaaggtgagaatgaagatgagaggccattaccaggccattatgctatttttgcttttggatgggatggtatgtaactcctcttaggcatagatcttgatcctttttaagtgagagagaaagataaacagatttaataatgagcatctgcctaagtcacttgaatttgtgtctaagtaggttcatttccttaaaatctcagccaggttgggacttcatttcttcagcagtaaatattctcagtctatcagaaccagtggacagtagcgccatcagcattaagattctcatcacctggcccaatgctgaatatataattagaatttattaagttgaataagtgaagtt

SEQ ID NO: 1243582 - DNA, 4001 bp, Homo sapiens
agggcagagatgacatgaacatctgggcctgatccagaaggaggaacggacacctgaggatgttccaggcagcaggaacagcaccaagaaaggcagaaccaggagggcatggccaagttcagtggggctggatactctgcaaaggctgagggcaagaaatgaaagaaaaaaaggggggcggacggggagaaaggaaccagcctgcaggtgaacggcaggggtgggtcctgaggtggaggtagagtcaacagagtttaagagactgggcgtgggggctcaaggcggtaatcccagcgctttgggaggtagagaaggaggatcagcctaggatttcaggaccagcctgggcaacacaccgagagccaagaccccctctataaaatatatatattacataacaatttaaaacaattaggccagacgcagtgggtcactttggaaggccgaagcaggcgaatcgcttagctccaggagttaaagaccagcctgggcgacatagtgaaaccctgtctctactaaaaatacaaaaaattggctgggcgcggtggctcacgcctgtaatcccagcactttgggaggccgaggcgggcagatcacaaagtcagaagttcgagaccagcctggctaacatggtgaaaccccatctctactaaaaacacaaaaacaaaattagccgggcgtggtggcgggcgcctgtagtcccagctactggggaggctgaggcgggagaatggcgtcaaccagggaggcggagcttgcactgagccgagatggcgccactgcactccagcctgcgcgacagaggaagactctgtctcaaaaaaaaaaaaaaaaattaagcaggcttggtggcgggcgcctgtaatcccagctacttgggaggttgatacaggagaattacttgaacctgggagtgggaggttgcagtgaactgagatggcaccactgcactccagcctgggcaacggagtaaaactctgtctaaaaaaaaaaattacccaggcttcgtggcgagcacctgtacagtcttagctactctggaggcccaggtggaaggactgcttaagcccgggagttccaggctacagtgagctatgatgccgccactgcactcagcctagacaacaaagcgagaccctgtctctaaaacaaaaacaccaaaaaaagcccccagagtgtagtgaccacgcagaggtgaggactcagaggcgggtatggcagggccagagcccccatcacagctcctttctaggctgcatctgggagccacgcaggggctcagcctcgtcgtcgcagttgagaaggcagttcagagaggaaactgctaagcaggtagctggaggtggcagagggtaccgggatgggacaggaacagagaagtccccatgggactgagcacccgatactccacctgggtccgtttgtgtctgacatttcgccacctccggatcctgggcagccggaccccacagttcggcctcctcctccacccaggagatgagagctggcttgttgcctccgattcctagggaagaagaacgcaaaccccacgctgcggggaggccacctgcccggccccggggcccccaacttcacgcgcagctcccagaggcgcggcagggcctgtgggggcgcagggctcaggcgagcaggtggggctctcaccgagagcgctcaggtggccgtaggtctcccgcatcacgtcccggtacagggccctctgcgctggccgcaagcagccccactcctcccggcagaagtacacggccacgtccgcgaagctcacagcccccggctccctccactcgggtccggccccgtttgggtcccggggagggagcggggccagaggcggcgccatggtaactgtcaaccccgacgacggatcggctgcctcccctggcctggcctgggcctgcggaacctcctgcgcccgagaaagcctccccggcccgggcccaagggaaggagggaggttactagggcccccgagggcgcactagagggcgtggaaactaacggtgccgatggcagcgggtgtataatcagaaatggaatatgccctcataaaaaatggcggcggcgcgggtactcgacctttgcccctacgcagtcgtgcccaagacaacgcccccggtatctccagtccgcgttctctccgtaccctcatccaaaatggccgcggtgactaatacagaggccggccttgaaaactagccgcgcatgtttagtccccggcccggcgaggcggtgcagcagagagctccgccccggcccggcgaggcggtgcagcagagagctccgccccggtttgcacgaacaaaagagcgcctcgcgggagtgagctggcctcccggccttactgaactcaggcattagttttcgtttgtggaccgttttataatcgggctccagctcatcactctctcgttttgtccttgttatctcagaaacagggcaacagcagtctcttcccaatgttgagtgtaaaaaaaccaatggagtgggcgtggcgcagtggctcacgcttgtaatcagcagtttgggaggccgaggccagcggaacaactgaggtcagaagttcgagaccagcctcaccaacatggtgaaaccccgtctccactaaaaacacacaaaaaaacagccaggtgtggtggcgtgcacctgtaatcccagctactggggaggctgaggcaggagtatcgcttgaacgcgcgaggcggagtttgcagtgagccgagattgcctcaccgcactccagcctgggcgacagagcgaaactctgtctcaaaaataaaaaagaaagaaagaaagaaaaaggagtggatacaggagaacctcctccatcgtaggcttgttggggcctgaaattctggaagtttctagatggcggaggcagtggggagagtagggtaaggttgagaaagtcagagggtcctctcttctaggagcttctcccatgtgctgctcaggacgcctcccaattgccagtctccctgtagctgcagccgggctctcacctcccctcacatcctgcccctggacagatggcccaaggctcctctactcaaatccaactcatccctttcttgccccaatctgcttcccctagggtctttatctagtaaatgtcaccaactctcccccagacctctctctcactttctgatggtctattctgtgctccacgtgacttcatacatgtcctgttgtagcaggacaagccacagacaaaacccctcagacaccgagttgaaggaagggttttattcggctgggagcatcggcaagactcacatctcaaaaaccgactccccgagtgagcaatccctgtcccttttaagggctcacaactctaagggggtccccgtgagagggtcgtgatccattgaacaagcaggggatatgtgactgggtgctgcaggcactggtaattagaacaggacaggacaggacagggattttcacagtgcttttctatacaatgtctgtaatctataaataacaaaactgattaggtcagaggtcgatctttaccaggcccagggtgtggcgccaggctgtctgcctgtggattccatttctgcctttgagtttttacttcttctttctttggaggcagaaattgggcgtaagacaatatgagggatggtctcctcccttactgtgtatgggagtcagagttgcctccaactgccttttagctcttggtgggctctttagttgaatgtaggcccagattgagaatcgcctgtaatgctaactactgggaggcaaaggcaggaggatcccttgagcccaagagtatgagatcagcctgggcaagttagtgaaaccctatcttcaaaaaataaaaataaaaataaactaaagtaaaataagaacaaatgaattgacagtggacaaacgagaaaattataccaattgtattagttttacatgtacatggggatcttcacaagagagggaagtcagaaaaagtgcccaaagccaggtgcttt

SEQ ID NO: 1243583 - DNA, 4001 bp, Homo sapiens
tcatcgcacttgtaaggccgctcgccactgtggacccggtgatgctgcagaagcgtggaggagcggcagaagcccttgccgcacacggcgcacctgtagggccgctcgcccgtgtgggagcgctggtgctggatgagagtggaggagcgattgaaggtcttgccgcagtcggggcagctgtaggtgcggcctggcaggtgggtgcgggcgtggatggccagcaccgagctctggccaaagcgcttgccgcactcagggcacttgaagggcttctcccgggcgtggctgcgggcatgggggataagggccgaccgctgggagaagctcttgccgcagatgccacagctgaagggcctctgaccggtgtgcaccctctgatggctgcgcagggacgagttctggctatagcacttgccgcactcggtgcagctgtagggccgctcgtggctgtgggtgcgctggtgtcgcaggaggtaggagctgtcgccgaaggccttgccacaatgtgggcacttgtagggcttctggccagagtgagtgcgctggtggcgaagcaggtaagagctgtcggcgaaggccttgccgcaacggggacatttgtagggccgctcgccagtgtgggtgcgctggtgtttgatgaggtcagagctctgggagaaggccttgctgcagacctcacatttgtagggcttctcaccggtgtggatgcgctggtgctggatcagggtggagccccgcccgaagctcttcccgcagatgccacagatgttaggccgagggccctgcccacccctggcccggccaccccgccgacctggacctcgaagggctcctgtgagacccaggggattctgaagcatctcaaactgcggtgtagacagcagggcccctgtgggcatctcaaaaggtggccctatgggcaggtcccctgtgggctgctccccaaacccctgagtgaaggagtccagggggtgaactcctacggagatattcaaaggactcttttcctcggggttcagaagcatctccgcaccttcctggaatttggaactttgagcttcaaattctgggctttgggttttgagctcagtgttctgggattcatatctagagctctcagattcatagccagggctccggggttcatacccggggctccgaggttcatagccagggctttggggttcatacctagggctctgggattcaaactcagggctctgagaatctgattcagggcttctgggtgcaaactcagggcttgggggcacaagcccagggcttcgggactcaaaccccgggctttcaggctcaaatctggggctttggggttcaaactctgggctttgtggctcaaacccagggctctggggttcaagcccaaatggtatctcttcgacttcatagtccccactgccttcttgctgagaaatttcctcttcctcattctcactcatgttgcctgcaggatgagagaatccagatcgtgtgagacctggaaggtcatttggtccattagcaaccacacacctcccacctcacatgcagggtcgctggcccctagacaagtgctgaaattcccacgcccccctcagctgacccaagacaccccagtccccgccggcccctccttcgagtcccaggtgtcccagccccgggccctcgctccctccctggagccacagccccttctcctgcgcgcaagtccactcctcggacgggcgctccctcctcacctctgaggtacccttcggggctcctcatttcgtcagaactctgcacatcctggggctcgaggccccacggcaacgcctcccgctccatccccgcgggctcccagtgcagcggcggcggcgatggcggccgatcccgcgacccggcctcggttgccccgagccgcgggcccccgcctcccgcccgctcagcgccgcccaggggactcggcggcccagcccgggcccccgaggccggacgtcttgaccccgcgcctctccagcgcgccgggcccctcccctgcccgcggccccgccccctcccaaggtctcggcctccccgtggccctcactggcccccgcgcgtcgcggcctcggggatgaggggcttcgcgactaccccggcggcccccggcccccgctcccgcccgagcccccaccttctggaccccggccccgggctgggctgcactgtccaacggccgcccagcacccccccaccctcccccgcacaggaagtgtccgtccgcggccaggtccccccgccggctcgcgccgcggcctctctaggagccgctggaggtggaaactcgttggcattaaccctgggctggaggggcccggccacggggtgggtgaggaccggacgccccggagcccgcggggctaccggggcagtgtgtgtgcctatgttctaggtctccgtccctccagaggcccgtctgtccatctcccgggccccgcgtcgtcggtgcgtgtggccaagggcgaggcgacaagcgagaccaaggtcagcgagaaggagcgacgcttcccggcgccagcgggggcggtgtctcgctccctcccctcccgggcctccgggtcagctccggcagcgcctcgggaaccgggacggactccccttggcctcgccgaggtccttgagcctgggaccccctccaggaactccgctccccggcacctgcgcgcgcccgctcccgttcctccggcccccacccagctcggctcccctgatcctcctcctccctcctccctcctcgagggctaggatagttgccaaggagacagccccgccccggctcccagaggcacagcttctccgccccaggaagcccggcggttggccgatggggctcgtgctctagccgccccgcctcctccaaccccgcggacggctgggcgttaatggtcgccagggaacgccaggcgccttcctgattggccgggagtgctgtggtcgggtccgcctcccctgtcggccagaagcgccttcaggaggtagtgggagggaggtgccaggcatctcccctccagcccggcctgtgccatcaaaacttttcccgcccccacttagcctccattatgttttatgaaagccagaagatctgaggacagacacccttcctcctcgtcagcctcacaccccttgcctctcccctccaccttccccagcgcctgagtttaactcaatccctggcagccttagtccctgttgttagatttcctcacagggaggcaggattccttccaggtgagggtgatacaaaggagaattggactgagagaaccatctggccttcgaggcatctaacaactctccagtcttgtctgactcgaatggagtcttgcagaggaagggaacctgagaaacactgcctcgggcgcagctttgaattgaggaagtgagcctggacagacaacttaatatcatccagttcttgtcttttttttctacgcttcgtgctgaaacaagtttggcagcgttcttgacagttaacgagcccgatgcccctgtgtgagcaggagccatggatcgtgttttcttgtcgcctacccagacaaatgaagggaagagaatgtttgggaggaaggatggcctctccttcctgaaaagaggtgagaacaagaacttgaagaatgccaagtggtaaaaagtggagagaaactatctaaataaaggcttacaggtggggcgcactggctcatgtctgtaatcccagcacttttgggaggccaaggcaggtggatcacgaggtcaggagttcaagaccagcctggccaagatggtgaaaccccgtctctactaaaaaaatacaaaaattagccaggcacggtggtgggcacctgtaatcccagctacttgggaggctgaggcaggagaatcacttgaacccgggaggcggaggttgcagtaagccgagatctcgccactgcactctagtctgggtgacagagcaagactccgtctcaaataataataataaaggcttacaaataaaatcacaa

SEQ ID NO: 1243584 - DNA, 4001 bp, Homo sapiens
accctcagaataaaagccagactccctgtgtggcctgccaaccacccccactcatccacactacagcatgaccgaaccacccaccctcactgctgcagtgcactactcactcgtctgagcctctataagggccatttctggctggatacggtggctcacacctataatcccagcactttgggaggctgaggtgggaggatcacctgaactcaggagtttgagaccagtctggccaacatggcaaaaccccaactctactgaaaatacaaaaaattagccgggcgtggtggtgcatgcctgtaatcccagcttcttgggaggctgaggtaggagaaccacttgaacccgggaggtggaggctgcagtgagccgagatcacgccactgcactccagcctgggcaacagagcgaaactctgtctcaaaacaaaacaaaaaaaaattagccaggtgtagtggtgcatgcctgtagtcccagctacttgggaggctgaggtgggaggatcacctgagcccagggaagtcaaggctgcagtgagctgtactgcactacagcttgggtgactgaatgagaccctgtctcaaacaataacaacagtaataataaaagagccatttcctctgactgggtccatcaccccacttctgaccccagactcctactagtctcacataagccatccttttactttgagacctgtggccagttaccaaactgccctgggcctcagtctcctcatctgtaaaatggaataaatgctaccgacatcatagaatcgaggtgcttagaacagtgcctggcacatagaaaatgctaggcaagggttagctattgttactgttgctgttgaactaacctgacctttccccaacctctaaatctgagttaagttcccacttctaggcttcatcatccccctgtacctgcagccatcacacgggattctaactgtgtggttacccttcagtctaacatcaagctccatgggggatccaaggacggagtttaatctcctgcacccagcaggaagcctgggacagtaggcgtgacttttgtatgatggaagcccaggcagtagggcagaaggatgggccaatcctgaggttttagatccgagattctgggaaaagtaggggcaagatccctggcttctatctgagggaggctgggcctggaccaggtttggggacagtgtgccccagggtgtgtgtgacacatacctccttgttgtccatggggatcttgagtttcaccacctcatacttctcctcaccctcatcctcctcacccttcaccagcagcaccatctcctcctgcatctcttcctcctcctcttcctctgcctgctgttcgccaggcatcttggtgtcctgaggcggggagctggatcagaagctcaggacccgcccccccccacccccccccccgcccaccgtggccctggcccagcaaggcagtgcagccgtggcttctcccgccctgccctggtctccgaatctggtcctctcccgtccaccccagcccggccccacgctctggcacagccccgggaccagctccgagggctcgcgttcaccccactcatcccagcattcaaggccttgaacagttcgaatctccagcccccgcaagtcgccaccatccttgcgctgagtcactccccagggcccgggtcggcgacctggagctctggggcacgggctggaggcgggatcggggcggaaaccccggggagggggtgcgcactcaccagccgaaggttcggcactcgcggtgccccaggcctgggcgccgggcggctgggcactcagcgaggccgcggctccgggggcggggagggggcgggaccgcagggacggccggtcattggtccgaacatatagccccaccccctggggcggagcccgaaggacccaggcgtccggcccaaacggctcggagagggcggcgagctcagacttggcgtcctccgcagtcccccgactcccaagcacctggagccgccccagcccggcgttcaaggtccttgccgccgagttccaacctaacctcgcggcccgtctcctggggccggcttggaggtctccgctgcgcccagtgcctctgctccgcccgaaataggccacgtgcgctcccgccccggcctgggcctctccctggcgccccgcctggagggcggaccctgttgcctcctcacttcttccattccctctttatctcctctgccgtcttttctccatctttctcggcttcgcctattccgctggcctctgggatatccttgaatacatcctaaccaattcaacatccacccaagctaccgctgtcgcgtcatgcgtggggtgcttaccatgcgccagcgctgttcagcgtcttacatacctggtctcatttgatccgcataacgatgggtcctgatccattttacagatgagctcactgaagttcagggaggtaaactgatttgcctaagttacacgataaggatgtcatagcatccctgacaatcagtagcctaggtgaacaacagcccaaagctaaatccagtccacaggggtaccttgtttggcccttagggtatttttacttttaaaaaatcttttcggacgggcacggcggctcacgcctgtaatcccagcactttaggaggccgaggcgggcggatcacgaggtcaggagatagagaccatcctggctaacacggtgaaaccccgactctactaaacaaaatacaaaaaattagctgggcgtggtggcgggcacctgtagtgccagctactcgggaggctgagacaggagaatggcgtgaacccgggaggcgagcttgcagttagccgagatcgcgccactgcgctccagcctgggcgacagagcgagactccgtctcaaaaaaaaaaaaaaaaaaaaaaaaaaaaaatcgtttcaaagccgggcgcggtggctcatgcctgtaatcccagcactttgggaggcggaggccggtggatcacttgaggtcaggatttcgagaccagcctaaccaacatggtgaaaccccgtctctactaaaaatacaaaaattagccaagcttggtggtgcatgcctgtaatcccagctactcgagaggctgaggcacgagaattgcttgaactggggaggcagtggttgcagtgagccgagatcatgccattggtctccagcctaggcaacaagagcgaaactccgtctcaagaaaaaaaaaattaaattgggatatttcatataaaaatagatttttttttagtggaataaacaaatgccacttcctttgaaaaacagccacttcccttgaaaaagcagatatctaattttcccattttatgaatggggcaactaagattcagaaatcatgaaggaaaacagaaataacattcagtaagtgcttacaagttctatgttgtctctttacaacagccctgttgggatcaataatatctccattggacaaaagaagaaacggaagcttagacaagttaagtaatttgctcaaagtcacacagctggcaagcagcagattcaaagcttgtgctcttctattgcaccaaattacctctcaggaatgaagttataaaactggctctttcccagagctgggagaaggggtcaaatgcctggatactcacacacaggatccccaaaagccactttgcattcattctctgagtttttttttttttttttttttttttttgagatggagtcttgctctgtcgcccaggttggagtgcaatagcacagtctaggctcactgcaacctccgcttcccaggttcaagtgattctcctgcctcagcctcccaagtagctaggattacaggcacacaccaccacaccgggctatttttgtattttttgtagagacggggtttcaccatcttggccaggctggtctcaaacccctgacctcgtgatccacccaccttggcctcccaaagtgctggaattacaggcttgagccaccacgcctggcctctctgggtatt

SEQ ID NO: 1243585 - DNA, 4001 bp, Homo sapiens
cacttggtggaaaggacccagcagacccactgacacagcgtccatggtaaacaggatgccgctggatgcctctggcaagcactgataagactcagagcacaaccctctgggatttcagagtaaatctacaccctctaaacggtcatctatgcagctgaccacttaccttttcagaaataggctggggcttggaaccaggacagagtagagaaggaacagctaacatgggacatgaggtgactaaggctgaactcagccatctgagacctcgtggacccaaaggcataaggtgcttactatccgccctttgccaacctctcctctgaattcaattacaagttcataggaagcagcaagaaatggaggaatatttaaacgtatcacgagaaaacaacaccaaagtcaatatgatagagaaaccacaggggttgttctaggtgaaaagacataaacgatgggaacagataaaccttgaagggctcttagtccccaaaatacccaacagcgcaatgttggaaaaatgttgagaatcctagatattacacaaagtagacagtggatgacctccttcttatttttttatttttttatttttttgagacggagtcttgctctgtcgcccaggctggagtgcaatggcacgatcttggctcaccgcaacctgtgccacccaggttcaagcgattctcctgcctcagcctcccgactagctgggattacaggcatgcgccaccatgcaaggctaattttgtacttttagtagagacgggatttctccatgttagtcaggctggtcttgaactcccgacctcagatgatccacccgcctcggcctcccaaagtgctaggattacaggcgtgagccactgtgcccagcggaccttattatttttaattattattattattttttgagacggagtctcgctctgtcgcccaggctggagtgcagtggcgccatctcggctcactgcaagctccgcctcccgggttcacgccattctcctgcctcagcctccagagtagctgggactacaggagcccgccaccacgcccggctaattttttgtatttttagtagagatggggtttcaccgtgttagccaggatggtgtcggtctcctgacctcgtgatccacccgcctcggcctcccaaagtgctgggattacaggcgtgagccaccgcgcccggcctaattttaattttcttagatgaaatactaatattgtggtttcagtaggataatgtccttacccttaacagacgctttaccaagtatttaaaggttaagtatcatgtgtgcagtttaatttcaacttacttacactcaaataataattcaccgtaaggtttatttattgggggagagagaaaacatggcccaaagctaaaaaggagtaaaacgattgcagtggatattccttgtagcagatgttcacatttttattagattcagattttctaaagcaaaacgtgagaaaaaatacagttagtcgaaacacactgttcaccgtggattcgattactccaagaccagcgggacaacggccgcatccctcccgccccgagggccgggcctggaagtcccggcggcgagggacgcgcgctcccgctggcccccacgggctaactttcacagggagctgcacgcccggggcgctcaggggtctaccttacgcttcggtcccaacacaatgtgccagaaacaaataaaaaacgtcaaagccgaagccagattctcacagaaacacgccctgttcaaagtgaaggaagcaaagggcccctctctcaccagctccgcggaatggaagcgctgcccgggtctaccgcgagcggcggcgactttcccttctggaagcggtgccgggggcgcaaggcgcgaggcaggcgggcgggcgcccactcccggaccagcttccccgcggacagcccgaggacacgcgcggaactctccggcgccagcacgcaccgccgcaagaaccggatcagctgtaagacaggcggaggcggggccggcgccggaagaggggccggcgcgtctttggcgtcacttccgcctccagcctccgggccgaagctttggcctatggtgcggggaggtagtagtttcttccgcgagggtgcgggagggccccggggcgcccttgggaaccgggctggaggcagagacaggcccggaggaccaggcggacgtaaggatcaggcctctggacgcaactgcggagccggaacagaccaggagggcgcggttgggcgggtacagccaggaagtgctcgtcgcgagcgcggcccgcggttcggtcacagcgagaagcccgcgggtgctgggagtgctcggtcttctctcgatctctgcagggagtcactggccccgttcctttttatctgtctgaacatcacgccgaacttttaacagttgattccactgcattttcaatgtggtattttttttttctgtaaatgttcatctatttttcgcttcaaatatgcgtttctgttacttttctaatgtaccgtaggagccaagaccacctatactacgttgcaaaatagcactgataccaggggttctcccaaggttcattcagaaatgtcacatgattccagtaacaatacgaaaaggttttttttttggaaccaggcatattgatcctggagttcacatggaggaacaaatgtctcataacgcagacgacgcggacaaacaaaagcgcaatgcccgacagatgcgaaaacagcctctgtcattaaaactgtgtgctagtgacacatgaacaggaaacaaatggaatatccagacatcaacccagtaacatggaaatttggttcataaacataatttcagagcggtggaacaaacatgcagtttataatgaaaggtgctaagacaaatggttagccgtctgagaaatgatgaaattaattctggatctcacagggataaactccaaacggatcaggagtctaaatgtgaaaaacaaaacaaaaccacatgtgaagtgttcacgtgatttcgtggctgattaagaaacaagatgtgcccaggaggtggcggtggcgcacaagctttgacaggttggagggtgagggagtctcacgcaccatgagattacccacaggcttcgaattgggggtcactactcagaaaagagaaaaaaatgagcgtgggcggggggcgcgcagagaactcccagagaagaaggagatcagacagggggagggctgacgtgactagatcacgtttctcagcagcctgacaggtgtctgagtcacaaagctctgaagggcagcaacggcttgcagtctttagagccccaggatttatcttatctatggctagcagagattggacacaatttcacgaagtatacaaagcaaccacatgctaaatggttcaacactatgagtgtttgggatgtgttttatttattatttattaattttgatacggagtctccctctgtcgtccaggctggagtgcagtggcacgatcttggctcactgcaacctccgcctcccaggttccagctattctcctgcctcagcctcccaagtagctgggattacaggtgcccaccttgtaatttttagtagagacggagtttcaccatgttggccaggctggtctcaaacttctcacttcaggtgatccacccgcctcggcctcccaaagtggtgggattacagacgtgagccactgcagccaccgtgcctgcccttgggatatgtttttttttcttttaattttgttttgttttgtttttttgagacgaagtcttgctctgtcgaccaggctggagtgcaggggcacaatcttggctcaccgcaacctccgcctcccaggttcaagcgattctcctgcctcagcctccagagtagctgggattacaggcacgtgccaccaagcccagctaatttttgtatttttagtagagatggggtttcaccatgttagccaggatggtatctatctcttgacctcgtgatcctcctgcctcag

SEQ ID NO: 1243586 - DNA, 4001 bp, Homo sapiens
gcttgaggccagaaattcaagggacagtgagctgtgatcgggccactgcactccagcctgggcaactctctaataaaaaaaaaaaaaaatgctgggcgtggtggcccatgcctgtaatcccagcaccactctgggaggctggggtgggcagatcacctgaggtcaggagttcgagacctgcctggccaacatggggaaaccttgtctgtactaaattacaaaaattagccaggcgaggtggtgggcgcctgtaatcccagctacttgggaggctgaggcaggagaatccctggaactggggaggtggaggttgcagtgagccaacctcgtgccactgcactccagcatgggcgacacagcaagactcagtctcaaaaaaataaaaaaagaaaaaggagtgaacaatattgaacgcttaactctgtgtcaggctttgaggacacagtgatggtcccagtcctcatggcacttaccatcctgaacctgtttatgatccctttacaaaacagccattcaatgaccttctttggtaccagctcaaattcttttggcacctttcctctctgctcttaccatcaccaaaaagtctacacttgctggtggggcacagtgacttacgcctgtaatcccagcactttgggaggcagaggcaggtggatcacgagatcaggagttcaagaccagcctggccaagatggtgaaagcccgtctctactaaaaatacaaaaattagctgggcatgatggcgggtacctgtaatcccagctactcaggaggctgaggcaggagaattgcttgagcctgggaggcggaggttgcagtgagcctagaccatgccactgtactccagcctgggcaacagagcgagactgtctcaaaaaataagtctacacttggactgcctcactaggttccacgggaagaccttctgggaacaagcatttattctggtatcagggctgcaggaaaaacatttctcttcatttaaaaatctaattaatggtgttatttactacacgtggttcacatcattaatatccaagaggaacatctgtcttcattttatcccacaacaaaaatcaaattacaggtttcccctttcccttgacctcctaggaagctcaagctctattttgcattaaactgaggttttccagtatggttaatcggttccatagatcccaatttcgctgttccatcgggccattttgcagtgagatgaggacgtttctggggtagggtgcagggagacaggatgggactttggagggggcagcctgcgctgaggatgtgagtgagttgggggcgggggttggggcttctccacggctacttatccaaatgaagtacctgcttcctgtccttggcccctgctgaaagctgcagagctctcaccgtcgggatcctgggcctccgggctccacgcctccacttctccttccacccacgagataaaagcgggtttgggaactgaaaatcctgcgaaggagaaacaatgggctcggctgagcgcacgggaggggagaatgagactgctccctcggcgccccgcttccagcccactagcctctggggacaccgatcaccgcttcccaccgacggactgggggtcccggccggagggcccggcctcacccagcgcgcccaggtggccgaaggtctcccgcatcacgtcccggtacagggccctctgcgctggccgcaggcattcccactcctcgggagagaagtacacggccacgtccgcgaagctcacggcgcccggcctgctttccctcgtcctccggggcccggcctccccgggtacgtgggccgggcgcggcgccaggggcggccccatgggaaaccctttctgcctggcaaagggaggcttccggggaaggtggagatgctggcgctttcctgtctttcctcagacaagtccgtaagggactcctgcccttaaccaagatggaaccttcctggcgtcaacacccctcgcctttcctctctgcctttacacaccacgagggaaaccagcgggaagggtggccccgcaacaccactaaccgatagatggcgtacgttgattggacagtgccggaaggccaggagaagaaggaaggctgtgattgggcttttttttggagtggcctgtttgaaaggctgagggtgaaggagcgacagatctgaaaatagccggagctgaggggcctcagggtctaccctgactcgcttttcccggacggtctcctaggagagaggctgtggccagctgacgcgacttccttctgctactgaggtgagaagtcttagggcagatgcggatgtccagggcttcgaggtgagtaaaggtgaagcgcaaagccttaggcggcgtgcactgagtgggtaagggactgcagatcccagctttgagctctgagtactcctggcagtgccagcccgaggggcagcgggaacaggatcctacccaggatctaatttgacctttgccccgaggtcacagatgtcttcccttatagagatgcagaaggccaggcgcagagcccggattcaaagtcagctcctagccgggcgcgatggagcgcgccggtggtcccagctcctcgaggggctgaggcaggaagatcgcctgaactcgggaggtggaggctgctgtgagtcgagatcgcgcccccacactccaggctggcgacagagccaggcgcccatctctaaaaacaaacaaaagtcatcttctcgcttccgggttcggttaaggacttagggtagggccctgcacaaagtactattataatagatatgaatttatagtgttgtagttttttttttttttttttttttttgagatggagtcttgctctgtcgcccaggctggagtgcagtggcgcgatctcggctcactgcaagctccgcctcccgggttcacgccattctcctgcctcagcctcccgagtagctgggactacaggcgcccgccaccatgcccgcctaattttttgtatttttagtagagacagggcttcaccgtgttagccaggatggtctcgatctcctgacctcgtgatccgcccgcctcggcctcccaaagtgctgggattacaggcgtgagccaccgtgcccggatgtgttgtagtaatgtttaataccatctgagtcttgtctcaatcagaaaacgtgctcaaattacagctgatatgtgagtaataaaactgggaaacgaatcagataatctcttaagaccgtttttcagccctttccaaccgagtattcatagaaacagaagaggaacgttctagatgtataacaaaaagctgcccatccccacagtgaaaccactttgaagacatcactttaaaattcatgtgaattcggccgggtgtggaggctcacacctgtaatcccagcactttgggaggctgaggtgtgtggatcacttaaagtcaggagtttgagaccaggcaacatggtgaaaccccatctctactaaaacagaaaaattagccaggtgtggtagtgcacccctgtaattccagctacttggggggctgaggcatgagaatcacttgaacccgagagacggagcttgcagtgagccgcagtcgcgccactgcactccatactgggtgacagagtgagactccgtctcagaaaagaaaaaaaaaaatgtgaattcagttgggtgtagtggctcaggcctcaggcctgtaatcccagcactttgggaggtcaaggtgggaggatcacgaggccaggagttcgagaccagactaaacaacatagcaagacctcatctctaaaaaaataaataaataaaaaacaaaaacttgtgtgaatttgcattctattttataatataaccaaatgatctcggccttcacaccatcttcttggaaacctctgcaccatgagagcctagtggaggaagcgaatgcgcaggctgaagcgcaaaagaagaaagatgaggcagaggtccaagtaaaccacaagcttatgcacccatggaggctacaggagca

SEQ ID NO: 1243587 - DNA, 4001 bp, Homo sapiens
cccgggaggcggaggttgcagtgagccaagaacgcaccactgcactccagcctgggcgacagaacgagactccgtctcaaaaaaaaaaaaaaaagataaataaaaatttaaaaaaataaaatatactcctctaatgtgataatctattgaggctaaatatatatatactctattatagaagaaaaaacagaatcttgactaatttttatattttctcccttcaagatcagaaactgaaactgtaagataaaggtaataaagtcccttctgaaggaaggccaaataatttgaaccagacaacatttcaatattaaagctccaagtcaaaagacagagatgagtgtctgcgtatttaaatcagcaatgcccgctgcatcttataatcctcctagtggccaaatggggaactgaccagatggtacccaatgggacttcacacctgagtgatcaagagaaaaataagcaattacagtcccctcccacacaacgaaacgaaaataataacaaaaacacccacaaaaacaggcctgtggggtcatgggctgttgaaaatcaataagtaaataaataaatggcgctgaaaggacactcttgaccacaaagcaagatctcagaggccagatgacttgttttataggcagttaaagctaataaaacccagagacatacagccctaaaggtcactcattttgttttacttttaacactgcctcaatttccaagccaaaacctgaaaccaaaccaaaccaaaaatgtaaatagatagctgcctgaacatgggctgggaagacaggtaaacggtgagattcaggtctaaagggattccattttaaaaggaaagcagttctgtctgtcttcagagcaaggttaagagtcctcgggaaggtgcaacgtctcccctgaacactgtctctgctctcccacaggtattaggttgcagcgtctagggcacaccacagactttggcaagaaaaaaaacgagtgaaatctcagcttgatgaaaagagagtgcgttcccacctccagctctggtgcagttcccacggagcaaagcaaactcgactgaatccaagtgatctgtatctgccaaaaaggagaggacaagaaagctggtcacttagccgcctggctgttcacctgacccctggggttgggtctggggcgtgtctaatcagccgagatggtccctctgcttcttcaagcatgagcccaggtaaattcccaggaattaccagacaagagcctgacaagagccggaggtcttccgaggcggctcagacaaacccttagacaacacaatctccgaaatctaaatttagaagcttttctgcgagacccagacgcggggactgataccccccggtctgcacgcccacgcccatcctcccctcccccagctccacccaaggctgtcagacgccggggccgtccccgccggggcccgaggaggcggggtgcccgcggcccgcgcaaaagccccccggccccgcaccccgcgccccgcgcccgagagcgccaaggggcagcaggaggagcggccggggaggaattggggttggaagcggggagggtgagcccgggctgcccccctaggccggagctggcccccggccctctccccagtgcagacaaaaggaccaacagccggcggccgcgagggggcgaggagcccgcatccccagcccggacccggagggagggcagggggtctttttacccggcgcctcggcgctgcgctgcgctctgggtccctgggccccgcctccggacagacggaccgccggacaatggacccgggaccgcagcccaagccagccgggccggggcgctccgggactgggccccggcgagcggaaggggctccgggccgagccgagccggtggcggggagccgaggggcggcgctgcagacggacaaagccaacagcagacagacagacggagggggaaaaagatggcgacgcgggcggcgggagcgcgcggctcgcgcacccgcagctagtgaggcgcgtgcacgagcctccctctccccctcccccgcgccggccaggtccccttccccgcggcccggcgcgcgcctggcgttgtgggcggggcctgaggagaggggctctggagaggaggggctccggggagcgcccaatcccgggcgcccgagaggggctcgcccgcgttccagggctccggaaccccccgcctcgcccattcccgggtctttctctggctgtctcagccgctcagctcccccagaccttcctggacgtgtaaacgccaccctacccagccccgatcctggtttcttaccccaccatcgagttcagccacaaaacccacaacccccaaccacagctccgccgcaggcaccccctctccttagcccggatccccaccaccgtcacaaaccctcttcgcctcattcccccacgcttcgcggtggcttcggctcccgaggctttgaatgtgaccacgggccttggtgggaggggccaagttcagctgtcagaacctcagagctgggaaatcttgagatttcttttgagtatttaattttctgacatgattctcaactgataaaataacattggctgcagacccaggggcaggggaacttgtggcactgttgtcacttgagggatgtttgggggcaatggagagccgttggaccttttttttttttttttttttgagacagagtctcgctctgtcacccaggctgcaatgcaatggcgcgatcttcgctcactgcaacctgcgcctcccaggttcaagcgattctcgtgcttcagcctcccgagtagctgggactacaggcgtgcaccaccacgcccagctaatttttgtatttttagtagacggggtttcaccatgttggccaggctggtcccgaactcctgacctcaggtgatcctcccgcctcggcctctcaaagtgctgggattacaggcgtaagccactgtgcccggcctggttggacgcacttctagtcaaacacctcctcctgtccacgtccttctctctcctagttcctgttgccttcttttcttcctctcttctagaatgcctgagcctgccctggcatcgcttacctggagaagcagggaatgcagaggaaagaagatgagatctggtattagaagatctggctttgagccccagctctgccacccaccagcctgttgactttgggcaagtcacttccctgttctgagcctctgcttcctaagatgtcaaatggataatgatgcaataattcctggcctttactctccgagggttgttgtgccagttaagtaaaacaaatggctaaaagcatcatgcaaatgtttttcgtgattactggctgcacaaaggcagggctaacgaggatgctgtcatttgctgataaagtgacaagtcctggtatttgcatagaacattcttgcaaattgtctttcccctaaatcttttatgagatgatctcattgtctgcatcttgtgttcaatgtaatagaatgattacattgagggatcttggtccttcacaattctgtgataaatagctcattcatcattcactcatttatttattgtgattaggatacttagatagcaattattgttgtttaacttcagtcaaggaaacattttaatttcatttaaaaacttagtttccaagtagacagaaaatggaatattatcatccaacccgcaagtgtttgtactattttgtgtaagaatacaacctagaatacacactggcttttatatttaacagtaattcttgatcagtttggactgagggatacaagtatggctttattatgtcactttaaagctgacttagttgacattttcaacagaaaagtagcaaacaggtaaagtttgcctccagtgaaatttcttggatgcattattattatgtaatgttgggcagcttattccatctccttgacttccaaataaaatgagatgataataatgctattcttatgacttccctgtgctctaaaaatttctcagag

SEQ ID NO: 1243588 - DNA, 4001 bp, Homo sapiens
gttttgtgtatgtcatttttttctaatcaagtagttgttttattcacggaagcagtgaatgaatatcacactttggatttcctatatgtgtgtggaatcaccaagtggaaaggtaatgaaatgcaggctctattaatatttttaaaaatatggccaggcaccgtggctcacgcctgtaatcccaacactttgggaggccaaggcaggcagatcacttgaggccaggagtttgagaccagcctggccaatatggggaaacctctaataaaaatacaaaaattagctgggcatggtggtgcacacctgtaaattccagctactcgggaagctgaggcatgagaatcgcttgaacctggggaggggaggttgcagtgagctgggatggaggcactacactgcagcttgggcaacagagtgagactccatctcaaaaaaagataaaaaactgccatgggcggtggctctcgcctgtaatcccagcactttgggaggctgaggcgggtggatcacctgaggtcgggagtttgagaacagcctggccaacatggtgaaaccccgtctgtactaaaaatacaaaaactagctgggcgtggtgatgcatgtctgtaatctcagctactcaggaggttgaggcagggaattgcttgaacccgggaggcggaggttgcagtgagccaagaacgcaccactgcactccagcctgggcgacagaacgagactccgtctcaaaaaaaaaaaaaaaagataaataaaaatttaaaaaaataaaatatactcctctaatgtgataatctattgaggctaaatatatatatactctattatagaagaaaaaacagaatcttgactaatttttatattttctcccttcaagatcagaaactgaaactgtaagataaaggtaataaagtcccttctgaaggaaggccaaataatttgaaccagacaacatttcaatattaaagctccaagtcaaaagacagagatgagtgtctgcgtatttaaatcagcaatgcccgctgcatcttataatcctcctagtggccaaatggggaactgaccagatggtacccaatgggacttcacacctgagtgatcaagagaaaaataagcaattacagtcccctcccacacaacgaaacgaaaataataacaaaaacacccacaaaaacaggcctgtggggtcatgggctgttgaaaatcaataagtaaataaataaatggcgctgaaaggacactcttgaccacaaagcaagatctcagaggccagatgacttgttttataggcagttaaagctaataaaacccagagacatacagccctaaaggtcactcattttgttttacttttaacactgcctcaatttccaagccaaaacctgaaaccaaaccaaaccaaaaatgtaaatagatagctgcctgaacatgggctgggaagacaggtaaacggtgagattcaggtctaaagggattccattttaaaaggaaagcagttctgtctgtcttcagagcaaggttaagagtcctcgggaaggtgcaacgtctcccctgaacactgtctctgctctcccacaggtattaggttgcagcgtctagggcacaccacagactttggcaagaaaaaaaacgagtgaaatctcagcttgatgaaaagagagtgcgttcccacctccagctctggtgcagttcccacggagcaaagcaaactcgactgaatccaagtgatctgtatctgccaaaaaggagaggacaagaaagctggtcacttagccgcctggctgttcacctgacccctggggttgggtctggggcgtgtctaatcagccgagatggtccctctgcttcttcaagcatgagcccaggtaaattcccaggaattaccagacaagagcctgacaagagccggaggtcttccgaggcggctcagacaaacccttagacaacacaatctccgaaatctaaatttagaagcttttctgcgagacccagacgcggggactgataccccccggtctgcacgcccacgcccatcctcccctcccccagctccacccaaggctgtcagacgccggggccgtccccgccggggcccgaggaggcggggtgcccgcggcccgcgcaaaagccccccggccccgcaccccgcgccccgcgcccgagagcgccaaggggcagcaggaggagcggccggggaggaattggggttggaagcggggagggtgagcccgggctgcccccctaggccggagctggcccccggccctctccccagtgcagacaaaaggaccaacagccggcggccgcgagggggcgaggagcccgcatccccagcccggacccggagggagggcagggggtctttttacccggcgcctcggcgctgcgctgcgctctgggtccctgggccccgcctccggacagacggaccgccggacaatggacccgggaccgcagcccaagccagccgggccggggcgctccgggactgggccccggcgagcggaaggggctccgggccgagccgagccggtggcggggagccgaggggcggcgctgcagacggacaaagccaacagcagacagacagacggagggggaaaaagatggcgacgcgggcggcgggagcgcgcggctcgcgcacccgcagctagtgaggcgcgtgcacgagcctccctctccccctcccccgcgccggccaggtccccttccccgcggcccggcgcgcgcctggcgttgtgggcggggcctgaggagaggggctctggagaggaggggctccggggagcgcccaatcccgggcgcccgagaggggctcgcccgcgttccagggctccggaaccccccgcctcgcccattcccgggtctttctctggctgtctcagccgctcagctcccccagaccttcctggacgtgtaaacgccaccctacccagccccgatcctggtttcttaccccaccatcgagttcagccacaaaacccacaacccccaaccacagctccgccgcaggcaccccctctccttagcccggatccccaccaccgtcacaaaccctcttcgcctcattcccccacgcttcgcggtggcttcggctcccgaggctttgaatgtgaccacgggccttggtgggaggggccaagttcagctgtcagaacctcagagctgggaaatcttgagatttcttttgagtatttaattttctgacatgattctcaactgataaaataacattggctgcagacccaggggcaggggaacttgtggcactgttgtcacttgagggatgtttgggggcaatggagagccgttggaccttttttttttttttttttttgagacagagtctcgctctgtcacccaggctgcaatgcaatggcgcgatcttcgctcactgcaacctgcgcctcccaggttcaagcgattctcgtgcttcagcctcccgagtagctgggactacaggcgtgcaccaccacgcccagctaatttttgtatttttagtagacggggtttcaccatgttggccaggctggtcccgaactcctgacctcaggtgatcctcccgcctcggcctctcaaagtgctgggattacaggcgtaagccactgtgcccggcctggttggacgcacttctagtcaaacacctcctcctgtccacgtccttctctctcctagttcctgttgccttcttttcttcctctcttctagaatgcctgagcctgccctggcatcgcttacctggagaagcagggaatgcagaggaaagaagatgagatctggtattagaagatctggctttgagccccagctctgccacccaccagcctgttgactttgggcaagtcacttccctgttctgagcctctgcttcctaagatgtcaaatggataatgatgcaataattcctggcctttactctccgagggttgttgtgccagttaagtaaaacaaatggctaaaagcatcatgcaaatgtttttcgtgattactggctgcacaaaggc

SEQ ID NO: 1243589 - DNA, 4001 bp, Homo sapiens
gtgttttccagttggccttttgtgatttgattcccctctcttccaatggatgatctgacacaagggctgtcaagcatgcttgttactgtagggcagtgcttactgttttcacagcatggaacccacagaaaatgttacaatatgagtaactcacagggataaagggttgagattgctccctactgaaggtgcccggcccagtgcttcgggccaccctaggccctacctaccttcctcaggggttaaagcagtggttctcagtgctagctgcacattaggattacctgggagctttcaaaattattttgcctgtgctgcacccaggagtaacaacatacagccaaggttaagaacctttttagctaaatggttatctgtttatcctcagttaccgccacagcttatccttctactacagtgcctcctgagtaatgggcacaccgtacagtattattattgattattattagtattagagacaggctctccctctatcatccaggctggagtgcagtggcaccatcatggctcactgcagcctcgacctcctgggctcaagcggtcctccctcagcctcctgagtagctgggatcacaggtgtgcaccaccacacctggctaattttttttttttaaataattagtgtagacaggatctcattgttgcctacgctactctccaactcttgggctcaagcgatcctcccgccttggcttcccgaagtgctgggattacagacgtgagccgcagcgcccggcagaatacagaagtaataaactaaggtcaaggccatgtactgaggtgttcaaggctctgaactgctggactcaatgtcacaagataaattttaacctcaccaaaccctctcagcttaagagtatctgctaagttctgagaaagcaaacggggcgtgtgaaaagatgggtgttcatgcctgtgtgtatgtggggtcggtgatgcagttaaggacagaacccaggggaggactccgggacgggggaggcggctgagattttaaggcgggccgggtgtgctgcagccagcactgccggagaatcgctgggaaacggctccagcaggagaatggagggtggacggccggccgcaaaggcggtggaggtgttggcccgccccttccctcctgataacaccgacgtgcgtgtggggtccacggaacgccccaccaagcctcgcctggcgcggggtcgaggggctcggcggaggcgcgtgttcaggtggaggcggtgggcccgggctgcggcccttcgctcgattttatttatttatttatttatttatttatttatttttgagacggagtctcgctgtgttccccaggctggagtgcagtggcgagatctcggctcattgcaacccctgcctcccgggttcaagcgattctcctgcctcagcctcccgagtagctgggaccacaggcgtccgccaccacgcccggctaatttttgcatttttagtagagaagggatttcactatattggccacgctggtctcgaactcctgacctcgtgatccgcccgcctcggcctcccaaagtgctgggattacgggcgtgagccaccgcgcccggccccttcgctcgctcttacccggtgaggtcccgtgcccgcgtacctcccgcatgacacttgggcgtgcggccgagccgggagcgcccctgccccgcgagccgcccccgagagacacggcggatcggaacccagccgggcgcgtagctccgggaaggggacgtggcgaggacccggcagccgcggggcctgtggggaaacatggtccccgcaagggaccctgggagctggaggcgtcctggcccggcgtccggagcccacggcccaggactaggatgccgggggtctcgggcgtcctccctaacctcagtcatagggcgctccgtatccagcccgccctgcttgcctctcgcttcccccaaatactgccccgacctgtcccctggccctcaccaagacagggagaaacgaccgagacactgaggactccgctaacagctgcctgagacccaacccctccactccctgaccaggatgagggagtccgcgccatgcgcatgcacacacgcgggcctctcctcctcccaccttttgcgcgtctcgcccgggcatcgaaggaagggaatgacggcgcgacggcgacccctaggggcgggaggaggcgctaggagcggggctgggaagcgccatggtgcaggttgaacggggacattgggtcaccgggatgggtggaattagggtagggcgagtgaggcactggcttctggcacagaatttaaggagacaccccaaaatttagtaatcaggatacacagactgagcgcagtggctcacgcctgtaatcccaacactttgggaggccaaggcgggaggactgcttgaggccaggagttagggatcagcctgggcaacaaagcgagacccccatctctacaaaaaaaaattaaaatttagccggacttggtggtgggcgcctgtggtcccagctactcaggatgcttaagtgggaggatcacttgagcccaggaggttgaaggtgcagtgagctatggtgacacctctgcactccagcctgggcaacagagcaagaccatgtctcttaaaaaaaaaaaaaaaaaaaaaaaaagctagacgcggtggctcacgcctgtaatcccagcactttgggagggcaagggtagtggatcagttgaggtcaggagttcgagaccagcctggccaacatggtgaaactaaaaatacaaaaattattctactaaaaatacaaaaattagccgggtatggtggtgcacacctgtaatcccagctacttaggagactgaggcaggagaatcgcttgaacccaggaggcagaggttgcagtgttgcagaggttgcagatcatgccactgcactccagcctgggtgaaagagtgaaaccctgtctcaaaacaacaacaacaacaacaacaacaacaacaacaacaacaaccaccaccacccaaagtatattatatgcacaccctactgagtttgattcctggttccaccagttaatagctgtgggagtttgggcagtttggtgaatctaatctctgtatctcaatttcttcatctgtaacatggcaataataacagcacctacttacctcataaggttgctgggaagattcaaggagataagccaagtgaagagcttagcacaatgtctggcacatggtgagtgttcagtgaatgttagtcagttggtggctatggcagccatctgctgagatagttcccagtgatcctactcctggtgttcacaccctttttagtcccttcccacaatgcaccagggttggtctatgtgacctgtggaatactataggagtttctttctttctctctttctctcattctctttctttctttcctctctctttctttctttttttgacagagtcttgctctatcacccaggctggagtgcagtggcacgatctcggctcactgcaacctctgcctcctgggttcaagtgattctcgtgcctcagcctcccaagtagctgggattacacacacggccaccacacctggctaaattttgtatttttaatagagatggggttttgccatgttggccaggctggtctcgaactcctgaccttaggtgatccacccacctcagcctcccaaagtgctgggattacatgcatgagccaccgtacctggcaagaattacttataattaggttataaaagtcatgacagtgaaaacctcccaacttattctgaggccagtattaccctactatcaaaatcagacaaagacatcacaagaaaactagagactaatatctcttatgaatatagacataaaaatcctcaagaaaataccggcaaataaaattcagaaatatataaaaaggataaccaggtgggatttatcccaggaatgtacggttagcttaacttatgaaaataaattaatacactacatcaatacaataaag

SEQ ID NO: 1243590 - DNA, 4001 bp, Homo sapiens
ccaggccttttttgccctcccgctaggagcctgggaaatccccctccaaccttttgctggcctgtcaccagaagttcataaaatgaattcatccagattctctgaatcctccttttccccagtcatgtgccaacagccaggcaataatgccccaccgtgacaggctccctgttacaaaaagatgcagattcacgggaagaccaagcacttagcatggagcagaagaaaaaaagatggagggaggcgagagtcgcggagccaagcctgctgcatgcagtacgggtgaccacagcccgggtcctgcaaagcccccgcgagactcgccggctgggccctccgtacagcagccacacctgtctatgccagccgcctgccggctgctccattttaaacatttcaaacagatctccagcagggtggcaaaactgggcacctctctctcccagcaagagtgagagccctaatccaggcatcacttgcccctgattttatttcattttcacacactctgtttaggagacactgcttgctccaactggctccatctctccgttaccggtgaggcaggcacagtgctgcagtggcagaatggaagtacccaggctgacttgctctcagccagacacgacctcttctctgaggagggtgatgccaataaatggaactccaataggtaggcttcgctctgcccttccacaagtgaacacacgccgtgagtccctaaatcgccaggctccgcagcctcgcagaaagcctagtttccagacggtaggtatcccatttatcccttggcatcgggaaccaaagggaatgcagacagatcccggtcgtgcactacattcccaaaccttggcacgcacgcgaaggcttggggcgccccggcgcgccctccctccgaggcctccaccacccgcggactcaccactatgcgagctgaaccacctgggtgcgatgtgcagaggtagagcatccgccagcgaggctcgggagcccaggtacagcatcccgtctctatggtgaccgccgcccgtctcctggtaaccattgccatgggcataggtggagtcggacgcagaccctccgccgccgggcgccctctcggagtcgccggtgccccgggaggcgggggtgtagaggccaaagggcacccccccggccgtgctggggtccatgcccatgcctgccaccgagctgaccgagcggctgcgcagccccatggccccgccgcccgtccggtagtgcccgaaatggggcgcccctcccggcggcggcacggcgctgtcatcggtggagacccccgggaaggggccccgggagcgggccgccgtgctctgcttgccccccatgctcgcccgggccccggtggggcgggaacctggaggccgagaccctcccccacttctcagcagcagggggagggctgggcgagcataaagggggagggagtcaaaaaggagacccggagggagaaaaggaaaaaaagcaaaaggaaaaaaggaaaaaacccgcggggcggaagaggcaggcgggcgggcggggatcccaaactcagaatttcaaacgatccaaggcaaacgcatgtttcccctcaaggtccaaagaggcgcagtccggcgcgggctccgcgcgccacaggccgcccccgggctccgaaagccgggggagccgcagggaaggagggagggaggcggcggcgagcggcgggcgggcgcggggaggcgccggaggaggccgcccgccccgcgggaggaggcggaggagggccgggggcgccgggcgcgtcccccgcctcaggacgccgcgaccatggacggcggcccggacccctccaggcctcgggcgggccgcggcgctgggcggccaggcgcagctcgggaagccgcggtcgcgtcgcgtcgcgctctcgcttcagccgccgccggccccgccagccgcgccgccccgctcggtcccgggctgcgctcgccggcgctcctcgccgccgtggagacaatggagggcggcagagcgcaggcgcggcccgcgccccctccccctccccccgccgggttaaccctttcgcggtccctgcggcgcctgggccgctgacgccccagcagtccccacccaccgcccgcccccggccggcctgtgacctgggcggcctgaccactgggcgttagccacagaaaccagatgtctttcaaaagcaaacacttcttaagtccccgaaagtggcaaattattcagggggaaccaagtatgggggaggggcagcaatggttcgagggggtgggaaggaaacaccgggaagaaggagatttactccttacgcctacctggctctgagggtcaccggtcgagctcccctcctggcacaaatttgcccccacagcaccctctggtggacgtgatgtccattctttcgggggttccccatccaagcacccctcacgtccggaatctcaacatttggcggggtttagttatttgggggtaaacagcgccatggggacacttgtgaatccggcgttttgctgacactagatcataacttcctattttgggcttaagcaaatgagtagattccttagctaaaatgtaattttcagaatcaatagatgtaccataaaaagtgaatagatatgggtatggaaatagaacaacgcagctagaagtgattatagaaaccttctgtccaaggctggagccctgttttgtttaccatgtgctgtgtttcggccctcaccacgggccaaggacacggtgggtactcaataggtgtattgttgaccaagcctgaatcatttgcaagggagtgttcctttgctacctcaagccgtctttctcctatattcacattcatttattgaacaactgttttttttgttttgttttgtttttgtttttgagacgtaatctcgccctgtcacccaggctggagtggtgtggcgtaacctcggctcaccgcaacctccgcctcccggattcaagtgattctcctgcctcagcctcccgagtagctgggattacaggcacatgccacactgcacctggctaattttttgtatttttagtagaggcggggtttcaccgtattggccaggctggtcttgaactcctgacctcaggtaatccacctgccttggcctcccaaagtgttaggattacaggcatgagccaccgcgcccgccctgtttttctttttcttttttttcttttctttttttttttttttgagacggagccttgctcctcccaggctggacaacctccgccttccaggttcaagtgattcttctgcctcagcctcccgagtaaaagtctgttaaaaatttcaaaatcaggccgggcacggtggctcatgcttgtaattccagcactgtgggaggctgggggtgggggggtggggggagatggggcaggggatcacctgaggttaggagtttgcaaccagcctgaccaacatggtgaaacctcatttctactaaaaaaaaatgaaaataaaaaataaataaattagccaggtgtggtagctcacgcctgtgatcccagctacttgggtagctgaggcaggagaatggcttgaacccgcgagacagaggttgcaatgggctgagatcgcgtcactgcactccagactgggcaacagaacgagactgtctcaaaatatacatatgatatatatatatgtgtatatacatacatatatagtagagatgggagtttccccatgttgtccaggccggtactcctggcctcaagcagtcctcccacttcggcttcacaaagtgctgggattacatcatgagccactgtgactgctgaacaactatttatcaagtgctaggtgctggctgtgagtatcacacagtccctggcttagctgacttccacctattaaatgaccccagatacttctaaactgggggaccaaaacaggatgttcagaaatattaaaagaaaaccaaaaagagcaaggctagcccgtcacaggtattgattgttccattgtggccagc

SEQ ID NO: 1243591 - DNA, 4001 bp, Homo sapiens
aatctgctactgtcactttataactattaaacataaagctctctgttaccattttagggtggcataatattcaatttgagataaatctgtgtttatataatttccttaattatgagcataaggtggcttgtaatttttcatcattataagcagtaacatgatgagcattctgatacatatccttgggtaaccctcaagataaattcctcaaagtaaaacttctgggtaaaagggagtagtgatctaataagaatgttatattgttgtaaagcacttggaagtttcccagtggggaaactgaggcaaggcaacttgccccaacaatgtcagggaccaggtggagaactcagatttcctgaggcctgatggttgtgttttttcaacatctctcacactctttgagataactagatgtctgcagcccatgttccaaaataggtggatataaggcttagactccattcaagtggtgggtgacacttgcaattattaggctggtgcaaaagtgattgcagtttttgccgctacttttatgtatgtatgtatgtatttgagatggagtcttgctctgttgcccaggtgggagtgcagtggcgcaatcttggctcactgcaacctctgcctcctggattcaagcgattctcctgcctcagcctcccgggtagctgggattacaggcgcccaccaccaagcccagctaatttttgtatttttggtagagacagggtttcaccatgttggccaggctggtctcgaactcctggcctcaagtgatccaaccgtgtcagcctcccaaagtgctgggattacaggcgtgagccactgtgcccggccctttgccactaattttaatggcaaaaactgcaattatttttgcatcatcctaaactgtattgattcatgtgttgcctttgaggtgtaacctgaggcatctgaaataacattggagattaactgtttccctgacttccttgatcaaaaggatcacatggagctctcattaatatcacagattccagggtcccacccaaaagctgctgaattagactctccagaagatgtgcctgggaaatatttacttaacgagcaccacaggtgattcttataatcaggaaaacctggaaaatacttggagggagcgaggcgagaaaatctgtggtggccagtggttaacctccttacgggaattgagtagattacatcccagcggaattgggaagaaggagcaaaatacagataagtttttggggatagagatggtaaaaggatttcattttatagccaaagcatgatagcaatagtttctccttctatgcatatttttctgaaaagtggcaccttttctacaaatataatttattgccacaatggttaagactatgataagacattagaggaaaaaggagcatagacgtgagactcagagccctattgagaaggtggtcagagaagtgatgggttaatgtgcttattcagcctccctcagaccccacctcccttcccaccgcgctactcactcccctcgagatggtgtctttctccagagcgggaagtttttgccttggaaagggcagctttggtcagagcccccaaatttggggtttctaaaaggttaaggggcagcacagagaccccaagcaggagatgtggtgagaaagcccgctgtgggctggtgaagctggtatgtgcaccagagattaattttgtttgtctcacctaacccagacctgtggtgtgctggggacagccaccgaacaaatggctctgggcccaggagcatccatgtctaggattctgctccggaaaagcaggaagctaccatctgttcagcaactgactttgaacacaggaagaaatagctgctccgtaaaacagtgtctcctatcaggaggtaggaaaaactaaagttattacaaaaatgattcttaacattctgttctcacttataagtgggagctgaacaatgagaacacatggacacagggaggggaacatcacacactgggtcctggtgacaggggttggggggtgggggcagggagagcatcaagataaatagctaatgcatgcggggctcaatacctaggtgatgggttgataggtgcagcaaaccaccatggcacacgtttacctatgtaacaaagctgcatgtcctgtacatgtatcctggaaattaaaattaaatttaaaaaaatattgcgctaaataggcccggtgcagtggctcacgcctgtaatcccagcactttgggaggctgaggcgggtggatcaccagaggtcaggagtttgagaccagcctagccaacatggtgaaaccctgtctctaccaaaaatattagctgggcatggcggcacacacctgtaaatcctgctactcgggaggctgaggcaggagaatcgcttgaacccaggaggcagaggttgcagtgagccaagattgtgccactgcactccagcctgggcaacaagagtgaaactctgtctcaaaaaaaaaaaaaaaaaaaaggcagtaaacaaacagcagacctcgttcaaatatatgtgttccacactcttttcaatgaacctcttaaagtttgctgatttattattacaaggtgttccttctcctcttctctgccctgggttctatgtatcatgaaaccatttctctcttgctaatcacaaggcatttcttgacggggttctcatacataaaagaaagactatagttttgttgttgcctcatttgggcagatgtcttcctttctgaagtgtggttcttataaatgacagtttataattcttaaattctgaatctgctgcccttgttttccacaacaattataaaagtatttataaaagacaacctaaatatcaccatctagagatggttggataaactatggaatactcttcagctactgcaaatgattctatgagttcgttcagatctgtgagtactgacatgaaagatgtctgcaataaaactggaatttcagggctatatatctactatgctttcatgttttgctttaataggaaaatgaaaaacctgtcgacctaaaggaaggagaagagaatatagttttaaagagtttacttgaggcaaagtgtggacagctgcccaggaaacacttccaagttgccttggtgagttctccacttttgtcacaagtgggtgttttttttgttttgttttttgttttttttagacagagtcttgctctgtcgcccagactggagtgcagtcgcacgatctcagctcactgcaagctccgcctcccaggttcacgctattctcctgcctcagcctcccgagtagctgggactacaggcgcccaccaccacgcccagctaattttttgtatttttagtagagatggggtttcaccgtgttagccaggatggtcttgatctcctgaactcatgatccacctgcctcagcctcccaaagtgctgggattacaggcgcccaccaccattcctggctaattttttgtatttttagtagagacggggtttcaccatgttagccagaatggtctcctaacctcgtgatccgcccaccttggcctcccaaagtgctgggattagtggctgatacagtgtttcttgactcattgatttacagaaataacactgattagctgggtacagtggctcacacctgtagtcacagtgactcaggaggctgaggtgggaggatagcttgagcccaggacttttaaggcagtctgggcagcatagcaagatcccatctcaaaaaaaaaaaaaaaacactgattagtgattggctatacattgttgaactatagggtatgattaatggcgtccagcatatggtatgagttatgatgtccagtgtatggcatagttaggttaattttatggctacttggtgtcagtctagagcccacatatcaagtagctccaagagataattactgagcccgagggagtgaggtgtgactgctgtcacgtttcaatgcctctctgggcctgataatttaaagggactt

SEQ ID NO: 1243592 - DNA, 4001 bp, Homo sapiens
ccctgcaacacacagtatcttccaagcccctcacccctaccccggctcccctgcatctcccaacctcagccacctggggaaggactctgacaaaatggaacgggaagttccctgccccagtcccatcccatccaggtgttgaggggcttcctagcgttaaccctcaagctcccagtttgggaggtggatggggacagggtggggccagataagcgaagacaaagtgagaaatccagatttcaacccctgcatgtgtgagagtgtaaccacccccgagccggaactacgctttcctgccctctggcatccactccaggcagcccccatcctcccaccccatctctccccactagggcgatggagtgcctcaatcacagatgagcgtatttctctgcctggcctgggagtaggagctgtgtctagttcaatgagtgttcatccagcacttgaagttgcttcagtgtctgttagcagaaattagggaatggcagtgattctggccatctcgaaggaaagcatgtaacaacgtctaggacagaaaaagtctgtgataaatgatcagaaaaatggtgttgtgaggccggatgcggtggctcatgcttataatcccagcattttgggtggccaaggcagaaggattgcttgaacctggggggtcaaagctgcagtgagccatgttcgcgccactgcacaccagcctggataaaaggcgaagaccctgtctcaaaaaaaaaaaaaaaaaaaagaaagaaagaaagaaaagaaaagaaaagaaaaaaaaagagtgggggagggggaagaaaatgggattacgtttcactggtttttagtagcatgcacaaaataacaagaaaactaatcactgctcatccattgccgtgcaggagcagcgggcaggtactgagtgtctggcgattaagctcatttcatcccagtccagcccacgcacgaaacaatcacttctccctttgccaagtgcaaagaccaagctttgcacttggtgacatgctcagggtcacaccaggtggagccaaggtttgctttaggctgagagtgtaggtctagaacacagtgccaaagctctgaaacagaaaaggaactgatctccatcctgctctgtgccattttcctagccttagccgaaatatcacagcatgaaacagaaaaaaaatgaagattccaaatttcagctctcagggcaagccacacagggaggccggaatctccaggtgagatctctccaaaaggtttcaaagaggtggaattcgagacaagttggcttcagagaatctctccctccccccagatctccaggacaaaagctctgttaatatgcacctctgttgggggtgggctgggtagggaggcaggcagaggctctacagccaccatccaacatttgagcagcttaatttggagcccggggtggaggtgctgccacgagacccacccaggtcacctgagagcccagagttggggaaggcggcaaaggtggggtcctcagccgggaacactccctttctccctggacacagttggcagctgcctgatttgttgtttgttggaggggcctccctccgcgtgctgggctgagtggacaaggcccatcagtccacctgggagcacgtgaagccagccttcttcaatgtcacaggaagttctgcgatctccctcgtccccaacgcccccatcgcgacaggtccaccaagctggctggcacgaggctccccagcagaccctctacatcctcccaagactcttccagcccccaccccagcaccaaggcctggagcctcccctgctctctccaagctgctgcgagctcctagcacccgtcctggcagcctgcaccccgacctccctccaactcaccactcggagtccccactacacaggcagagatgctggggggttttctgaggactccagggccaaagccagcctccgccagcctggggaagggctctgggaaaatggaacaggaagttccttgccccagtcccatcccatccaggtgatgaggggcttcctagagttaacccttaagctcccagtttgggagcgggatgggaagagggcggggccagtgacatgaagacaaagtgagaaatccagatttcaatcccagcctgtgtgagagtgtaaccacctcccaaatcaagactggcctggtgccccttgcaggtctgcccgtctttcctttgggctaagagctgccatttttaaatgcccacagtgtgctggcttctttgctaggcttttcattcacgtgactactctttgcaatggcctcctgtgtgccaggcactgttacaaagcaggggctaaggacacagagagaaactgaaggaatgaggccctgctctcaggggcttacattctagggcaaaggagcagcgacggtgctaggaaaaaatggaagaggaggatgtgatggggcagagtttgctccatctacacggtcacctaaagtcctcccaagtcctgccaggtggcttttgtcccaactttaccgatgacgaagcaagggctccccgggagggaagtgacctaaccaacagcgtttggccccaaactaattccatccctgtgcttaaggtgccttcttgggttgtgcccttggctgcagctggtgccttcctgagcgttctgagcccccggggagccaggaccacctctcaggtgttggccgttcccccggcctagacccctcggtccgttggggccaggaccctcctgactggctcatctgacgggtctttgttttcctgcacttaacacctgagctcatcctgttcctacttcagttgtctagtgctcccttcgtacgacggtctttctccttggtctgctctgcattccccgcgtcccgcgcctcgctctcccagtcgcgggctcctcccactccatagtttgttcaggggcggggccagaaaaccccgcccccagggaagtgggcctgaaggccaaggggcggggcggggttctgtagggacggagggggcgtgtccggggcggggcggggtgctgtagcgccggagcgggtgtggccttggcgggaccaggcagccattacagtctcggaagcgagaggcgtggggcctgtctcatcatgcccggttcatttttttttttttttttttttttgtagagatggggtttcatcattttggccaggctagtcttgaactcctgaactcaggtgatccacctgccttggcctcccaaagtgctgggattacaggcatgagccaccgcactcagcctctttaatcacctgaggtcaggagttcaagactagcctggacaacatggtgaaaccccatctctactaaaaatttttgtttcttttaaaattgtaattttcccaattccacttattttattttattagagacaaggtcttgccatatctcccaggctggactcaaactcctgggttaaagtgatcctcccatctcggtctaccaaggagctgggactacagctgggactccatgccatcgagcgttctttccctctcgttgctgaatgattttcctcattacatcagttattcattctgctatgggtagcccgtgggcagttttcagtttggggctatctctagtggttctcatatgtctctggtgaccatatatgggacagcagtctgaagtaggtgaagagcagagtgagaggttaggtttatctttgggaggtaaggactgcacgtgtgtactccgaggtctgaggccaccgaggaagcctcagggactggcctccgtgtagagctgctctcactgccctgggcattggggacaaggccaggacaagcaggaccccgtgcgtgtttcctcgaatggcttatggtcgcttcagaaagacactgggtgtttgttggcgttcgggctgccagggccatcgaatccggttgtctgccagggtgtgcagggggagtggcgcttttcaggtgtaggaacagctctggaaataaacgagggatggaaaaaggagacaga

SEQ ID NO: 1243593 - DNA, 4001 bp, Homo sapiens
ctggccaacatggtgaagccccgtctctacaaaaaaaaaaaaaaaaaaccaaaacaaaaattagctgggtgtagtggcgcatgcctgtggtcccagctactcgggaggctgaggcaggagaatcgattgaacccgggaggcggaggttgcagtgagcggagatggttccactgcactccagcctaggcaacacagtgagactctgtctgaaaacaaacaaacaaacaaaaaaacctggtaggttggtagagagggtggaggtcaaacaagggtgcccttttatttgacctctctacaaaaagttagctgggcgtggtggcacacacctatagtcccagctactcgggaggctgaggtgggaggattacctgagcccaggaggtcccggctgcagtgagccatgattgtgccacagtctgggcgagtaacatcctgtttcaaaaaacaaaaaggccaaaaagtcaggtagggtctggagcttcaggcaaagaaagaggtgttggccggtcacggtggctcatgcctgtaatcctagtactttgggaggctgaggtgggaggatcacttgagcccaggagtggagactagcctgggcaacatagcgagattccatctctttaaaaaagacaagaaaagaaagaggcatcagtggtcacttctccagggaagggttgcttacccagggggtgtgcaggccacgccttattctctggcacatcctcaaaggtcaggcactcctgtatcaagagcagaaacccttggtgagtgaggaacatgcctcaggaacctgtggggactgaaatgcttcctaggactgaatcagggaaggtatggatttgctaaaactacagggtagagaagttcctggggcttgaggacaccctggggtgcggcccagctcaccagcacagccgccagctcctgatctcgggaactctcctctggccatggtgaggggccctggggacctgacggcattggggaagaggggaggaagtgctgttagaaggcagccctgcctgccatatggctgcaaggacacacaccgcatcatccgggccctgtgaagacaccttggcgctctcctgtcctggtcacctggggaggccccacttctcaccccaccccagacatccaggcccctccgcgacacccagtccttggcctcctagggcacaagctcctcactgctttcttgcagggcctggaatgtcttctggggccccgggctcagcggctgctttgaacttgggggaagcctccactgtcccggctcagcaggctgggcagcccttggctggggtcggggaggctcatccgatgggcccagcactgaaggctcttccgcaggcaattccttcttggggctgtggctggggacctgggaagcacaccccttttcctccaaggtgacgtctgcacggggacaactcttgccagcattacaactaaaatcctgttcaaaacacattcaagttaagtgactcccggggtggcaacctgtgtcctgactccgaggggacatgggacagaaacgaggttagagtcagccaggggaggagttaggaggtgaagaaggaatggtcaggtgggggaaagtgaagtttccagagattcctcactggggggatcaagtccccatcatccgcatgctgctcagcccgctgccccaccctctcaccagcggccccgcgtggctgggctcccggtggatgccctcgagcagcagcaccacctcctccccatccctgagcggctgcccctgcaggcggcccaggaggtgcggaggcagcacactcaggaactgctccagcaccagcagctccaggatctgtttcttggtgtgcagagccggccgcagccagtggccgcagagctcccggagccggctcagggacgcccgtggccccatgtcctcctgatactggaagcatctgaacagctggtgagccacctcgggcctcagcctggactctggtcgcctggggtcctctgggctgacagcctcctcctcctccagcttgacttcccccagctgctcctgctccacggcagctgggactgattctccaagcatccttcactgcggggatgcctccctaacgccagccccgctcttgggtctctctcctctcctcccacacctgcgaaggtgaacaccctgggttaggatctgctgcgaggaagctggccccatacctgggtcatccatgttaaaagacacccaatacgcagacccagaggaatcgcttttctcactgggtaatggctcacgagggcaggacagcccccggtctcagggttaccaacaaagcaaaggccagagaaaactgacagttctgtattatcatccctccttaaagcatttagagatttacatcacttggccgggcacagtggctcacacctgtaatccgagcactttgggaggccgaggcgggtggatcacgaggtcaggatatcgagaccatcctggctaacgcggtgaaatcccgtctctactaaaaatacaaaacaattagccaggctaatttagtcccagctgctggggaggctgaggcatgagaatggtgtgaacctgggaggcggagcttacagtgagccgagatcgcgccactgcactccagcctgggtgacagagcgagactcagatcaaaaaaaaaaaaaaaagaaatttgcatcacttttcccaagtgattaaagtgaccatccctgaaagagaaacaccctgcccttcccttcttcctgatgtagccactgggagcacatggcaccatcaagatggatcctggccaaaaaagtttgttttttaaagcttttttttttctttttttttttgagatggagtcttgctatatcacccagactggagtgcagtggcatgatctcagctctctgcagcctccacctcccaggttcaagcgattctcattcctcagcctgggtttacagtagctgggattacaggcctgtggcagcacgcccagctaatttttgcatttttagtagacacaagagtttcaccatgttggctgggctggtcttgaactcctgacctcaagtgatcagcccacctcagtctcccaaattgctgagattaaggcgtgaaccactgcaccaagcctgttttttaaatttttaatttaattaagtaatttatttatttttttgagacagggtctcactctgtcacgcaggctgcagtgcagtggcgcaatcacggctcactgcagccttgatctgctgggctcaagtgatcctcccgcgtcagcctcccgagtagctgggactacaggtgcatatcaccatgctgggttaattttatttattttttgtagacacgagttctcattatgttgcccaggctggtctcaaactcctgggctcaagtgatccacctgcctcagcctctcaaagtgctggaattacaggcgtgagccactgtgcctagcccaaaaatacctaatctcaatccaaccagcctttatttatttatttatttgagatggagtttcactcttgttgcccaggatggagtgcaatggcaagatctcggctcaccgcaacctccgcctcgcgggttccggtgattctcgtccgtcagcttcgtgagtagctgggattacaagcacgcgccaccgcatgccgctaattttgtatttttagtagagatggggtttcaccatgttggccaggctgctctcaaactcttaacctcaggtgatccgcccgcttcggtctcccaaagtactgggattacaggcatgaaccaccccgcccgacctaatggtggcctttagatccaacttccaatgtttagggccttgcagggaatatggaacaagtcagaccatctctcaaagaaattggcctgagttactcagtgtcataaaaagtaagtgcctgtaggaggcgctggtggacaggagcccaaagagtcctcacaactaagtgggtgaacctagattggatcctcattcatttttcttaaaggctttaaa

SEQ ID NO: 1243594 - DNA, 4001 bp, Homo sapiens
caaaaaaattagctgggcatggtggcacgcacctgtagtcgcagctactcgggaggctgaggcaggagaatcgcttgaacccgggaggcggaggttgcagtgagctgtgatcacgccattgcactccagcctgggcaacaagagcgagactgtctcaaaaaaagaaaaagtccctctcattggttctggtggggatattaattacaatacccacttccccagaagtgggcatatgacacacagctaggcctatcaaaattcttttctcagattttacatgagaggtagggaaagctcttcattttctaggaattggtaaattgggcaaatgtaagatcagagttgtctccaactatgtcccactctctactccactcttccatcacaggagtgagcctgtttacaagaggacaatatactcaagtcttgacaacatgtttggatctccaaggccagtttatgtaaggcaatatttttttaagagttaattttaaaaatagttttatataatttaaaattaataaataacttttaaaaataattttatttgtttttttatctttagagatggagtctcactctgttgcccaggctggtctcaaactcctgaactcaagcaatcctcccacctcaacctcccaaagtgttaggattacaagtataagccaccatgcccgaccttaaaaataattttaaatagaagctaacttttgtattttttgtagaggtggagtttcactatgttgcccaggctggtctcaaactcctgtgctcaagtgatcctcccaccttggcctcccaaagtgctgggattacaggtgtgagccactgcacccgcgaaggcagtcttttttaatgagtttgtgttggtttttatctacttaaaacacagattaaagcagatcgtaatttacattttctccaggggctgatacaccctcaccatgtggtattaaaatggatccagcatgcacaacaagatgaatatactcaggactactgagctgtacacttaaaaatggttatgatggtaaatgttttttaaaaattaaagaaatttttttatattttaaaaatggatttgggttcccttttctcaaggaacttgaactgccttcacttaaattctctttacatttcagtgcttctagagatagagaaatcaagggcattattattgttagcactgctttctagccaaaaagaaactgagagcgatgaagtatcttgcctaaagcatcacacagcacagctcctaggcagcaaggccaggactagaaccagcaccccttgccttcattatgttcatcctgtgccttacctggctgaagaagaatttaataaaagctcttctaacttcatgcagaaggcggaacctgcacccttcttgaccccttttgaccccttacctcccactcatcgttaaattttaaaatgctgttctctgaaaattttacttcactctagcgatggcccaaacactcggaaaaaaatgtagcatgaggatggggagccaggttgataggtttttcacttagttaactatttattgagtactcagaacgcactcggtgccagggctaggcactgtggatgagtagggagtgggcgagacagggacgagatgagcagggtcaaggccagggggtcccggggcgccggcgctcaggctcggggtgatccgcacggtgggagcggggcacggtgatcgcggcgcgtctggggacgcccggcctgagggaggctgcctgtcccaaggagacgcccatcggggccggacccgaacgcctcggagaagactcccagcggggaggggctcctcggccgtcgcagggcccagcggctaatcccgccggccgcaaggaagcggagaactcaccggacaccagcactcgcgactccacaaactccctcagcctccgggccggaagtcagcggcgcgattcgctccgcccattacgcacgcccctgcgcaggcccgcaagccgaattgccggactgcagctcccgggatgcactgcgacggtattgacaggcgcagcaaccaatagacggtagagaatgcccttggcaggaggcgggccctgtcagtagttgtcctcagcagctagtgggcgtctccgcagcgagtggcatcggccccgcccccagcccgtgctcgccggtgtcgggtcctaagtccctcggtcttgggttcccggagaggtgagtcggctgcaggtgggtgcggggcgccgggctgttcggggtaccggtgtcgcagtcgccagtccgagctcacaccgggcgtggagttcagctgcgcatcgggttgcggcagcttcgccaggcctggggctggctgggccgcggggccgccctggaggccggagccactgggcctgcggcgcctcggcagcgagcagccgctttgctcgcgtgcaggaggctgttcgctacctcacacccccggctggcgctgtggcctcgcttagctctaccgtttagcacccggcgacatgcacccggtcggtttccgccaggatgcgggagagttggggcaagctacctgcgacagcttgaacttttcctagggattccgctccacccgccggttagagcgtattgctcattaaatccgagacctgtgtgcttgctactgaaataaaagaagtattttttccccagagtccttttaggacgttatgacttttctcctttgcaagactgcaaaaaactgacaagaagacaaaactcttcccactcccagggaccgcgttgtcttgagtttggctagtaaaggctagcaagtgaggctttgtctctgcatcccgttccccctaacatcctcagagaaccttcgtttctagaatctttctagtattcagagacttctccagggtcatgatcccaaaggcttaacccgtttacaaggagagagttgtctcctgacgcccaaaatggcagctaaaatggagataactttaagctccaacactgaagcttcctccaagcaagagagacacataatagccaaactagaagagaaacggggccctcctctgcaaaaaaactgcccagatcctgagctctgccgccagagcttcagacgcttttgttatcaagaggtgtctggaccccaagaggctctctcccagctccgacagctctgccgtcagtggttgcaacccgagctgcacaccaaggagcagattttggagcttctggtgatggagcagttcctgaccatcctgcccccggagatccaggctcgggtcaggcatcgatgtccaatgagcagcaaggagattgtgaccctcgtggaagattttcacagagcatccaagaaaccaaagcagtgggtaaggagggtcctctcccatcatcctggggatttctttttcttttctttttttttttttttctttttttgagacggaatcttgctctttcgcccaggcccgagtgcagtggcgctatctcggctcactgcaagctccgcctcccgggttcacgccattctcctgcctcagcctcccgagtagctgggactacaggcgcccgccaccgcgcccggctaattttttgtatttttagtagagacagggtttcaccgtgttagccaggatggtctcgatctcctgacctcgtgatccgcccgcctcggcctcccaaagtgctgggactacaggtgtgagccaccgtgcccggccgatttctttttcatctgggtaatgtttggtatctggatctctccctatttaagtctcagaagtggactggatggcttcagaagttgcttccagcctctatctgggaacctatcctgagttattaacaggtttttagaaaatccaactactgatacccagtgaggcaacagaggaccaaggttcttaccattcctttatgcaccttgtgtcaccagaagtaattgtaaggttcttaaatcccttctgtcagctcttcccccacccaacttagttttcctactagcagaattcttagcagatagggtcacc

SEQ ID NO: 1243595 - DNA, 4001 bp, Homo sapiens
ccccagcaaaggagggccccaaattgggagccatacccccaaccccatggagaaaacttgaagacccagaaggtcttgctctgggaggggcctgtggcctgtactcatctctccagttctggaggaagaaatcccagcccctgggctcccctccccgccatctggctgacctctgtcttcagaggcctccctggagctgggcgtcgcagccctgtcctcacctgcatgagtctctccttgtcccagagcgagccgatgatgaaggccacaaggcagccctcctcgaaccagcccagggacagctctggacatagggtcaggaagtgccggatctcatccaggtacagggggcagacgcccaagacggagatgaaggctgtggcaggaggctcaggtgggtgactggtagtcgctgtgcctcgcgtccactgtctgctgcaccccgagtgtccactcagatgccccgttccccacaggaaaatgggggttagggctgctgtttcccccactttcttgagcgcacacatggtctgatactctgggacccagcctccaaggacaggagactaagggtctcctccccacaggataactggaccagagtggagcatccctctgaccctgtgcggggccactcaccttcacgctcgatctcaaaggcgctgacagcgtcctccggggtgaggcagcgaaactcactggcagggagtgtgtggcgccgctgacagctcggggactcggggatcccaggtggcagacgtggggcctcaggtttcagggggtgggtgctctgcgtggacattctggccactggtgcctccttggggcgccccagctttggaagtgtcctcctaagccaaggagggcctcccagcacctgttggagaacagcaagggacaggggtctcatcctcatctccagggaggcaggccccagagtatgtatctggcctcttttgtagcaggaactggggtggagacagcccctaaatcaatgggcacattccccaggtacctggtccccgaggctgttaccaggcattgcaaacattggcactgtctccccacctttccctctcagccagaaggatccctggaggtttgccaccttgcagacctgcagacattggtctcagggtgccgtctgggtgcttctgagccccagagatggtggcagggatgagcagggctcagtggagcctggggcaccccaaccctgctgcccacggtgggaggggaggcaggactcgtgaccctccactgaccacgtctaatgcaactgtgcagtgggtgggcgcccggttcccccacaccaccattcatgtggtttatcttacctccccagagggaggcttctggtcctttgggtgcaagatcctgtggcagagagctttttaggtagcctcagcccttggtcctagagagccccttaatcaaagtgggcccttagggagcctctacttctatccagatggcctcagactgggccacacacatgcaggatttgtggtggggggtggggaggttagagggagccgggggctgcagagggcctggggaatggggaggagcaggcaaggagagtgcataggacaccccctgccccacacatccagctcatcagacattcccctctgggcactcttgtctcccaagacaccctgcagatttgcagttcttagaggaggccatccctccctccaccttccaagacacttaataaactccatggcttccatgtttccctccatgtctagaagctccaagtagagaagctcctgttcctaaaggctgagagccaggagtgggggtcccacctacctggactgtggagaggatacccagtgttccctccacaaagccgctagccctgggggcctgtccgcaggcacgggaaccagtaaaatccgggactccgggctgcaaggctgtagtagcagatgttccccgggcagcctgtggtgctgttagaggtttgtaatccccccaccccacctctcgagctatcccaggcaggatgacgccagcagggctctggcagcctcggcccctgccttgctgaagggaaacgtcagctctggtgccctgggcacagaagggattaccagaggctgactgaggccccagggtttggggaagagagcgtggggctaagcctcaggggtccatctctaatccctgctctgtcaccgactggctgggcaccagcgattctccctctgtccctcggagtcttggacaagcccacctcttatgtggggggagggggtgggaattcaagctaccaatttgtgcactttaagtacgttctacttcaagtttatttaaatatttaatttaattaaatatttaaatattcaggaggttgccctaccaaacatctcaactacaaagctctctgctattgaccttggctccacccattcccagggctgcccaggccttggcacttggtgctggcattccctcgggatgcaggcccctctccctgttggctctgactaccccctgccctccagctcacaccccatcctgcaccccttagctcttctctcgccagcacctgcctctccgccccacccagcagtgcagatcctgtgtccatctcgggctcctgggggtcctggaggttggatttcacaggtgcactcttttgaccccctgcagaggaagcttctgctcctacccacacagcttgggacggacctctgagggtccttcctgtcctggcagcctgtgagtgccactgcttacagcacttgctatgtgccgggccctggatacgcgtctcctttaatccacacggaagcccggccaaatgagtattaaccacgttatagagaaggaaaccgaggcacagacaggttcagtaacctgctcagagccatccaacaagtgaagggggaggggcaaagccgggtcagcctcctgacatgcactgccacggctgcactggtgggacccactcatctcacaatgagactcctgtttcctgtcttcatgattctcctgctggttttcagtgtcctcacaggtgcactctttcgacccccccgcagaggaagctcctgttcctacccatacggtttgggacacagcccctgaccgtggagtgaccccgtcccgatgcccccgcccacccaccacatgcattcctcctgtctctgggtccccttctcccagggcccctctgcactctgaggcccacctgcctgctagaagggaccctcaacagacctctcaggaccgaccagagacctccttgggcttggttggtggggtggtcatgtccaagacctcagctgggcatccccaccttcaacctccagggtcccccaaaaggcctcttctgtcccttcatagactgtggctccatggcaccccctggtggccaatcctaatcagtcacttggcgatgcctgagaagagcctgctgttcaatcggcctctctctttgctgacttccacatggccctgttctttccggacaacaccctagaggtctagaacctcagggaacaagatgaggcagtaagccaggcacagtggctcaccgctgtaatcccagcactttgggagacagagacgggaggatggcttgagccggagaggtcgaggctgtagtgactcgccactgcactccagcctgggcgacagagcgagaccctgtctcaaaaaaatacaaataaaaataaattttttttaaagatgaggcggtatgttaaacatggtgaaactgggaagttcaaacccttgtgggacaggagaggagacaggggagggcagggtgatcgctgggacctttgtcctggtcaacaggaagaaaaccacataccaccaccaatgagaaggaaaataaggagggtgaggggcccaacagggtgatgggtacagagagaaggagatccctggggctgggcatagtggctcacacctgtaatcccagcactttgggaggccaaggcaggaggatcacttgagcccaggagtttgagaccagc

SEQ ID NO: 1243596 - DNA, 4001 bp, Homo sapiens
agcctcccaagtagctggaattacaggcgcctgccaccttgcccagctaattttggatttttagtagacatggggttttgccatgttggccaggctagttttgaactcctgacctcaactgatccacccaccttggcatcccaaagtgttgggatttcaggcgcagtcaaagtgttgggatttcaggcgtgagccactgtgcccggcctagagttacttttttttgagacggaatctcactctgtcgcccaggctggagtgcagcggcgcgatctaggctcactacaacctccactccccaggttcaagtgattctcctgcctcagccttccgagtagctgggattacaggcggctgccaccgcgcccggctaatttttgtatttttagtagagacagggtttcaccatcttggccaggctggtcttgaactcctgacctcgggtctcccacccgcctcggtctcccaaagtgctgggattacaggcaagagccaccacatccagccttttttttgttttttgttttttgagacagagtcctgctctgttgccaaggctggagtgtagtggcatgatctcggctcactgcaacttctgcctcccagattcaagcaattctcctgcctcagcctcccaagtagctgggactacaggtgcacaccaccacgcccagctaatttttgtacttttagtagagaagggatttcgccatgttggccagggcggtcttgaactcctgacctcaggtgatcaggtgatccatctgcttctgcctcccaaagtgctgggattacaggcatgagccaccacgcctggccctagagttactttttatattttatttatttttatttatttatttttttgagacagagtcttgctctgttgcccagggtggagtgcagtggcgcgatctgggctcactgcaacctcagcctcccaggttcaagcgatttgcctgcctcagcctcctgagtagctgggactacagccatgtgccaccacgcccagctattttttttttttttccgtatttttagtagagatggggtttcgccatgttggccaggatggtctcaatctcttgacctcgtgatccgcccacctcagcctcccaaagtactgggatgacaggtgtgagctgccgcgcccggcctactttttatattttaaaatgacaatatggagcagaccataacagttctgccagtctggaatttagtctaggcagggagtttggaaatagtacaacaatggttaagcttatcgaaggagctaaatgccaggcactgttctacttcacttaatcctccaattgcccaatgagatgagtattgctattatcatccctatttcacagatgagcaaattaagatgaaaataagttaatcagtgtgcctatttttatagattagtaagtggcagtgccaaaaattggaatccgtggtccccactcttagctaccttactatactacctcttgccattcattcttggcttcagggagctttgaatttatctgcatggatttgtagccaaaccactgggaccactgatccttttgttacctttctctgggcctccttcaccagcttctgggtcaacttctgaggggtcatgacgttcgaactgcttggaattcctgaatacagtgcattatacatatgctctacacgtatctattatagccttacaagttggagttgtttgttatctatttaatgtgtatttgttttgtctccccaactagactggaaacacctagaggacagggacagtatctttctctttctgcaatgctcccagtgcctgggggctaggctaggacgccaagggagctcattaaaagttgttgacagtctctccaccatcctgtgccccaccccgaccactcccctcttcctcggtggccactccacttcctcctcccgggtccccgccccttctcgctccctttagttgaatcctcactggtctcgccccttcttagtggattccatcctgcccccgccccccgcggcatcttcagcgtcccctagcgacgaggcggtggctcctagcaactgcatcccggctccctgacgacggcgccacgcagggacacgtcagcgcgctatggccccgcccccggcgcccgctggtcccgcctccccgcgcctcgttcgccgccgctgtcgccgccgccgcccgagactcgcgcagagcagttatggcggatcccgcagcccccacgcccgcagctcccgctccagcccaggccccggctccagccccggaggcagtcccggccccagccgcagcccccgtcccggcgccggcgcccgcctcggactcggcctccgggccgtcctcggactccggcccagaagccggctcgcagcgcctgctgttttctcacgacctggtgtcgggccgttaccgtggctccgtgcacttcgggctggtgcgcctcatccacggcgaggactcggactcggagggcgaggaggagggccgcgggagctcggggtgctccgaggccgggggcgcgggccacgaggagggccgggccagccccctgcgccgcggctacgtgcgcgtccagtggtacccggagggcgtcaagcagcatgtgaaggagaccaaggtgcggcgggcgggggctgggcggcgcgggcggcagggggtcggcggccgggccgaggccagggaaggacggcgtgcagggccctgcccggagcggtgccactgcagtggccgacgcgggaggacagccccagtggagggtacactccatgcaaagtcattgcagcagctctgggcgcacacgccagccaggcactgctggcccgggaccgggcgggccctgggcttcccgacttgaggggacttctaagacatgttatgctgtggtgtcggcctcgagatttagagacgtggaccgactcccgtggggactcaggttctggggcgcgttcggcgttacaccagtgcggcgttttgctgacccccaaggagctcggtactgcattgtgcatccagaaatgaaggccgtgccgggtccgtgcagggaggggttgtgggcattccaaaacaaagatagaggtgaaaatcccagccgaacccaagaagttcactagcttacaggctgcattatggtgaagccacccagcctctttttgttttaccctgctgcctccttttaattgctgcagggaactttgtgagtaaaatcattagcaatcagagccccggtatgaatagtacttgggggggaggattctgacagctgcgaccgggattgatgactcctaagtgcatatggactccttgaaaaaaataatccagaaccctgggtagaggggagtcaccaatttggaaacccgaaggttttttcttgacctgaagctgttaagcagacatctgactcccgtatggtttttggggtgatgctagtgagtatagcagttttacaaaacaaagaggcttgtcatcataaacccgaaaccttgaacccgggttggtttggtggcttgttttccagaatgtgaattcctatcagtaattgacacacacacacacacacacacacccccctgtatctcacaccccttctttctctcctacttcccctccccttcaagaaaacatttctaagcaggaatcaggcctacgctgttttaggtccttgggaggttgagaggtctgatttcaggggagggcactttggaagttgatctgggtttctcacacagtgggagacaaagactacagaggaacggggtttcatgtcaaactacaaagcggggtctgtgacaacggcttgagaaggaaaaaggccccactccagagaagagcacatgatccatttcctagaggcagaagtgactgctgataccagcggggtctttttgttggggatgcacatacatccacagacacaaatccacacacaggaccctgcttcccctcagagaaatgtgaatcaggcaacagctctgagacttggaaggaaaattat

SEQ ID NO: 1243597 - DNA, 4001 bp, Homo sapiens
ctagagaacctcaaaggaaagagacctaacagtcttggggaatcaaaaaaagacttcctgaaagaaatgctgtctaaaatgagaccttctatggatacttgaggtcacaggttttccttcagcagatcagggaaatcttcatactgggaaaatcaccataataatgactgatatgaaattggaactctctcaataccaagtctactgaacatgttctctcatgtcacttatttgcttaagaacctgagtggaggccagggcagtggctcacacctgtaggcccagcctttgggaggccaaggtgggaggactgtttgaggccaggagctcaagatcagcctgggcaataaagtgagacctcatctctacaaaaaagcagccaagcatgttggttgtgcgcctgtagtccccactactggagaggctaaaacaggaggattgcttgagcctgggagttcgaggctgcagtgagctagatcaggccactgcactccagcctgggtgacatagcaagatcctgtctcttaaaaataaaaaagaaagaaaataacctgcatggttcgctgcccacacaccttaatacaccttttttttttcttttgagacggagtcttgttctgtcccccacgctgaagtgcagtggcacaatcttggctcactgcaacttcagcctcccggttcaagtgattctcatgcctcagcctcccgagtagctgggactacaggggcctgccagtatgcctggttaatttttatatttttagtagagacaaggtttcatcatgttggtcaggctacttgggaggctgagacaggagaatcacttgaacccaggaggcggaggttgcagagctgagatcatgccactgcacttcagcctgatgacagcgagagattctgtctcaaaaaaaaaaagaaagaaagaaagaaaagaaaagaaagaaaagcctttctcataatgcccacctttggtgttattatcctcctcttccatcttcacaatgtacctcacttgcgctcatgttgtacctagtcctcatcacagcactgataaatatgctctctgctgtactactgtaacccgtctatctcacctgaactccttcaggaacatctttttcagtccctaaaacccgaagctaattccttccttggggcctttgcacctgctattctacctgcctgaatactccctctgccccccagcaccactagataattgcaaagactcaccccctcacttcgtttaggtctctactgaaataacttacccttcatctagacaagcatcccatcactctctttccctttacttggtttttgtttattacttattatacctagcacacacagttgtcttcaataaacattccacgtatataaaggcactgtgttgttcaccggttatccttacagcctggaataatatctagcatatgttatgtctagataagcaattgctgataaatactcattaaatgaataacaaaatgaattaaactaaagctcatctgaattcattatggctgagaaaaaaggggcaggagagcatttcggcctgagcacaaagaaactgggggcttcctgggaagagatcgttttggtacctgtcccccgccctcagggaaaagcactgtgtcttccagcaccacttggaaaccgctcagcacttctttcttgccgttgctcccttcagtctgcagctccgcgggacagcaggagaccacggtggtggtgaactgaacagagaggaatgagagaataagccccgaccccagccctagccctagccctctccacaccaggacagaatgccatgttggcactccctacacgtggcgccctcttccccaaaccgccttgccggcccggcagtctcaagtgcctcgccgtgacgccgtacctctcgggcataactgtcacgctgacaccagaacgccatacctgcaggcgtgtgaggaggcgcacgcgcagagaagcctgggagcgaacggagagcgacgtgggacaaacgtcatcaagggcgcttgtctgcgcagaagcaggagggtaaggaatggaatgcggtttggataaatttactgaaaacgcgaattgcatatttgctgggttgtttaacgactgttctaaggctttacaaaggacaagaccaggaggaaaaaaacaaacaaacaaaaacaaaaaaacgcgacctggacaaggcacgtggtttagtgagccccttggggccccagggatgtaagtattctggctgcggaatcccagcgcatagaggcggggacgggactggcatggttactgagcagcactgcccagtagaaatagaaagcaaggagctgggggaggtggctcacgcctgtaatcccagcattttgggaggtcgaggcgggtggatcacctcaggccaggagttcgagaccagcctggccaacatagcgaaactccgtctctactaaaaatacaaaaattagccgggcgtggtggcgggcgcctgtaatcccagctacccgggaggctgaggcaggagaatcgctggaacccgggaggcggggttgcagtgagcagagattgcaccactgcactccagcctgggcgacagagcgagactccgtctcaattaaaaaaaaaaaaaaaaaaaaaaaaaaaggccgagcgcggtgactcacgcctgtaatcccagcactttgggaggccgaggcgggcggatcacgaggtcaggatatcgagaccatcctgactaacgcggtgaaatcccgtctctactaaaaatacaaaaaattagccgggcgtggtggcggacgcctgtagtcccagctactccggaggctgaggcaggagaatggcgtgaacctgggaggcggagcttgcagtgagccgagatcgcaccattgcactccagcctgggcgacagagcgagactccgtctcaaaaaaaaaaaaaaaaaaaaaaaagaagaacaatttggccagcgtggccaacatggtgaaaccctgtttctactaaaaacacaaaaacattagccaggcgtggtggcacacgcctatataatcccagctacacgggaggctgaggcaggagaatcactttaacccgagaggaggaggttgcagtgagccgaaatcgtaccactgcactccagcctgggtaacccagcgagactacgtctcaagaaaattacattacattacattaaaatagtttgggccagacacagtggctcacatctgtaatcccagcagtttgggaggccgaggtgcctggatcagctgaggccagaagttcgataccagcctggccaacatggcaaaaccctgtgtctactaaaaatacaaaaattagctcggtgtggtggcgggcacctacaggctgggattacatcccagcttctaaggaggctgaagcaggagaatcgcttgaacctggcaggcggaggttgccgtgaactgagatcgcgatactgcactccagcctggctgacaaagcgagacttcgtctcaaaaaaaaaaaaaaaaaaaaaaaaaaaaaaagcaaattaaaccaggtgctaatttttatcttgtcaaatatctgaaacgatttagagaatggaacactctcattgttcgtaggagtgagaattggtacaatttcatcaaagagcaacttggtaacagctatcaaaatgtttaaatgtattttatctactccttgacctagcaattctacttctagaaatgtaccctacagatatcctggcaaaaatatgtaaagatccacatttttaaatgttgattgcaatattgtttgcaaatggtaaaagactgccggacgcggtggctcatgcctgtaatcccggcactttgggaggccgaggcaggtggatcacctgaggtcaggagttctagaccagcctggccaacgtggtaaaaccccgtctctactaaaaatacaaaaattagctgggcctggtggcaggcgcctgtaatcccagctactaggggagccgaggcaagagaatcgct

SEQ ID NO: 1243598 - DNA, 4001 bp, Homo sapiens
cttctctgtcactccactgtagggtgagccattagtccgaacataaggagtatagcaacttaatcactctgggctttagattccttatgaagtgaaatgaagtaacctctaagaccctttctaataccaaatcaatggtctctcctaagataacagataggggtgcctgaccaacatggacaaaccccgtctctactaaaaatacaaaattagccgggcgtggtggtgcatgcctgtaatcccagctactcgggaggctgaggcaggagcctcgcttgaactccagaggtggaggttgcggtgagccgagatggcgccatcacactccagcctgggcaacaagagccaaactctgtctcaaaaaaaagatccgcagactactcttgcaaagatcatgggggatgaccggaggattttaaccctgaaaaaattagggaagagaagagttccattcaaaaatgtctactcaccagacgatcctggcagagtctgctcccaatggtcttcattccatgcttttctagaggtggttttgccgcaataccttttgtccgtgtccaagagggaggctgatgccagttttctaatgctacccactactaggaaatcaccttccccatcttccccttcatcaaacctgtcaatcaccctggcagcagtggctgtcgggggagagggaaaagtaaacagaatctccaggttagcagaaactttaacgggaaccctggtcgacccatttatctcatagttgaacgtcctttacgaaatccccaccaacttccaggaataggaaattcactctctcccaaagtagaacactgtcttactgctgtttctaaacagaaagttgactcctggcatctactagtgggatctatttctatgacttggatcctatcaaactagttgaattcctcttcaatgtgtgacagtcgctccaatatcttaaatcagtcatcacgttctcccctcactctgtcccattctttggggagttttctttgcttattctggctaaacagtcccgagtttcttcaactgatcttcctaagatacggttcagcactcgcatttatccctccttattatccctttctcacacttccgactcaagtctaaagcgggattactcccagctagactctgaacatcagcttacagaacaggagtctcagtcgtcagccactgaacaagtgtcttgagacttcaagagacttaaacagcaccagaaaatccttccatcagtctccaacttagttttgaagggcaacctgaattaaaaacatgcgactttcttctcctcctttctaacgcaataccagaaagggcatcctcaaagctaacttccaacttgctagcagactctctggctccctccaacaggcctggagcaagtaaacctgaagaccagctcctctcggcctgagccctcgatctgttccgcccatccagccgagcaccaagtttcgagtgcgtgtgaaaagaagccgaagccctcctcccgaggccgggaccaccctcgcgggaggcgacgttcctctgcgccaagcgaaggagcgcaggcccggcggcctcgcgcacgcccctcccacgccgcccccttgccccacagggcctggcccaccgctccgcacgtggcctgccccagtccggcctcaccttcctcggggtccgcttcagggtccgcctcgcttggtcgcgggttcaacaactgttccagttgcagcgccaggggctgcggccccgccatcgtcaccagctcccggtccactccgcttcgcgcacgtaaatgtgcggcccaacccccggccccgaagctccttccctgccggatcctctcgccttgatccgattccccgactccgccagagaccgcgcggaggccaccccacagctctggaccggccacttccgggaggcgcgcgggagggggcggggcctgcgcgtcactgcgggcgttgctagcatgaaggcggaagcgcgcagaaggttgaagggattggagccgtatgggcgcgtgtgcgcgtgcgcgtgcgagtgcgcgggaaggggcggtgcggaagcgcgccaaggcacgtgaccgcttctgtcgctgagatgcgattgcgatgcgcgcggccagtgtccccttgtacaaaatatgcctcgagatttgtgcgagattcgcttaggaataaagcatagcgtagccgtggcccacggtggctgatttgggaaggaggagggagtagggcttaagctgctcgaatcgcgggtgcgcactcgggcacgcagagactgggacccaaagcaggtttgtcatttcgcaatttatagtagtctgaggccgggcacacgcctcccgcccttcagcggccaggatttgggaatcctatgtcagggatatgcacgtgtaagtgtgtggcggactgctggcgtctttcttaatgggaatacttaggaatcgctgtggctaaagatagtttcagtagcgtctctaagtacccttgcctgagcaagggaaagggggtggggtgtggattactccactgcatacccctcggtattgattatctttgctgttcagagatgagggcatgctcaggcagcttaagcaggtgcacaaatgcagaaaaatacaggtctaccgttagagggacagactcaaaatataaagacttaatagtataaatgtaattgcaccccgcacacggaaagacacaatcgctttacatcctctttccttcatcaagcattccctgactgcccactatgtggcaggcactgctagataagatacaagataagtaagttggattctcccccccacggtaatcagcctaggagggtagacaaacatgtaaacagaaactgcaataagggatgataagtgtgactacaaagtggtctattcttatggtatctgttggaggttgcctgtagagacctagacccctctaaacagaatctgcctcaaaaggatccagaaaagagatgttagtggtgcactgtggcagtgccccttgggtacagcccgggccagttggatcccacagctgaacaactggggaaccctcagctctctactgtctcccatgaaaaccaagggaagagaggatctctgactttcacaatcttcatatgtcctcagggccaagagcaataagaggacaccactttagtggagcctgttccatgtccctgtaaagtggcccttgaagaatgaagacaaccagggctgcagaggggaaggagaacctgtctgagggtaaaccccctcagacatggaaggaaaagaatgccaggctaggcagggcactcaggagaagaaaacggctttttaccatccataagagagcttagcctaagagaacagtttttcgtttatcctctataattgcagtcttgtgcctgtgtccgggcctcccaagcaaaagtgtgttccttgctccttgacaaggtgccatggggcttcaaaggacaaaaatgtttctcccaccccacatttaagaaactacctcctgcaatcctatccccttgctatgttgggtacttacaatgcttagaaacctggcctttgaggtaaagagaaggaagaaaagagaaagggaggtgagtcactgcagagaccacctctaagctgtcatgcaaacaggacactgctggtcaatttgggggctgtgctgggcaaacactcagcagaaaatgccatagacctgtttacttactctcccttctctgtcctggtccctactgacttgggaagccattttagcaaggaatcaagaccgttctactgtcacacacatcccagggccccccaaaatgtttgcctgaccttatactgaaggtagaaagaggactccaggagtggagggaagaggaagtaattctaggaattaagatgcaactgagagtagttgaggcaagggacaggggagcaaattctcaaatactccctctgggggcctctccctacctgcattccagtgtcttgagatggtgggggaagggcttattga

SEQ ID NO: 1243599 - DNA, 4001 bp, Homo sapiens
ctctgtcccagcaccaccactccagcacagacagccaagtgctcaccaagcactgagcccacccgggcctgccacaggtactgtcggcccatgtcatagatgggaaaaccgaggttcacagaggcaaggccaggcagagggactgcagcacaggacagccaggcttggaaggctgggctaagtttagcgggagggcaggagacccctctctcctccctaaccctctcatgggggctggtgcagagcctagacccagccccttaatccgaaggagggtctccttcctcaccagcaccagcaccttgggcagcccctcctggtaggtgggccccagagcccagcaggtgcctgcagctctggcccagcatcttgcagaggagagacgccccttgcctccaacaacttcttttcctctaagtcattaaacggacacattagaattattcagatcacagctgtttacccagagaagggcagagccggtgctgctcgaaggcgggggaaagggcctctcatggccaaggacaaggctgggccccgaggcagggtatgggccgagggtcctctctgttctgggggcagaaaggaccaagcaccgtgggccacgcctggcatggagatgtgatgaggacctgccccaagcctcctccaccccctgcccttgggccggggagacattacagctgttgccgtggctgttgggctctgagccttcacctgcccaccccacagggacttccgagccccaggggtcactacaggaagtcatttctgagcaagtgacacccacagccctaagcccagcagacagacctcccaccagctcccttcctccagggagcaaatgccttcagaccgagatctgccccggggacccccgtgcctccctgccaggctgcgtgcactgggccctgctccagggaaggagacacaggagatcacgtcacatgcaaacaggctttgtttgggctggctcagcctggtgccagagccccagtgacgtgtgggtgggacttggccctggggccatggatggcacagggcagggggattatctcccactcaggccaagcaggggccggatctggagaagcagaggttttagaaagcccactgcttcctggtgacagatggggcttccagctgtccccagccccctctgcctatcccagctgtccaccacagccaggaggccaggcagccatgggtaatctcgccctgcccggtgcactggccatacggggtaagaggcctggcctcaggtcccctgcagccagcttgacagcgtcacctcgggcccccactgtcaggggatctgggcacccaccaaggcccctctcttctgagcctctgcccactgggctctgtaatgtggactggcccctgctccccccacatcccccgccggctgctggtggctgggcagggctctgagaatcgctcccagcctgggaagaagcctcccacgccagggccccggacccaggagaggccatggaaagcctgaaccccagctggctgacaccccccacacccccaagggcccttagtctgagaccaactctcctggacaccaggggcccacgcaggccctccgtgccccagttacctgtgccctggaggcagccacggagtcacgaccacgcgggggacgccagcccacaggcggaggccggtttgtgctggggcccagggcctgcccctccgagatctggggccgccagggggtccggctgcttctgctgctgggctcggggcggggaaagggttaatttccatgcaaaccgggagccgtggggcccaggggcatcacgtccgcagcggagggaggcagcggcgcgcaggccgggccgccagggactcaccggggtcgaagtgcgagctgaaggcgaagctggggttgaagaaggacgacgacatggccgggccagcggccggcgggcatcccgggagggcgctgcgctcaggacgcccgcggccccggcccgagccgccgcatcacccagcggccgccgcaggtgcggagcgcgccggcccccgcgccccgcgccccccgccgcagccgcagagcccgcaccggtgggggcggcggcgacagacgaggcgctccgcccggccctggcgccgcggggctccgctggtgcagtccgaaaacgcgggcgggagcgcgcgcggagcggcgcgggggaggggggggccctccgcggccggggtggcatggggggagcacggagagggggacacggagggggagacagaggggagcacggagtgggggacacagaagggggcttggaggggggacacggaggggaggcatggaggaggggggacggggggccgtgcacggagcggggatggcacggagtggggggatggtccggagcgggaagcacggcggcctggggctgaggggggcacggaggctggcgggggggggggaaacggaagtcgtgaatggtaagtcgtgagtgggtacggagggaacgccggggtgggggagggggtactcctaggtggaaaggttcagggagacaggtgggggaacccgggagcacacccagggcgggtcttggtgctcaggggccctcgcctcacttgcaggtttcgaggcggctggcagccgcccccccaccccatgccctttgggtggcacctgtgctggtggagtgggggtggctggctttgcacacaggcctgctcctgtaccgtgctgcgacagccatgaaggaagaacctggctgagtctccacctgccgtggactgtaccaggtgcttagggcagcaggttggcctgggcgctgaggggccatcccttcccctatgtttctcccaggatcccccatccccgcccaaagtgccaccttgcagggttggggcggggcagggtccccccagcctgcccccgtgggagtcgggagagttaaagttcagtggaagctggtcccagtggctcatgcctgtaatcccagcactttgggaggccagggcaggcgggtggcttgtgctcaggggttccagaccagcctgggcaacatagcaagacactttctctacaaaaattagaaaaatgagccaggcatggtggcgctcacctgtagtctcagctacttgggaggctgaggtgggaggatcacttgagcctgggagttagaggccgcagtgagccaagatggcaccactgcactccagcccgggtgacaacaagatcttgtctcaaaaaaagtgtcctggagacttgcagttgagtttgatgcaccctcatccactcattcattcactcactcattcattcactcactcattcattcactcactcattctgggaccagatggctaagccccttggcaaggcccagttggggttgggggctgtggagcaggtgagaggcgcccactccaacagggctcttaggactttagggagagaaaggagcctgttcccggcagagggacctgcagagaccaggacaggatgcttgggccacggggcagatgggcaccaggacccacccttcttttcctaagggggtccctcatgtaggaagtttcctcctaacaggcaaagcaaggggcctccaccctgtgccctcagaccttaggggtccctggctgtaggagacaagacaccaactgcacctggggcagaaggagacagggcacccagagccttcttcctggccctgatcatgtggccagccaaggttctaaggggcgctgccgccaggctgccgttgcaggtaaagaagccgcgtgggtagagtggctgaagggggccttgcccgcaggaggcactcagaggccttgggccacctcgttcagtctgtgtcttcagggagcccagagggctgggaggatcagtgcccacccagtggcagggatggttggtgccagcaggctgtgatcctggagtgctccagtgtgagggacagagggtatggcataccctcatgagtctccactctgggtcccctgtcagggcctcccctccccagctcagg

SEQ ID NO: 1243600 - DNA, 4001 bp, Homo sapiens
taggacaggcgttgaggccttggctccaaagctgggggctgggggccctctctaggtcccagaccagtgccttgggcctctcagcccacgatgaaggctaggctctcagggcccagccaggcacagttcatagccagctctcagggtccagccaggcacggctcagagcaggtgaggtggcctgcatggcaccgcagtaacaggccctggtgccaacagagccccaacagggctggcaggggcccctcccactggcctgatacccctcctgcctctgtgttcccagaggagctgggggtgggcagtgatgggggaagcctcaggctggaagcttcctgggagggggcttgagatctgatagctctggagggacccgcacccaccacctaggctccaagacagaactgggaggtcctgaagcctggccattcacccccaaactccccagcacgtccgccccatgtgagtggtcggcctaggaccctaggatgggggcagatgaggctgtggctgaggccctgcctgcacctgcactcctgggtcagccccacccctcggcccctcctcgcagcctgagtgaaaggctaattcaccacccgcccacacgggccccaccagcgcccctcctcctgccatgcacaatggaacccgtgtccctgaagggctggcgctcaagggggcaggaatctggggtcaagcatccctggactgcagaagagcccctgcccccagcacatggccatgtccaggaccagagagcccgcacccctgccccagtgcccacccctgccccgtgcccacccctgtccctgtgcatagcagccccttgggcaggggaggctggaggccgagggctgtcctggaccctgccaacccctggccggcccccaggcccaggagaaagaggtacatgcacctttggccccacagtgcggcctgtgacgcagccacagggagtccagggctgcacactgcgtctaccccacaggccactcccagccctgtgctgcccccactccagagctgagtcttccggtctccccagatcacacccaacgcccagcacctgggccccggagggaggccaccccatctccccacccagccctcacctgagcgcccaggctgcttggccatgggcaaggagacctccgtgagtggcaggacgtacacgtcgggcccgttctgtgctgccgtggccggggagccctgcgccaggtcggctgcgtactcgtccccctccgcattctcaaactcctgcgggccgggccgggcatgagcggggcttctcgcaggtcaaggaagggtgtggctgggcctggaaaggcccctttcttccagggccgagctcccagggcagggcaggagggggtgctcggcccagagttggagccaccgcccctgcaggccaatggcccagcacccctgctaactgcccttccatctgtctcctcttgctgacccccacgcccccgaccagaggctcagttgttccatgaggggccagaggcagatcccagagccaagaggacccatctcagactccagaaagggcgcgatgagctgtaggcaccagcgcctcagcctggcctcagttcccccatccctccctggcgggcagcccaggctgagccccaccttggggcctgagggtctagaggcagggaaccaagggacagaggtgagggcactcaggccagctggccctgcccatccagaatcagcccccagcacctctcagccacccacatcccgagcagcccctcaccccgggctgtgcctggggtcccaccctcccatggcgcagcttcggggacaggaattccatcaccccctgccccacagtcctgtgggagaagcaattaagtgcccccacccctgccgggacaaggagcattcctggatgtctgggagcccagagccaaccggccacctttaccctgggcagcccacctgccaccgccatctgccccagcagccttggaccttcacctggtggccacaccacctccggagctcccagaactccttaagagcctggccccgtgcagcctagggctgggccactccctgccaggctgctattttgaaatgtagaggctgcacctgtataggggataccccacccccaagtccagggcacattcctgcgctgagagccaaagtctccaaagtcctgggcccagctgaaagcaattgctccaggcacacaatgacagccccaatccctgagcacttggtacagcctttctgtccttcctcacaacccccagtgccctggtggggaagctgaggctcagaggagtcaagggacttccagctggatgctggccagcacccgggctggtgagtccgaggacaggcaggtgcagtgggaggggaggcctgggctcctcaagtacgacgtgtgaccctggggacgcctcccttccctgggctgcaaagagaggggcaggtggctctgtcggtattcccgcaggccaggcccagcctgccctttcggagcacacagccactcagggatgggggacgcaggtgctgcgtgggcaacttcccctccccgggacccagaagaccaccccagaagccccctcttgggccctccaatcccagccccggcctggccccacccatctgggctttgtagaggggcccaggacacagatgctgtctctccctggggtcgggcccgggctccaggcattacctgctgcccgggggccagccgggtcctgccgatacagcgtgcaatcaggtagcacagggtcagcattgggggcctgcccagccccttccctcagcacagctccccaccagggagcccagcgcaggtccccaaatcccaggagggagcccagtgtggaggcaggacttcccaggggcacactggtgctggaatgttccgggcaccatgttcccaaggaggtgaggagggcgcaggaggaggagctatggccagcccttgtttggggccttgttcttacagtgccccaaggaggggccacttatacaatagccccactcgtcccacccaggccccacctccactcctgctcccgccaagaccttgaggctctggcctcgggatccccaggaaggcgcctgcgcggcctggcctggcccctggtgccagcgggtcaggggtacatcccagagcagggtgggggctctgggcaggagtgcagaccccacagcctggggccacagctttgccccccaggcacgcagctcctcactggttgatggggcctgtggccacttcagagggctctggaaggttgaatgggctggaaaatgtggcctttagaaaaggcaaaaaggccacatccagcaccgtcacctgccaggccagcgggacaggtgggcagagccagctccttggcccattctgcgtcatgacataccaggggcagggaggactctgggactgtctcccaaatgggggtggcgccagctgagtcatgggtcacttagtaggaaggcaccctgagatacagacagggtgctgtgcgcgctgcagaatgcctcctcccaccctcctccctccctgacttctcctggcgtaggaatctgacctctggcccaggggtggggctgacccccgtgggcgtgtgaaccaccagaggtccaggccagggtgtcatttgctcatcagcaggaatgggacccatggagactctgggagggggaggcgatgctggccggggttccttctgcctggccctccctgctgctcagagttacagctggaggtgggctgggggtttgcagggggaggagcagtgcttggcacctgtccttggccaggggccttggcctccagaggggcagcctagtgaggccaggcctcacccttggcggggctccctaaccagcaggctgggctctagcatcacacatcgtcccctccagaaggcagaagataccccgcgcaaggtgactccaactggcaagaaggtccctgtgccgggaagcttgtctgggcagcccggactcccctt

SEQ ID NO: 1243601 - DNA, 4001 bp, Homo sapiens
tatcatgaatttggatgaaacgtaataataaaacctaaaaaacatcttgttttagcggaaaatactgggttgcaaaaacctgaaacttagattgggttaactcacaacttaaagctcaaaaatcaaagtttgaacataaaagaagggccacctcaacagttgccagtttagtcttagaaggcagatccaggttctatgcttatatcattatttagtttagttgatagataccccttgatcagtcccaattgttaactgagaaacctaattagcatccatctcttggtctcaaattatcaaagggataaattttgatagtgtgagatagctcttttattggcaaatgtgtaactctgcaaaggtatatatgtagacacggtgaaaaaattacttctgattagtgtactgatactgtatttatttgagaatcttgcacacacatcacgtaacaacagggatatgttctgggaaatgcatcattaggcaattttgtcactgtgctaaggcaatagcctattacacatctaggctatatgatacagcctgttggtcctaggctacaaacctggacagcatgctactatacttaatactgtaggcaactgtaacacaatagtaaatatttgtgtacatagaaaaggtacaagaaaaatacagtattatattttatcatcttactatgtggcccatttttgaccaaaatgttgttatgcaacacattactatatttatgcaagtgtggctgcaagccttataaccaggaagttttgtgtattttgcctatttttacgatgcttgaaggccaggtacagtggttcacacctgtaattccgacactttgggaggccaaggcaggaggatcccttaagcccaggagtttgagaccagcctgggcaacatggcaaaaccccatctctacaaaaaatacgaaaattagctgagtgcagtggtgcatgcctgtagtaccagctactcaggaggctgaggtgggaggatcacctgagcctgggagcttgaggctgcagtgagccgggattgtgccactgtactccagcctaggcagcaaagtgagaccctatctcaaaaacgaaagaaacaccaaatgatgcttgaaattcttgagaacttgattttttaatttaaaacggtaatttaatttgcaagagttgtttaggcacttgggaagaatctgttcattaagtttaaaatattgcctaagtgtttgtatgaatcaattcattcaaaaattctaaggaaagtgataaatatgtaagtagtgttaaatatctgagagtaactgaacctgttatatgtgataatgtgtaagttaaagtgattgctttctatttacaaaaaaatacattcaagacaaaaagatctataaacatacctagtttatgtttaaaatctgaatgtaaattaaaacaaagtaattgtcaatgttccttctgcacttgaaaactagcctcagatacttaaaaaaaattactaacaattttagtgccaggtttttgcatcatttttaatatgagctactcattattcaattatcagcactaaataacaaagaattcacttcagtatacaaaatgacttgtcttaaattttcaactcttaaagcttattattaatataatcatatttatttttcttaaagagcagcattgagaattgcttacatatattataaataaaaaataattaaacttttacctgataagaatagctgatataaaaattattcatctgagaataaattctttcattttaggaaataagctatttcaggaaagaaaataaaaaatcaatgttagcaaattaaaaatacattaaggataaacatttctatttctcaaaaattaatgcctatttacatgttacacaaaaatacagtatggtattttaacaaactcagggcacaattagaatgaagttttgagtaactaacagaacaacaataaaaacaataataacaacacttatcctaagtaaaattaattgtgctcctataaaacgttgttagtactactagcaaaggatttgtcatattatagttagttatataaaataatagctagttatataagttatataagtaatatattatatatattttatgtaagttatataagtatctatcttacagatctccacgatcttacagggccaaaactgatagtcatccgagttctctccaaagaatccatttctggaaacataatcacttaaaatatttgttaaattacattactctaaaaatgttttaatgattaaaaccaaaatactgacctaagataatttgtgcaaatttaaaagaaaaaaattattttaaagaaaacccactgtctttactgaaaacaaactagaaaaaaaaattaagagcccacaaaagtaagatgtaaagtacactcatcatgttttttcttgccttattagtcagtaaacactcactcagtaaagctcagcttttactttcctttgaaaatttgaccatgaatgggaaatataaggttggtgatgttgcttttgcctaatatgtatatttatttatttatctgtactgacatagaaaaaagttttgagatcagtaatttaagacattttaaaattagtatgttcataaacatgaactgtacactgtaaataaatatatttcactttttgcctcctttgctttccagctcacttacccttgttttcctaagaattaagttatatttctcctgagtcagattttgttactgtgaaaaagggaacataatttaatttaacaaccaaaatatattctgagtatataaaaactaaaaaaaaatttgaatgtcttttaaaattgtttacaagagcatgtattcatatacattaaaagcaaagtaactaaatgaacaaaataaataacatgattgtgactactcaactttcactttgcaggaaaaaaaatttactttgcaccaattacacattcacaaatgtaaagtgaaagttaccaaatctacgtgcaaaagcaggtaattttcttcattagtcatgctctatcttcagatgacataactttcttaggatggtcaggttctaaaaaaaactatgctttttcgtgactgccttagtaaactatagatataattttgttgcttttactaaacttaagtattcaaggttacacataattacaaaagcacatcccaaaaaagaggtccctgggtatttatgtgaacattatatatactttaggaaagtgtatagcaactgcccccagcaatgggggaaaatatcagccacgtactttgtaccgagaaagaacacttttaaatccactgctagagcctaaaatcacagatgtcttattacacaataaagctaaaagttcattaaattttgcctacattaaagaatgaataatgccactgaaaggttttgcttatttaaagtaattcagtaccaaatccttctgtcattgctgttgttgttgtctaatacaataatcacactctcaatatatttgttttatgaagttaatactttcatttggttgaaatgtaatgtcaactagcattatttacactattttataccttgagccaatacatgggttgtacaaggaagtatttctaagaaaatattagccatgcctttaactctatcaaaaatgaaattctggttcttattaaaaagaaataggcgcactgcacttacaattcttaatttaacccttgaaagagtttattcatatcctaccatgttccaaagtcaatgaggtaagttactaaataaatctacacactgatctacttacaattttatagaagagattcactaaagtttaccaataaaaacaaatacccaataaaatattttattcaagaacaaaattaaatgtgccctttgcaaggaagatgacaaaaaatttatatgttccaagagtgatgaaggaaaaggtatggcttaattctaccacctccatagataactgtcattctagccacagagtcaaagaatcagactat

SEQ ID NO: 1243602 - DNA, 4001 bp, Homo sapiens
aatttaccgaacatccctatatggattcaccataaaaatgcctttattcaattctgaattagaaatcatactttaattatacctaaatgtatactaccaaaaccatactgaattaaattctacggtcagttttagtagaaatgagctattatatcatcttgctgtttaattgttttaccagtttcagggaagatgaataatatgttttcatcctttgaaattattactagctggttacccaagttcttcctttcttttacccttatcaaaagtaatgtatgctgtgggtacaaatctgtgtcataatattaatactcatgggcaactcaatctagagtccataaaatacgaggttgtgggatataaaactctggaatcaaagttattgtggaatgttagttcatgaaacttaggaaacacatgcctaaaagctgaaaatgaagcacagatgttagaaattaactaaatgtagaaattattattaaaatttttaacatttagaaagcattaagtaattcagttatttttctgtggctaacatggcaagcttttactttacaagcaaagaaaaataaaattataataaaaatatatttagcaaaataaatcatcacttcaagatagaatatatcaagcaaaataaactgcaaaaaagcataagaaagagttatttaacttacctgaacactactctttttggttctgcatttaattaagtaattcttcagtagaagtgttctggtctgtctccaaactcctacctccctaattgcagtggacatgttttctgaataaacctattaaagaggaaaaacaaacaaacaaacccggagccacgcagtaaactgcatgtaatttttaacggcaaaataagcagctgtttcagtcccaggtaagatggattaagcatactccaagctgtctctcttaggaaactggacagaatgcatggagcagcaatctgtcagctctgaaaagtaaacaaggcatgtgaaatagggtagaccagaatttgaaataccaccatatcaacagtggtactttttctcctttggtatctcccgaaccgcccacagaggcagctccagaagaagccttagctttgaattgaggaatgggcaagggaagtcttaatgctcagggagaatgtagaaatagcaaatctttttttcttttctgaattctcctgtatccccacatgcaagcaatcccatggtaacagggccagactacagtaacaaaagcctagtgcagccaacactctgaggcaggaaaacctttctctctattcaatggaactatcgttgtaagaggatgaggccaatcccttttgcttttcttctctacctcctaccattgggccctggatatggtggttgcagctgcacaagtgtgtaacacaatggagaaaataaacactagctctctggctggaggatagaaacagcagccacagggaagcaaaaagtagaagggggaacaaatagaaagagagctcaggaaagcactctaaaaagttgtttttaattcctgtaataattcccaagctggacatacataaatccaatcctattagtgtgacaaaggcttgagaaactgaactaacagacagaccactgtccaaatccagactgttcactgcaaggcacacacaagacagaccaaaaaggtactgcaaaagtttttgaaaaataaactaaaatgacaactacagttcaaagaatgtgggtagaaacttatgacctgaacctaacctggttgacagcctgctaagagaaaatatcaacattttctgtaggtattaacacaaaacccaaagtctcatacaatccaatattacactgcaaatgaagcatgtagaaaatagctgaccgggtgcggtggctcacgcctgtaatcccagcactttgggaggccaaggtgggcagatcacgaagtcaggagtttgagaccagcctgaccaacatggtgaaaccctgtctctactaaaaatataaaaattagctgggtgtggtggcacacacctgtaatcccagctactcaggaggctgaggcaggagatctgcttgaacccgggaggcggaggttgcagtgagccaagattgcaccgcttcacaccagcctgggtgacagagcaaggatccgcctcaaaaaaaaaaaaaaatagcaactctactaagaaaataaaatcaaagataccaatgctgaaataacacagactttgaaattatctgataaaacttttaaagcagctatttaagggcttcagcaaacaatcgaaagtactcttgaaagcaatgaaaaatagaaaatcttagcaaagaaacaagacattaagcagaatcaaatggaaattttagaacacaaaaacacaataagaaataaatacaaatggaaactttagaacagaaaaacacaataataaataaaactcatggagtggctcaaaatcagaatgaacacaacagaaaaaaagtcaggaaacttgaagattatcaataggcattatccaatctgaacaacagagagaaaaaagatttttaaaaaattaacagtgcttcagaaaactgtgagacagtctgggcacactggcttacgcccataatcccaacactttgggaggccaaggcagacagatcacctgaggtcaggagttcaagaccagcctggccaacatggtaaaaccccatctctactaaaaatacaaaaattagccaggtgtggtggtgggcgcctgtaatcccagctactggggaggcaaaagaatcgcttgaacccagtaggaggaggttgcagtgagcccagattgttccactgcaccccaacctgggtgacaaagtgaggccctgtctcaaagaaaaaaaaaaagaagaaaaaagaaaactataggacaataacaaaaagtctaactttcatattatcagatttataaaaggagaggagaaagagtattaatgctaaaaaaaaaaaaaaaaaattaaagacttaatggctgaaaacttccaatttagcaagggatataaacacataagtttcaagaaagttggtgaagcccagaaaacataaagaaaatccatgcctatacacattataattagactgctgaaaattaagacaacaaaaaatcttgaaagcagtcagagaacaatgatgtattacctacagagagtaacaatttgaatgagagcagacttctcataagaaactgcggagaaagtggaatacattactggcgggaaagcaaatggttcagatgctgagaaaaacagttttactatatgacctcacaattccactcctaggtatacacccaaaagaaatgaacataaggactcaattgagtacatgttcacacacgttcacagtagtgctattcagaatagcagaaaggtagaaacagcccaaatacttaccgacagataaatgaacaaactgtggcatatacatacaattattattcagccatagaaaggaatgaagtggctaggtgcagtggctcatgcctgtattcccagcactttgggaagccaaggcgggtggatcacttgaggtcaggggtttgagaccagcttggccaacatggcaaaaccccgtctctactaaaaaaaaatatacaaaaattagctgggcatggtggtacgttcctgtaactccagctactcaggaagccgaggcagaattgcttaaatctgggaggcagaggttgcagtgagctgagattgcaccactgcattccagcctgggcatcagagcaagactctgtctcaaaaaaaaaaaaaaaaaaaaaaaggaatgaagtactgctatatgctacaattaaaatgaacatacaaaacgttatgtcaagtgaaagtcagactaaaaatgtcaaatgttatatgattccctttataggaaacttccagaaaagataaatgtagggacagaatgccaactggtgattgtcagaggccagggagagtaaagaatgaggagaaactgcttacaaggtaaggagtttt

SEQ ID NO: 1243603 - DNA, 4001 bp, Homo sapiens
actgtggtcccagctacttgggaggctgaggtgggaggatcacttgagcctgcgaagtcaaggctgcagtgagccaagatcctgccactgcacttcatcctgggtgacagaatgagaccctgtctcaaaaaaaaaaaaatgctagttgtcaatataatttaacctaaattttatcacagtgtttcttgctgagggagaaaataacaatgcaatggtacacagaggacaagtcatccaataaattttcttatgcataataggtccttaaaagcttgcccttaaaactatttttaatccaactaatttacatactagaaaagttatgacttagtacaatatcataaaattcttttatgcaatcaccctctcaactaaactcaaggacagagattataaattgtattcatatcggtactcttggcacatagtatggtatctggaatgtaaaagacatgcaacaaaccagcctgggcaatatagcaagacttcgtctctgaaaaacaaataaaaaattacctgggcgcagtgacacacgcctgtagccccagctattcagcagggtccctagagtccagacgttcaaggctgcagtgaactttgatcgcaccactgcactctagcccgagacgctgtctctttaaaaataaaagacatgcaatacacatggaatgtactaataaatttgctcttatagtgaatgtaagatttccctacactaaatctgtttgaaaggaaatatactcaaacagcacatatgcaaagattaacgcctctttagtttgattttaacacaaatacccacaaagccctaactgccctaataatgttccctactatggagtcttccctaaaacacatacaatattgctctcccggcaaacacaaaatatactaaataaagcaccagaattagggtctggcagcccgggttggaatctcaactccatccttttactagctgagaccttaataagttacttaacctctttgaggcccattctccacacctgcccaactggaataaccccctccaatcctacagggttgctgtcagaatgaaaagagctaataccgagcctggcttaaagctgtagtccagcaaatactcctcttcccttagattccttcagaacgcccttgtagaaagtaaacgtggttattatcttcattattttcggacttatttatttaaaacgtaaatcgaagcctgaggagcccaggggaaaacctccttcagcttaatagctccagcctgcccagctttccgatccaattaagtatttccatgcctggagctcctattcgtgttttaggatcagggaatttccctcccaaactgtgtcatgagatctgcgcattttcttctcactgaaactccttttaacacgcaaggtaatgatccgcgcgtaacctcgcagggaagagcaagcgctcattacccagctgttcagacggaaatttacatcaatatttgttttccttctttccctgaggttgctgagggtggaacgacagcgtccaggcaaaggcagtgtcccgaagtcccacggccggacccggtcccaggggagcctcgcggagcccccgccgcagggccccgaccccctcacgtccgcatcctgggcgctcccaccgcatccccgaggctggcaacccgcgcttcccgggagctgagggaggtctgtttccctcagctcgccgcctctgcccgcttccgagcccgcttcaccccacacctcagacgccgaactccccttctctccccgccgtccctcgctggccagcccctcctcgtcccctcaactcccccagggacggctgtcccaggctagcctcaagcgccgccgccgcccgcgacgcccgcctcacctcagggcccgagccgcagagctgtcaggcctggacgcgctcagtctgttgactcagtgcgggtgacccagctgggatctgtgcgagggcgcggccgcgcgcacccgcgcgctcctggcgcaggcagagctggcggcgccgaagtcgcgccccgcctcctgcagagcgcacctgagggcggggctcctagaaagcgccgctccgcgtacgggcgcgcttcagacgctcggccccgcgcgtcccggcgcacgcaggcaagcagcgcgcccggaagaggagagcggctgagggtggggcgagcggtggcgcgccgctgcccagggcccctgagccactagagtcgggcctcgtggctcttccccagggcctcccacgcctgggttctgcggggatctcgccacgctctttctggaggcacgggcaaaaaccacggcctcgtgtctcagtggtaaacctgccgcctcttagcgggtgaccttggcccacggccctctcctcatctgcctcgcccagtcacgtctcctcttaagcatccttgccgtctgtctcctggcatttggatgggcctctctgaacgcgttttgagtcctctgcagccccgcttcctcccgccgcggcatctggagtgctgtggccccgtttccgtaactcttgcctcccctccccagcctcctcattggccctcacaccccgacctgggaggtcctcccactgagggtgcttgtagttcgcggagtgtcctcatcaaagactgggaatgcggcagatgctgaattttccaaacggcctgagacacatgacatctgtgagagactggatactgcacttactttgctaaaaatataatctagtgttttgagcttcattactcaaagtgacctaaatggggtcaaaagttattaacactaacattacgtattttcctctccacatttctgtatagtcacattcccttgcacaaagactttttttttattctgtcaatcctgtgtacatcatgttttttttttttacttgtctttgtgttatctgcttctcgaatttaaaccaggtctccccaacatgcactctgctttctaaattcttaggggaaaaacaaacaaacaaggaatcaagttttacttatggaatatgaattaaatagaaaattcaaagaggttcgtcagaatccttgatgattaaaacagcggtccccaaccttttgggcaccagggaccagtttcatggaagacagttttttctgggggagggaggatggtttggggatgattcaagcacattatatttactgtgcactttatttctactgttactacactgtaatatgtaatgaaataattatacaactcaccataatgtagaatcagtgggagccatgagcttgttttcttgcaactagacagtctcatctgggggtgatgggagacagtgacagatcatcaggcattagattctcataaggagcacgcaacctaaatccctcacatgcgcagttcacaatagggttctcgctcctatcacaatctaatgccactgctgatctgacaggaaacggagttcaggccctaatgccagccatggggggcccctgtaaatacagataaagctgcactcacttgccctccgctcacctcctgctgtgctgcttggttcctcgcaggccacagatcccggtagcagtctctggcctggggattggggacccctggattaaaagatctagcaatggggatgggggaaagggagataagtatattcaaaaaactacaccaggaaactaaagaaggcatgtaatgaaaactatccctgatatattctgtctcttttggaaacatctagaacattttagttacaaattctcaatggcctaggatttggggccaagtaaagaaatatacatgaaagataaacttggttaacatgttactgaaccatactttcaccccaacacttctcactagtagccttaacctgccttaacttcagaagtctactcatttctactactattctaggcatttatttcttacatttcttatccttgtaatgttctctgtcattcattctgtctgctcatgcttttactcttgtttctaaatgacatgaccaaaacccaattctccaaaaatctc

SEQ ID NO: 1243604 - DNA, 4001 bp, Homo sapiens
ctcatagatggcaattgaacaatgagaacacatggacacaggaaggggaacatcacactctggggcctgttgtgggatggggggaggggggagggatagcattaggagatatacctaatgctaaatggcgagttaatgggtgcagcacaccagcatggcacatgtatatgtatgtaactaacctgcacattgtgcacatgtaccctaaaacttaaagtataataataataaaaaaataaaaaataaaaaaataaacatttgctgtgttaagccactgagatttgggctagtcatctgtgattagcccacctgcttgatgcaaactgactttcagtggtgttagttgatcataattcttaaaaacaatttttgtgtagaaaattcatgtccttgaaaataaatccacaaaattaaaatgtctccatttcttctgacaacattttttttgtacttcttggctctaagtgtataacatttggtagtagctctagcagttgctgtaatttaccatataattaaatgttcacttaatctctttttatatgaggaattcttttagtctttaataattttatgttattcttcagtctctcaattcaacaaatacaactagagagaactggtaaaatcaataaatcccatctactaattaaaagagaacataagagaatcagtaggtaatgaaacactgtaagagtgctaaccgtggaaagagacaaatttttaaacataccaataagctctctcttttcatcctccatttcttaagaaaattcttgcacagaagtgctttggtttgctgatacacgcttttctgtttcatattcatttagcctattcgctgaaggagaaagtaatcatggtggaacacaacctagaaaaaaataagtgtaataagaaaaaccttgatcatagtgttgaggaaaatatttactacctttaaaaagtgtaaacatgaatttaaaatattatttcaataatttatgactgtaaaatttcacctcaaatatttcaccttaagctttttaggggagtgggtgatggtgggaaggcagagtgattattatcacaattttgcaataacttggagtactgaaatggaaaagctgtaattcaacttcagaacctataatttcacatttttggccttgtatgagagaactttaagtacatgaatagagtgattaaattaatttcatcctgttaatagccatttcttgttctttacattgaaacagaaatctcagagctaatcaaattaacatcaaaagtctgattacttaaatttgtctgaataataaattacatccactagatacaacctcaataaagtgttttcttgtaattttaccttcagattgaatcaacttttatgaaaagagataggttgtaaatcataatccaggctcaaactacttgaaacttgattctgagatacaggaagaataaagcaatttctctcaattttctgaattcagaagtccctgaataactaatgaaactacaaaattagctttaaaagaagcaaaaataaatcacacgggaaagtaattttgcccaaagatttgcaaatcaagaaacacaatttttttcgtttctgtaacctcaaaatgaaattctttcatatttttacatcaaaatattcagataattctccctcagctagcacagaagcaaattttttccatttttctatgtcttactgttacaatctacacaataaaaagtggttgggaaaaagcagaaaaatttagtcttaggtctttaacataaaacacataagaattgggaaacatctgaaaaatagattgattttagcagtgtccacccacatatttggcacagcacaacaaaatagagctttacttactgtcaggaaaataataaaaagcactctagaaacactgtcaaaaccagttctctgtttgtctaggtaacgattacaacttctttattgctgcttcttcattttttctttaaatgggtgcctactccagcagctcttacacagcctggtttctgaaaaggggtgtagccagaccaagctgtacatgatgaacttgttttgttttctgtgtctctttctccctaagccaattattctgcaaggaaatgactgttccgtggttggttgggaataaaataaactctgtgtttgttcacttagcctttcaactacagggataagggggaaaacggtaaacaaggaaaatggaactagttcttcagaaatgatgagaccaagatggaggcaggaacaagaaagagtaaaaacaataactaaccaaacaaagcagttaaatttgtataagaaatctgtatctattttcttttcactactgatgaataaacacaactgccagttagttgtatatttaactaattcagactaagttagcagagtattctggagctgattttttttcctaataaagctaagcaatccatagtacgccttggagaaactcctaggacagacaaatgaagaatttttaacaaatttgttgctcccaccctcttcacagtggatacaggatttcataatacttatgaacaaaataagccagtggtttgcccaggtctacaaaacatataaaaagattcagataaatttttgtgcacgaagactacaacaaactgaaacatgtttaattcatatagcatagtctgtctctctctgctctgtaaagagttgcaaacttttcttgacctgccacagtgaatggcaaaacaggaaatcaaagtccatgaattgggaaatctcaaatatttgacacggctcccaatccacagatgttaataatcataaagctgagaaactttctggagcaaagcagataatttaaacaacaatgacaactacagccatgatactattatgtgtatatgtgtgtgcctgtgtgtatatatataaaatgtatatatatataatgtatacatatgtgtatatatataatgtgtgtgtgtgtgtgtgtgtgtgtatatatatatatataaaatttctctccttggcaattacttctgtttttaaaaatagtcaacagtgaaatgccactttttttacattgaaaattggcacaaacaccgttaataaaggtgttctaaagttctcatggggtgtgggaagggaggtcataaacacttaacattttgtaatagtaatataacaaaactcaaagttacttttaaaccacctggaatacagttaaggcttttatgaatttttttgttgttatcattgttttagaccctttatactttattttaggaatcattttcattctgccattcttataattgtattaaaattcacagctacaatatcaatgataattatttagattaaatatatttattagtttcatttcttaccattgtttcttgtgtatgctttcttttcctttttcttgacctgtttcctcttacttattttcattttgggaggctgttttccttacgtaatgtgacaatttccccacaaatggtgatctaatatactaaagtgcccagcctccagctagaagggcatggaagtggtgggtaaaatatatccccaaattgaatttccaatatatagtcaaattcaaaaaaggaagaaaaaagatgaagaatgtaaacaacaatggaagaaacaaaaaaagacagaaagacatgtttccaggtgttaaaactgaaaaggaatttaaagtttcccttaagttgtgagtggcatttcagacactccatcagttcaaggatatactggactgaaaaccaagcctcaggtgttttaatgaccctctggcctgaacttggtccttgaaaggttggtaagctggagttcatattcctgcaggaatccagagggtttataggactgtccggtgctaaaaacagactaggaaaatttcacctacaacctcaggggagagcaaagctgtattctctgcccaatttctggaagacagacagacagatagtagatagatagatagatagatagatagatagatagatagata

SEQ ID NO: 1243605 - DNA, 4001 bp, Homo sapiens
gccatcatctcatttatgggacaggatcacacacagggtggtgctactttctagagccaaatctcaagtaaggtgtccaggggtcagttgcaacagaaggcacattagccacagcagtctcagagaacactgctagaagaagaacctacacatggccatgcaatgaggctgaggggcaggcctaagtggaagcagaccaagtaaagaggtcagagagcccatggaaggagaagagggaaagacagttccaagagtaaagcagcctaggttaaggtgcagaaaattcagcatggatacttttaagagagctgtgcaaggctctccttacctaaaatcacactccgtatacagacatacccacaaacaatcacatcatgttctttgctcaagattgaacttgctgaaactgtgatgtgctactactcctaccgggggtagagggtagtctgctgctgtacttctcctctctggttactgatgcaattatctatagaagtataatgccgctctctgtaagcaattttaggtaaaatccatgggatattttcacagtgagctagcctacagagagggcaaaagtttctgggttcttaaagcagctgccgccaatgcaagctctgtacaggaggaatttcttttttttttttcgttttattattatactttaagttttagggtacatgtacacattgtgcaggttagttacatatgtatacatgtgccacgctggtgcgctgcacccactaactcgtcatctagcattaggtatatctcccaatgctatccctcccccctccccccaccccacaacagtccccagagtgtgatgtttccctacactccacctcatgcacaagcccaaatatatcacagcttctctacagaaatgcataattcactggcgaagttaatagacattggccaagaggatgatctcctcactatggaatcagctacagtcttaggtagcatgcaaactccagtctgactccaatcccttatatcttccatcgtaaagtattattgccaactttgtttctttccaatttttgtatgttctgcagtttatgtaaaggctagcaaaaacatgaatactttattatacatatggcaaatagtctcaaattgtaatgactcatttttatcctcttatactgttgtaaaattcagaacaacatgtattcactataggagtatgaaaattctttttaccaatgtacattttaaataacattgtggtaaagagaagctacatatttcacattctgattcaactcactgtatccaacgagtaaaagatcctagaaagaatcttacatttctaaaattcttatagactaagagtgagcgataggaacaataaaaatatttctgtaagtgctcttggtaaacagtcttaaagtcagaagaacacttatccaaaatgccctacattattgtgcaatcaaagtagataactttaacttcaaaaacaactcagtcttccaacccaattcttaaaactctaagctcttcacaaaaaatttttagccaatttaaacttatttctacactcagttatgtttaaaacaacataatgtttgcataattttttaaaaaacattctaactcaatgtttttatttatctaatattaattaccagatataaaatctttaaagtagcccaatatttttcaaaataatttctgcatagatgattgtcattcagtttataaaggtttatttataattttgtgataggaataagaaaagacaaaacctctgaaacaaactcacacacaaaagcaaaatacaaaacaaaacagaaaaaatacagtgaacttacttctgggaaaatggaagcaaggaatctagaggtatggtttatccactgagctccttgtttagaagaaagttattcatattttctcctggtctctaccatgtatctagaatttgctttaactatttgacttctgtgaaaagtttctgtgaagactgctttcagagtggaggttatgatctcaattctgttggccctgccaaacatcacattcacgtcatcatgcttggactgtttgtcttctcattgatattcggccagttcctgcagagcagtggcatttatactgggttgcctggctatatcatattatagggagcaatttctcttttacgtccaagattattgtggctaataccaaaatttaaagtgctgtctttaagccatgagaaagtaaacagcttaatcagagaaaagctcttctctctacccagagctctagtctgcttaattgacagctttacctagataatcaaaattttcattcctctgcttcccagcttcattttcactcagttcagactattttccaatttatttgacccacggattaatcagaaatgtgcttaatttccaagtgtctgaagattttcttatcttttggttattgatttaattttaaatcagaagttcaattatactcagaaaaaatattttgtatgtcaaatttgttaaggcttatttgatgacccaggatatgatctatcttggcagatattccataggcacttgaaaagttgtatagttttttggtgttgagtggaatattatataatatctattacatttagttggttgatgatattgttcagttttttctatatttttcctaattttctgtctcctagttctgttgattactaagagaggaatgttgaagattttaacaaaacttagggactttcaaatttctccctttaaaactatcatgttttgcctgatgtattttgcaacatttggaattgttatgtcttcttggtgaattgacccttttatcattatgtaatgttaatctttatctctagtaacttttgtgttctaaagtctactttgtttcatattaataatatagccattcttactttcctgtgattattgttttcgtggtattttgttttcatccgtttatttttatctacacacacacacacacacacacacactatatgctttcagagtggcagttatgatctcaattctgttggccctgccaaacatcacattcatattatatgtgtatgcgtgtgtgtgtatgtgtgtgtgtgcgtctgtgtttgttattatttttttaagatgatggtcttgctatgttgccaaggctggacttgaactcctgggttcaagtgatcttcccatctcagactcctgagtagctgaaactacagatacatgccactatacccagctctaaattgtatttcaagtgagtttcttgtagatggcatataatagagtcatgagtttggtttttaaaatccaatttgacaatgcacatcttttaatgggtgtgtttaaattattttcattttatgtagctattgatttttaaaatcagatctgccattttgttatttgcttcttttctctctggttttaattctcctatttcccattttctgctttcttgttggttatttgaaattattttttggtattgcatttcaacgtatctattatgtttcttaactgtatctatttgtatagttattttagtggtcactctcaggattacaaaagacatacttaacttgacatgctttacccagaattaatatttcttcattttaagtgaaatatataaaccttactatgatatacagacaaaataggaaggaggtcaacaagggtgctgctcagtaactatataaccagaaggggaagaaatagaggagtaagaggctcaacatggtctccatcaccccaataaaaagtcatgatctcttgctcagctcctagtcctaagctacttttcagatacagaacatattgattaaaaaactagtcagacccctagaagaaaagatcttgcaacatcttgacaagtatatactgtggtgattatacttcctagtcctccctcaaagggacctaaagccattatttgggtgattatacactgaagaaagaaaaatccccagacatgtcaagggttgttgggcataaagtcagagtggacat

SEQ ID NO: 1243606 - DNA, 4001 bp, Homo sapiens
gtaggggaattcccctttataaaaccatcagatctcgtgagacttgaatactatcatgagaacagcccaggaaagacctgccccaataattccattacctcctcctgcgtccctcccatgacagatagggattatggggactataattcaagatgagattggagtggggacagagccaaactatatcacaaggcatagttgaagagaaatgtgattggcagaataatggtcccgttctaatcctggaatttgtgaatatgttacagtacatgacaaaggggaattaaggcagtagatggaattaaggttgctaatcagctgactttgaaatagggagatcatcctggattatctgggtagacccagtgtaatcacaagggtgctaaaaagtaaaacagggaggcagacaagatcagagtgaggcagtagaagaagggttcattctgctgctacggctttgaagatggaggaggaagaccatgaaccaaagaatgcaagaaacctctagaagctacacagggtaagaaaacagattctcccctacagcccccagaaagagacacagcctagccaaccccttgatgttagccgagtgagaaccacatcacacttctaacccccagagctgtaagatgataactctgttttgttctaaaccattaagtttgtggtcattttttttttttttacagcagcaatagaaagttaacatgggggcagggttgggggaaggagtccgagagcctgaggcctgagaacaagacaggaagacattgctggacatttattttatgacgtgcctcatcagcagaacaaagaagggcatggacttatgtttaaaaactgtccagaagtgaccaaagaaattcaccagtgatgcagatgagctcctaataatcatgccatcggagcaggctgtgatagcctggaaatcctgcctgaaaccaaactgcaacatttccaactaagaaatcaagcggtgataaacctcagtatctgaaagggttaaatattgtgcccacgtgactactgttctttctttctgtgaattaatgtgtgtgccagaaaatatttgtgaataaaaaacaattacataatctcattgtcatgaatgtggttatttatctctgagcgttaagactgatttttccccccactgaacatcttagtgtaaatatcagagaaaaaatatactacccaccgtaataatataaaacatctaattagcttaaattgttctgaataggaaattgtataatttagaaataataaattggttataaaaagccaatcatttcccagtcagataaaattcctgttattcacagaacaaatttttctaatttgttgcactgggcaacaaattagatcaaaattttaaaatagttactataataaacaagatcaataaaaatctttccttaagttttcttgatgaaaatattctcaagccatttaaaaacaattcaaaactcagaaaattatgcatcctgcaatgcttacaattcctctggcagtaaaattaaaaacaaacaaagaagagtaagtaattcaaataaatttggaaatagttcatacttgtaaagaagcaacataacgtgacatttcttttgatttattcaatagcctattagataatgtatgctatttgtccaaaaatgttttagttacggggtaaaaatttaaattcttagttcttcatttggttatttagacatacaaaataaaatagatgatttaaaaagtcaaaatgactcgttaataacttactgcttttaatggtttctacctaaacgtctggcatgcctatttatagtcttatgttatatttctatatgcaaaataaccacaattttagaggttaacttactctcaggaaagctggaggaaaaatctagaaacacagttcatccatgggtctctgcatgttctggaggagaattcacattccttttgggtcactactacatcatgcttttaatttcacattcattgtgaatagttctgttttatacaaatttcccaggagaatctggtctcagttcagctagcctgccaaaatatcttctgctcacgtggtgatttctttgctgttttccatttctttgtttcctgctagttactcagcagggagtttgtagttgcagatggttggctggacatatcaaaacattaggaactatcaaaccaaggagaatctagcctttctcaatcggtcttttcatacaaggccctaatgggagagttgaccccaacacaatgatttaaacaaagataagtaagaagccaatccagagaagagtagagcagaacaaagtgaaaaatacataaatatatatgttatatatatatatattttaagtgacaagtaaatacatacaaattgggttagaaactatttaaaaccttcaacagattcttaaaacttgaatccagaaatacggcaataaagcaatgtaattttcttcagggtaacaaaagaaactctgagtttccatctgcatctcagtttcattgtgtgcatactaattgtagcatctttcatctttcatggtactgaagcgagcagaatctttagagaaatctcacataacaattacctgtgctctcaaagcctccaggcttgtcatctctgcaacggttcccatgaaacaaactactttctccaccagtaactactgaattttagtatgtcctgctttccagtattgttagagaaacatttttaactggtaatagatgccattctgtctatttttgagcatcttatgtaagtagaagaaaagactgttccaaaattcttataattcatggagttcatctttggctgaagaagaggggggaaaggaccactatcattctgcttacagccagtaagtctgttaaattcttcagtactgtaatttcttcctgaacatacagctgaaagggaaacaataaatgcatgcaattcttaaatcagcctcttatctgtgtctcatggaccatgataaccaaatgaaatcttccttacccatttcccattctctcaatattgattcaattatatttatcctttttctaattatatgcgatccagaagttgctcagcaagcagtctgtggaagtaggctgaactcctgaatccatgagactgtcaaacttaaaaaaaaaaaaaaagacttctgattgtttccatatgtctacagaaaaggttataggttggttgattttctgcagaaaatacaaaattatcacattcaatacatttaataacatcgccaacattttgtgcacagagaatataatttaggaaattttttttcagtaacttgtttcctagaagaactttgtacctaggttagagcttatgagttctggacctagttgattttgactttcggttctaaattctgttttcaatgtttccttcagtgtaccacactgtaatctctgtggcactataacagagcaagctccctctcattgatcttctttttaatattttctagattaaacaatatttaatatttatttatttatttatttattttgagacggagtttccctctgtcacccaggctggagtgcagtggcacaatctcggctcaatggaacctctgcctcccaggttcaagcgattctcctgcctcagcctccacagtagctgggactacaggcacctgccaccacggccagctaatttttgtgtgtttttagtagagaaggggtttcaccattttggtcaagctggtctggaactcctgacctcaaatgatgcacccaccttggccccacaaagtgctgggattacaggcagaagccactgcgcccgacgtatttactcttataaagaagtttttgaatcagtttaccaattcaaaaacaatcccatgggagttcaaaaatgaaatgacactgattttataccataatgtacactttttttggcaactacatatagcatttattgtgtctaagacatacttaaatattaaaacatttaatccacagaataatcc

SEQ ID NO: 1243607 - DNA, 4001 bp, Homo sapiens
caaactcccaagctcccactttcttggattccacaatcccatgttaaggtagagccagaggatgtctgaacatgggacaaaaagggagtcctgaatttcccaactctggggtccaggagacctgtctctgtagagtcctaagctctcagggttcaggaggctacccaggaacaatgagcccttgtgcctgaagcttgggcacaactaccctcttgattttctgtttggcatcccaggcaccacaaacctgccacggtcataccagcctggcccaaagggcagtgaaaggaagtgtgctcatgaggcaaaggcacaacctctggaccctggtggcaagtggcctgtccatgctgaataatacatgaagttcctgtgggactgggaaagaagggcagtggcagagaagttgcaccatctcggattaacctttgggtcacccacagaaaaagagagaatcccaaatatgcctttttacagtttttttttttacctccattgccccaagtttcaaaaaatccatataacgccttcagcccattctaaacacagcccaagagcatagctccagacttatacacctgtgcacacacgtgcacagcacgaactcttgggtaacaccccacgtgcctgcgtgtgtgcgtacacacacaaagggcatatatgtacaaatactcaaaataggaaaagacttagagattgggattcacaagccctggacacccctttaatgaccacagagaagcacctttaatctgagctccctctgtaaaacggagaccacatgatcacttgcctcatagaggcaagtaagttttgcaagttggtaagaaagctcctaggctgtatgcacttagctcacctgaactgtgctggaggctggagtcagcaggctgaagagcagcctgtcttagaaagagatttggagtgagagtcaccaaaggcttgattttcttttcttatttatttatttttttagagacagggtctcactctttcgcccaggccacagtgcagtggtgcgatcatagctcacagtaatctaaaactcctgggctgaagtgatcctcccacctctgcctcccaaagggtgggattacaggcgtgaaccactgcacctggcctgtagcctgtttttctatcccagctctgccttcattgaactgggtaactttgggcaagtcccttcctctctctgggcctccctttctccatctgtgagaagggagttggactacaggaatcctgacaccctgcacctgtctccagactggggtctgcttctcccttctgagtccggagtggtggggatggcctgctctcagacctcagtcttacctagagaaaagaaggtggcaggaaaccttcctaagaagggtgggacactgcacagccggcctcccaaaacacctggttgagcaggtgctctggatgccctgggggcaatccatgcccaggtgggcaaccgagtcctaacctgaggcagatgctgagggaagaccctccatcaggaacccgcggctgattgcgaaacgccccttccgcacccgacggaggggctgggatggagccgactcacccagccacgcactgtgcctttgcgccccagccgcgcactcttcctcactttcccgggctccccagtgctgcagccgggaagggcagagcagggcaggtccccgacaccgcgtgggacccggctccgggcggcgcagccaacctccctcccgagcccatcgccccctcccgggcgcccaggccgtctcaggggctccgtcccgggatacctgccggccccgcgggaaggcaggcggcggggaccgggcgaagccggccgaccctggcccccgcgcagtgaccccggagccccgcgccttacccagaacttggagccgagctccccggaaccgcacagggcgtccatggggccgaggcgcggctgcaaggaaggcgagcgcggtcggacccagcggcgggcagagcgggcgccggagccgcctccgccctccgcaccccgcgctccgcccggacccgccctgccgagccctaccccagtgcctctgggtccggtctccctgcccccgtcccgcgggttgcgacagcgcctccctgggagggactttggggcagaggtgggggggcccttggcacggcgacagcccctgcgagcggcccctgggccaagccagggggatgtctctctaaataccgaggctaacagtccaggagtcgagtctatttccaagggggaactgggatacacaggcgctcccactcccgaacaagtccgtggggccgatgagtcattgagtaggggacgtagggagagggatttaacaatctttcctagtaaaaaaggaatctttgagaaggtcacgttcctctccggaggtcagtttcctcatctgtaaaatgggaagggcttctgtgctcaatcaggaagctgacctcttccccatcaggttccagagaccactggcaggcgccacacggggagcacacggggtgtgctccgcgggtgtgtacccgtgaggcgggggtgggggccgcagcatcgtccagcgggggcctcttatgtcctcttaaactgctgccctcttaggctctgtggctccctgaccttgccacatcacctcggcacgtctctgggcctctactttcacatccgtaaaatagagacaatcatagaagagaatcttcctcccagggttctctgaggattgaatggaaagggtaggcaaagcgtatttcctggcacacttagtgggcacccaacatgtgtgaattccctctgcttcagcctgatcagggttggggggggaaggacaggtgaagccccaggaggagccccacgtgagtgtcctcgtcctcgtcctcctcctaaggctgaaactctacattcctgatctgtaaaatgggcttgtcagtgctctccttctcctgcttgcctcagctctccttctcccggtatcccctcagatgcggggatccctccatctctcaatcccgctgttgccctgtcttccttaacacaatcccagacgccaactcagcaccgcttgttggggctcagaaggaattctccctggcaaatctttccctggcccttctcttccctgcctttgcccacaggtctgtccagtttcaccccggtgaccccttttctggcccttgttctcaagagaaggtgtttccttccttggctgctcagcggcaggtgtgggtgggagccagtaagagtgcagaaggggcaagccacctcctatctctctgggcagccaggaggtcactagaagggaagtctccttggctataggctatcagaaccaagatctggctgggcatgggataggggtgggagtggagaagattcccctttcccaggcagtcagaccagggacttctacccctccactgggcaagttctttcagccccttctttgtctgccctcttcctttccactcatccacacataccctccctctcctgtccccctaccttcatctctgggcaaaatactttacagagctttacaccttgttacggcgtgccttggattatatttagttatgaagagtctgtcttccctgctaatctgagaggtccccaagggcagggactaactcagtcccctccaatccccctccataccttttatacactgtgtgatctcaataagctccttgatgcctctgggacttcatttcttgagaaacgtggacagggtgatatctaagctctcttccagccctggtgggccaggcttctatggcctaggcagctgggaaccttcctccaccccttccatgaccctggtcatggcttcatcagcacccactgcccctgtgttttgaccttgtctacccaccggcttcctccaactctccctcctctcccattccttttctagggcttgtggggtcataggcaccagattgctctgggcttgaggagacctggggactttcctttagggccctttgggaggtgagctccccaatca

SEQ ID NO: 1243608 - DNA, 4001 bp, Homo sapiens
aggcggatcacttgacattaggggttccagaccagcctggcaaacatggagaaaccccgtctctaccaaaaaaaatattaaaaattagctgggtgtggtggtgcacgcctgtagtccccagccacttcagaggctaaggcaggagaatagcttgcacccaggaggtggaggttacagtgagccgagatcatgtcactacacttcagcctgggtgacaaagtgagactgtctaaaaaaaaaaatacttttaaaaaataataattttaataaatgcctacatatatgcgtgtgtgtgtatatatatatataacatttttttttgagacagggtgttgctctgtcacccaggctagagtgcagtggcctgaccagggctctctgcagcctcgaacttctgggcttcggtgatcctcccatctcaacctcctgagtagctgggaccacagatgcatgccaccacacccggctaattaaaaaaagaaatttttgtagagacaggttttcctatgttgcccaagttagtctcaaactcttgggctcaagtgatcctcctgccttggcctcccaaagtgctgggattacaggcgggagccactgcacctggcctcaaatgccaccatatttctgattcctgtcacctccaggctcagagactgtgagtaaacattctgggcagataatcgtttgcaattgcttccagagtgctctttgctgagctgttaagctgtgggctaagtggtaaatgtcaggtatctctgctgtcgtgggccaggtgctcagattgctaggatacagcagggggtgccgagatgaggcaaggggccgggttaggagtccctgctctagcacagcgatactagctgagtccatcgatgacctttaaacccgcttccccggttctgtctagattacagggtttggaaggctttggaagatgtgttcagagaactttgcccaaactggcccacgcctgttccaatgctatgcatagctgtttctgattcttagccagctcaggccctctattctttccatgctggtctgcggcctccgttacccacctgctgagggcgatcttctggtggagcagaaagccccgctcgtagggccagggcaggccggcctcgaaccactctcggcagcgcagcacgggcgagatgcaggcggcgcctgtcacgtagctggaggagccgcactcgcccaggtaggacaggagcagcgccgagcccgagccttcgctcaccgcgaacagcggcgccgccgggtgtcggaagcggatgtatgtgaccgcctccttgaggtcggacgggtccccgaaaggctgcagccgggggctgaccagtgggcaaccgtggtggccgcggcgatggaagatgaccgggtagtagccgcgctccagggcgagcaagcaaaggccgagcacgttgcgggtgaggcgaccccacgcattggggatcaccagaagcaccgcaggaaggcccccggcgctggtgatccggcggccccgaacacaaggtcctaccacccagtccagggccactagcccatcgtccgccaactgcaggtactcccgggccagctcaggcccaggcgctacgggcaggacgaagtggcagagggtctgcaggtggggcccggagaaccaggagcgcgggccggcctccagcgcctctgagcgccgcagggcgcgcagcaggcactgggccagggccgacggcttgcaaacaaggctgcaccctcccggcagtggctcgcgcccgtcgctgaactggtccgccgggcctccgccgtccgcctcctccccgtcgtctcggtcttgggcccccggcagggtcctctctccgacggcgcgcccccagggtccccggagccgcgggccgagcaggccgagaagggcgagcacggccaagatgagcgcgagggcggcgccccacggcggcatggcgaagctggagagccccggcgggcagcgggcggcggggccgtctactcggcgagctccgcgctttgcccgcggctccgcccgccggcggcggctgcccagggccctcccgcgcgggcgcgctctggattggccgtggccgggcagaggcagccagttcgggcccggctgccctcgcccgccccccacccccgccccggccctttgtacagcaattgcaacaagtgggagcagagggtgagaggagccggggccaccagggagggagggcgcgccggcagccggaagggagtggggagggcacgagccggggagagcggtgttggccatggagacgtggggagactggaggccgaggcttggggacccgactgtcatcagggtcttccgccagaccctgggcgctgcgccctcagaggccgatgaaaagaagcagaagggagaggtgagtaagtcgcagctccgggcgccggctcccgggaccccgtggggcggcggccgcgcgcgcgctctgccctcgggcggccctgctctcccccgcccggccccgcaaccccgcaataacttggctgggcggggtccggcactgggctagagaggtcgagcgcggcgtcttgagccgctggcgggaggctgctgcttccccgcctgcatcagtgcgggtcccgtggactcctcgcccccgtccccgcgagctcggggctccacatcaaggaaatcctcagcccgggagtggcttccccagaaacagcagccccaagcctccgagagtcagtcggagaaaaggacacactcaggcgccctgcgacagggatgcccgtccgacctacaaggaacgcctcgtaaaccggggtgcatgggagaccacggaaataacacgttctcgctgtttccaagctttgggataggcatctcgaccctcgctctctacccacgtttcccccccaaatcctggagagggaaccagaaccagcgccccgctgcggggcgggccggccagcgcacctcctgggggtgaggcctgtggcgtccccatctcgcggcgaccaatctctttctagacgcgcgcctgccaccgctgggcgacggcggaggtggggaagacagcagcctctcggctagctccggcctcccggggcttctgggtttggagagtttggggagcggagacacctcccgaggctcctccgcgttggaccctatttgcgagggcgggagcggggtgggccgacggcgaagctccagaggtgggaccctctcccttcagcagctcttcctgacttcatgattctgcccctcttctcattgcaggtcacaccgacaaatctgaagcgggtttgccaggggagtgtacccgtctccccagcctgggccacccggtccacagggattccatttccggccttacactccgctccacgatctcatccaggcgctgcagctgtgcagctgctctacagactgcagggacctgctgagacgaatccccggacgaggaaaggggccccccgcctgccctactgagccttgcgcgctgacccggttcctacacttaacttttccggcttcgggtttaagacgcgtgcgcgcacactccgctgctgtgggcgggcattggggcggggcgataccgggggcccactgtctggggaggggcgcgcgcgagcccagggccaacggacgcgcgggcggcgcgggcggcgcgggggcgctggggctggaggggcggggcgcgcgcgctccctcgctggcggagcggctgggcggcgggccgggcccggggccgcttggaatggcgcctcctccgccttcgccccaactgcttctcctggcagccctcgcgaggctcctgggtcccagcgaggtaaggtgacccgctcctgggaaggcctcggcccgcgagctcaaagcgctttgccaaaagttcgtcctggaaggagtggcgcgccgagggggacgcggagttcttccgctggcgggctgggcctggggagagagagggcagggcctcgccgcgtccagcgccccaactcttcgctttggacccacaggtgatggc

SEQ ID NO: 1243609 - DNA, 4001 bp, Homo sapiens
aatcccagcactttgggaggccaaggtgggcagatcacttgaggccaggagttcaagaccagcctgggctacatatggagaccctgtctttacaaaaaaatttaaaaaattagccaggcatggtggcatgcacctgtagccccagctactcagaaggctgaggtgggaggattgcttgaacctaggagttcaaggcttcagtgaagctacgtgagctatgatcatgccacagcactccagcctgggtgacagaggagaccccgtcaaaaaaaaaaaaaggctggctgggcacagtggctcactcctgtaatcccagaactttgggaggccaaggcgggtggatcacctgaggtgtcaggagttcgagaccagccttaccaacatggcgaaaccctgtctctactaaaaatataaaattagtcgggcatggtggtgcatgcctgtaattccagctactcaggaggctgaggcaggagaatttcttgaacccggaaggcggaggttgtagtgagccaagatcgagccattgcactccagcctggacaacaagagcgaaaaaaaaggaatgcctggctctgctgtttggagctgtgtggccttagacaagtcacctcacctccctgagctactgtttccacatctgtaaaataggaattataatacatgtctcacaaggtagttgtacagattaatgaaataacagaagtgatttccatcatggctcagttgccttgcctctcctccctgaatccaggaatctatgttctcagccccaggacaaccacacaatttaaaacctgttctacaatgccacctccctatctgttgctagaagcctgctcccagcagttatgtgggccatccccctgcctctgcatgagatcccctctctttagcccagcctactctgccttatccccactctccctttcccaaactcagggaaagagcccctttcccttgtccatctcaggttcactgtgctgtttgggaagttcttctgaagcctcacccagagccggcctggaaatagaatgatcgccagcatctgtgtgaggacggaggctttgggtctctggattgacccgtgggaactcagaaggatgaacctgaggtgacacctgagaacaggatggaatcgcactgtctgtcccaggcatctctgaggctctgagagacagaaggggcacagtgggggcttgggtagtatggggtcagggttaagtattggggtctgggatgaagccgaagcctggaatgggaggatttctcagccaaggcccaggacaagcactgtcaggatgggtcccagggccccacttggggcagggctcagggtcccccctccgggggctggggtgtcaggcttccgcccgctctacctacctgcacatagttgtcctcgcagtagtcagcgacccgcagcagggcactgtggttgcccctcagagcctcccggccagtggggatctcaaactcctgcagctgctgtagctccgccatcacccccagcctctgtctggctccccagggagcccgctcgttttgagtctcaccctgcccttgattggttgctctgccttccctccctcttattgcttttggtttcctctgcgtgagacccaaacctgcttgcaaagggcaggcatgctcattccgggacaagaggaagtcagtcctgctccccgagcctgtgtctctctgtcccctgcccagaggaagggggaagccaggggcccatttgggggcccagcccccaatcccacccagcagaggaagccaaggtcggggcagctgtgattgctccctggtcctggagaggaaactggtcggctgggggatggggtcggagactggggaggaagggggctggcctgctatagggggcggaggtggattttccactcatggaaggcgggaggaaagggcagagggtgggggcttccttgggaagctcagggatgagtcaccaagggacaggggagtggagggtggataggatatggagatccgtcataccagaggactgtggggcagcagcacagcaaaaatagaaaacagccgatgcggcagcaagaggggtcagggttggacaccgggaagacatgaccagagaggttgccagaggggtgttagcaagcctgcgaagggttgtgtgtgatgaagatctgccctacacgctctgtgcagatgaaggcaggacaagatgaaattgaccaagcgtaatgtgagggactcagattagacaacaggaaggacttggatttgagaagcaccaggttcaaatttcagatcaacttgcggttttaggaagcagcggtggacagagcactgagcctgcctaggaggtatgggctgtggttcacgcattaacaggacagttgtaccagacaacctccaggatcctgttctgatttcaaattcttagagctcccagctgagagttggactgggtcctggagcacggaagttaggatggacggcgggcctcctctctgcccctcccaccaccaagcctgtcatcctagagacaggagaataagaggacctcccattgaccatattggtcccttaacttttgctcctccagcgggtcccttgtcattggatgggtgtcaaccagagcaggagctcaatgtctgttaaatggcatagcccttgggtggtcctggggggacagcaagaaaaaaaccaggatgtgggttctgtgctcaggaacccacattcagggctcagagggaggcatggcagcaaagaagcttgaacagaggcattagaggtggccacgccccaagtactaagtggcacagcttggtgagcaaggacatttttattgaatgagtggatgaagagtgagctaggagaacttcgtaaggtgaaactgtggggatccaatgggcaacacaaagcatcttggttaaggaggttaggggccggtctaggacttgcctcaggaggaaggacagcctcagagcatgctcagaggtgggaagggaaggaggagaaagcaggcgaagcggggtaagtggggctgcagggtggaggtggagaaatagaagcgctgcgggctctaagctagtgaggtcaccaaaagtgtgaggctaacgcaaggcaaggtggtgaaaaggtggcttctgttttcgcgtttgtttttgtggggagaatgtctgtctctctgctctgctgtagtgagggcttgaaggctcaagcgggtgatgggcttagaactttgagcctatgatcagcttaggcatcagagattttggtttccaggccatctgctttatctgaagattttcagctgatgaagaactaggaggctcaaacactatcttacctgagtccaggacaagtgacttggagagtgtgctcttctgtggcaggtgagaggggctgaggttgcactgggctgggatctactcttagtatcactggggctaggcaccaggaaggccttcctgataaccctgcagtgataataataacaatagcattattagtgataataataagtgtattaagtgttcattatgtgccaggtagtatattataatattttatagacattattttcttagtacccacaataattgcatgtggtaggtttttttaatacccatttgcagctggggaaactaatactcaaagaggttgagtgacttccctaaggccacactgagaaagcagtaaggaagcagcagatcagagttggagtctggtaagctccagacccccttgtctctctctctctcttttttttttttttgagatggagtctcactcttgtcgcctaagctggagtgcagtggtgtgatctcggctcactgcaacctccgtcttctgggttcaagtgattctcctgcctcagcccgctgagtagctgggattacaggtgcccgccaccacgcctgcctaatttttgtatttttagtagagatggggtttcaccatgttggcgaggctagtctcgaaccctcaacctcaggtgatctgcctgtctc

SEQ ID NO: 1243610 - DNA, 4001 bp, Homo sapiens
cctggaactccccggcattcgagaaaggtctccttcccccatgctggcagcaaagtagaggggaagacaccatcccggtgctcacggggacccaggaggagcagcgttttcaggtgtgacacgtgctcaggctctcttggcatccgtgggccaccgccgtacacagcaggacacctctgagatggagcgaggctgggaacctggtgcacccttcgtgggccccagcgggcctcacacattgtgcagactctcacaggcaccagccccacaccaagcactgtgcagtgttcagcaatgaatatgacatggtcctggtcctccaggagaatgggatataattgcggaggcaaatgtctagagttctgagcatctgagcagaatgaaatacgggcttagctgaggcatacgccggggtccagcagaaggggaggtccaggaggcagcctctgagtgggcccacatctgtgctgggggcttcccagaggaggcccatgagggccacacacctcccatcccagcattgctactcccagcctgactcctggctcaggagcagactttcccaccctgttcctagtggggaggctggtcagaccctaagtgcagaggcctccctgagcccacggggagacgtgacttacccccacggccctacgccagcaccagatcagagaagacagggtggggtgccagccactgccagcctccctacagctccactccccacccaggcctgcagccaccgctccacccatactcacacatcagccatctcccgtggttctgcatctatttttacctccattggctcctcctcagagccacactgtagagtgggtggggcaggactgtgatccccatcttctgtgaggggcagggaggcccagagaggttcagggacagcctcccgtccccagcaatgctggctgcacatgccttctaggccccgccgatgggcactcggttaggcagcctcgcctagcagtctgcaaactccccgaaacgcatcctcactgggcctcccttctcgacacagaaccagagagcagctgagcaaaaggctgaggtggaagctctgagaggtgtgtccaggagagaaaaaggaagaccgctgtggtgtgccgggccagactcacagagccggcgtggttccggggccgccccgctcctcaagggattctggccaccactgccctccagttccaccgggagccaacctctcctacaggacgggtcactgctgcagagaacgccgtcagccccagagcgggtgggccagggcccagcagatgctccctgcctgtcccgcctcgggaagggcacctgcccacctggctgcagcctccaagccagctgttccctccccccttcagctgacccagtgcttttccttcaaggaagctcagtgacctctggctcttgccctttgcaaacaccctcttgcctcagctcggagacaccaagtccctgtctcctggctgggaagagggtggcccctctcttgcggttgccgtggaaacgggggattcctgcccacccgctccagggaggcggcgaggctcgggctgacaggcgcgccaggtgactcctggcacagccgccggagccctgagctgggctggcctggagggggcggccaccactgccccgaggacaccggtcggggaggcaggcccgcccctctcccccgggaacagctgccggggccgggaccctccgccgagggcttccacccggccgcgcgctctgcgcccgcatcagccatttctcccgcgcaccttcggcagcgccggcccggccccccccagcgcccagggcgtgtcacgctcccaccttcacagccaccaggaagggggaccctgagccggggctggtcggggttcccagctcgcactcctccaggagaaacacatcttcgtcctccagaaccttgtccagcaagcctatcgcctcctcttcctcctccatggcagccggagcccgcggagggcagacaggaagcggggtccacgcagcggcggcgggaggagggaggagggaggaggcgggcgggagggggggcaggtctacacccgcgcgcccggcctggggctcccgacccgggactgcatcccggacctagtccagcccgctccgccgccgccgccgccgcctcgcgcgtcctcgcccggcgaaagggggagcaaggcccgggcagcccctgacgccgtgcccggcccgtggcggaggcgaacccgccgcacagcagcccagcgccctcctccgtgtcccgcccggccccgcagggcccgcccttcccgggctccggggctcgggctcgcgctcgctccgaacacacaggaaacgcgcgtcgcgaggtggagccgcccgtcctctggggttgcggggccgcggctggcggaggcttctgcggcggaggaggagcgaggaggccgcggccgggccggggtggggtggagcggggaggccgcttcccagacgcatcttcattccccgcgcgcggccgagccaggagcccggcgagcaggggcgacccccagagccaccccggagtccccatgcgccggagcccccttccggaggggaggccccggcccgcccagaagccacagccgcgtcccgccgccgctggaggagtcaggctttgcaacagacaggcctgacctgcccccaggcaggagcgcggcgccaccactgtcctgcacaggagcggtgggcgtcccactcacagggaccaggatccccctcctccaagcagcccccctcctccgagcagtccccccactcacggacgctactgacaccagcacccccacctcctctgagcagcccccccactcacagaccagcccccctactcacaggcgctgcagagaccaggacccccacctcctctgagcagcctcccacctactcacaggcactgctgagaccagcacccccacctcctccaagcagcccccccagccaccccaccgcagggagccatcctgcaaggggagtgcacacagaacccaggacaggcaccatctccggccctgcccactcccagccagcttcccctggcttctccaatggttgcagaacccccaactgtgcagggagtgaggccacattctggtccccctggccctagttcccagatgcacatacacctccttccatgggaggaggagtccagaggaggccctgggaaaagctcttttacaacccaacgatggagcaaaggttgcaaacggcacccatgagggtgcgggtgaggcctgcgggtgaggccagccggtgaagcgagccaggtagggcagggtgaaaccaccactcactccagccgatggctgctggaggaaacgcaagctcatggctgcctgatctctgttcaaaataagctaaaatctggcttattaacaggaatgctcctgattttaaaacgatggcaaataattaacattttaaaacaacatggtgccgtctaaatgaaccacacctgtggcccgagttcaggccacagccccccactccccccagaattcttcagaagctctgggctctaggtggggctcatgcaattccattggcagcagagaagctgccctccctggagagaggctccatcctgttgcagagctgaaatacagagcaggggattgcggggtgagcccttgaggggccccagggctaacagcctttgatcagggaactgtgccaccagggttcaacagaggcacacccccaccccacccatctccttccagcccctggttttcccctgtccctgcctgggtgggttataaatagccagggcgcatctgaagggccctttcagccacaattcctcatttggtgcgggcgggtgaggctgtggcgagggcttgggaacgaccaggcctggcattccccagggcacaagtatgccagctcagggcctggtaccacgggttcttctgtctcccgcccggcgggctccaagtgcatggcatgggctgcccacatgagtcagacct

SEQ ID NO: 1243611 - DNA, 4001 bp, Homo sapiens
ccagcctcagtgttcacatctgtagacagtatgcgcccagggccaggcacagtggctcacgcctgtaatcccagcactttgggaggccgaggccagcgggtcacctgaggtcaggagttcgagaccagcctggccaacatggtgaaaccccgtctctactaaaaatacaaaaattagctgggcgtggtggcgggcacctgtaatcccagctactcgggagactgaggcaggagaatcgcttgaacctgggaggtggaggttgcagtgagccgagatcgtgccactgcactccagcctgggtgacagagtgagactccgtctcagaaagaaataaaaaaaaaaaaaaaaaaaaaaaaaagaaggtatgtgcccaggtggatcaagaagacgacctccaggcctcctatgagcactagcagaatacaaactctcctgtcagatcctggggtggcctgttttccgtgctttgctctattcccatttccttggtacagtaaagcagcatttactattcttttttttctttcttttgagatggagtttcactcttattgcctggctggagtgcagtggcaggatctcggctcactgcaacctctgcctcctgggttcaagcgattctcctgcctcagcctcccgagtagctaggattacaggagcccgccaccacacctggccaattttttgtatttttagtagaaatggggtttcgccatgttggccaggctggtctcgaactcccaacctcaggtgatccgcccgcctccacctcccaaagtgctgggattacaggcgtgagccaccatgtgcggccagcatttactattctaagattcatcctcagccctccagtctggggaaagaagaaaattccccaggcctccacagtgtcacctgtaagggtgaagtctcagcctatgagtctgtcttttgccctcttctcacctgccctctgctcagcctcccggcttttccagcagccagtgagatctacaggcaacagaggtgaactggaagcccttcccagttagtcatttctgcaccaaacttttgtgtcagcttgagtcatgggaagacctgctgccctggcaagatgtggacctgctccccggggagctgcattcaccccctcactgcctccctaggcatcactgcaggataaagcacagtgacatcaggtccttgcagctgtgacactccccacacgcccccacacacttcccaggggccgagttgaagccccgttcccatggccaggggccacagcaagggcagcatcctgggcagagccgctggcttagattatgcactccccgagccaccgttttaggagggtctctcgccaagccccagctcacgtggccctcacctgacatggctcagatgacaccacccacaggtcaacagcagagttttcccaaagggtccgtccgagggctcgacagcagggcctggagccccctactcatttacttaccaccaagtccccatcagcattcagaaagacgccagcagaagagtccaatggattctctaagtctccaaaacccagagattcagttcagtggctccaatctccttagccccaagggaaacaagagcacgtccagctggggtcagagctcacgggctggccctctgccctcctgtggtcacgacggccccgaagctggccgtgctcctcgctcgttcagccagaattctgcagacgcatcccaggcctacgctgctctgccaggacctctgacaccacccaccaggctggccctgtccccatcaggcccaggagtggctgcaggagccgagggcaggctgtcaaggagacgggctccgagaggcagcggctcaccattcagcaaggcgagggcaaaggaacctcagagcctagccaggggcgcctgccatcagtggagcctctgctctggggctgccggtcgggccgtgtgtgctgtgtctctttaaggaccaggcctcttcaaggcaagttccctctgcagtccagtcctgcctctgcccgtcctgcggcagagagtgggggctccccagcgccatctggcggccgcacagcagcacctcggccaccagaggcttccagccaagcggcccgcaagtgcctggacaaaaatctccagcttggacacagggctgcaggctgctgttgggaacacagctgggggagtcaggaggagctccgtctgggaaggagagagcagaagcccccaggagtgacatggggagaatgatcatcccgccggacaaaaccttcactaaaatatcctcaaatgggccgggtgtggcagctcacacctgtaatcccagcactttgggaggccagtgtgggcggatcagctgaggtcaggagttcgagaccagcctggccaatatggtgtaaccccatctctactttaaaaaaatacaaaaagtagccgggcatggtggtgggtgcctgtaatcccagctactcgggaggctgaggcaggagaatcacttgaacctgggtggcggaggttgcagtgagccgagatcatgccaccgcactccaatctgggtgcgacagagtgaggctccctctcaaaataaataaataaataaataaaatattatcaaattgggccgggcacagaggctcacacctgtaatcccagcactttgggaggccaaggcaggcggatcacttgaggtcaggagttccagaccagcctggctcatgtggtgaaaccctgtctctattaaaaacacaaaattagccggacatggtggcgggcatctgtagtcccagctactcaagaggctgaagccggaaaatcacttgagatcgaggctgcagtgaactgagatcgtaccactaacaccccagcctgggagacagagcgagaccctgtctcaaaaaaacaaataagtaaataaaaataacaatgtgtgggagcatttaaagaggtcacaataggccagctgcagtggcttatgcctgtaatcccagcactttgggaggccgaggcgggcagatcactaggtcaggaatttgagaccatcctggctaacacggtgaaactccgtctctactaaaaatacaaaaaatcatctgggcatggtggcgggcgcctgtagtcccagctactcaggaggctgaggcaggagaatcgcttgaacctgggaggcggagcttgcagtgaaccaagatcgcaccactgtactccagcctgggtgacagagggagactccgtctcaaaaaaaaaaaaaaagaggtcacaataactaggggtcgctactagccttcagtaggcagaagccagaaatcttaaaatgtcctacaggacttgccctacagaacatctgttgtaagtgccaagagcgttgagaactctacctggttggggaaaacaggatggcggatggcgagttcccatctcacccccagctggtcctctttccccatcacactgctttggatgtccttcctactaaatttcgccttcataaacgtaggggtggatggagggggcagtctgacccagctgccttcacaagggaagccggtgcctctggctgcccctcccagaagccaggcacacacacccctgaaatcactgcaccagcttctcttaggctgagctgcacccaggacatgcaaattttccataaagcactttcgggttctgatcgtgaaacctcgtgactcctaatttcctcttccccaagctcttggcaccttgtcctgagctggtcagctcagtctcatgaacacacagtccggtgccaggagctggcacgagaaactagcacacatgactcgtgttctcccgaaaggagagtgaagaagggtgagactccggccacagtggccacgttttggctgggtccgttggttggagcagtcccaggctcacgagactgacatcaaagatatgaagatcaattagaggaaagagtttcccagtgtctaacagcaactgaaggcttgctctaagacatcctaaaacacatgtagcatgtcattcctc

SEQ ID NO: 1243612 - DNA, 4001 bp, Homo sapiens
cagacgtccctccgtccaccacagcgctgacccctgcgtccacgacacggacacactgtggcagacgtccctccgtccgccacagcgctgacccctgcgtccacgacacggacacactgtggcacacagcacacgttaggggatggaatcgctcgtcacacagagcagcccagggccggggccaccctgagctgcactgacgccaactgctcagcagctcaatagcccggcgtctgcctggccaccacccctgcccagagatccccatcagacacggagccaccaggcactgccagaggcaaacccagctaaggaattcttgaaggggcttctcagttctgccggccacaaatgcatagggaaagaactgaaagtctgggacctcaggtttaaaagttgccccctgcccaccaggcacctcctcaaaggggcaggtaaactggaagcgccctgtttggctggcgctggacccggaacctgccaggtcagtttcttgccaaccctgacgtttggggatggatggtgagctctgggctggtgcctgctggcctcagcaggggctggggaggggatgagtccacgctgccgggcacagacagctgcctcagcacagaggggctctggcagcagctggggccagcagggctctgctagcccagtccccagggaggctgaaggtgacacaggggccagtgcagtacagctcaagttgctgccctgcccagcactttccagggctgatgtcacctctgggaggtcaagtatgccccatggcaggagctgaaacaaaacgaggggccagtgagcccaagatcacttcgtcctggctgatgccaggagcctcaatgccggctggcagtaagagcctgcagagaggtcctgtgagcctcaggaggagctgcagatccccaccacggactggccaaggcctcccttgttgctctcttgatggatgggcccagccctggccagccggactggcactctgagacagctaactcggacagttgatttgatctgcagagttatcgagcacttcctgtgcgctgggcgctgggtctggctcttcctcacgtgcctgatgccagggccccaagccagccccgaggcagcctgcccagctgcaggacagtcggcttctatctcagattttaatcccaactcaggtctggggctgcaggggcaccggcggtctgccctggcacatggacggaacgcctggtgcccggcgggcactgggcccacagtcagatgggtggtccctgaagggaagcctcgagcccccagacccggcagcatctcccctccccacaatcctgcacagagaaacctcacacggcagacggtgctgcggtcggcgcccctcagcaaaggggcagccagcaaggcccgctggatgcagggatcaggtagaggctgaacagggcggcaagacatagacccagaggcaggcgtctccccgtgcgctgtttgcactcccggagtggaaagcagggtccacctgccgagaagaaacctcccttctcccgaggcaggggcagatgcccgagcgccagggtccgggtgggggcggccccagcgttcgccatcaagttcaagccacttagagggacgcgcacagaccccagctctgtcccgggactccacggagggggcgggagcgggaccccatcagcccccgcagcccccgcagccccccgagccccgcagcgcccccgagcccccaccccccggaacctccagcccccgcgggcaccttgtttcggagcagcttgttgcgcacgcggccccagagccgggcgccggtgttgggggggcgcttgctccccgactcctccagcgccaggggttcgcgccccgccttcgggctgcagtcgggctggggcaggacgtcggtcatgccgggggggacgggacgcggcgctggagagaaggcgcctgtggagcgctcagtcccggctgccagtcccgctagttccctagtcccgccggctttccccgcgctcgcctccctccctccctccctccccgcgctcccctccctccctccctccgtccgcgtccctcctccctcctccctcctccgcatccctccttccccgccctccgcgaggctgcagcccaggctgagcgccgcctcccaggcccagggccgcccctccaagccccaaccccgggtttcatccctggcaagggcgctgctcctccccgaccccgccgccctccctcgcaataaagtttacaccagccccacaccccagtccctccctgctgggtccccgtgttgcccaccgggctgctccaggggccaagcggaggggccgggggccaggcgggggctgcattttggccacaaacagctgccctcctccccgggcaaaagactctgactgccctggggtcgcacttccccacccccaacttctgccccaggcaccttcctcagagccagcttggtgacccggccagacccttgtggaccggcactcagaagcctcctcaggtgagaaatgtaaggataaaggagacccctagtgtgggaatcccagtgggaatcgggtcactgatctgctcagggacaggagcaaaagcccgaaacgacgcgggtcacacgtccagccagagatgcctcttgaggggtcactttgaaccatggccctttgcacctcaccaaaaaaggtttccgctgccaggggcagaggacgccacgggcaaccacccgcgtccgtgctgggcgcagaggacgccacgggcaaccacccgcgtccgtgctgggcgcagaggacgccacgggcaaccacccgtgtccgtgctgggcgccttgagagagagaagaacttgttcttgaccttcaatttatttagtgaactttctaaccgcagagactaggacacaaattacgtctcaaggtaacagtgcaagttagagtacggtattcagagaaaagagaaaggctgaatcccaaatgtttaactatgcaaaacccaggggtgtctggggcctcggacctctgcagaccccagcacggcacagaaaggaaaccagtatttgcaccgtggcaaccgcgaaccaggtctttcaaacgcccgactgcatgtgagcctcacattcttgtcatgttggtgttactgccctgttctagagaggtgaggacagggggtcaggaggtccagttcttgccagggttacacagtgccaagtgaggatggggaggtccctccaaagcccttggtgctcacaagcactgtgccttactcaaacatggatgatgctttggattcaggaaaaagagctgggtcaggacatttcttggttgaccccaaggcaggtgggtcggggcccagagacgagccctcggcatccggcgtcaccagccaggcaggtgtcgggatttctcctcagaggccttggtgtttttgaggaataggtggcttccctgcagagacagccgtagtcagagctgtccttcgtggaaggctggcagggaccaggcatcatggattaagtcacttacccctcccaactgtatgaagtcagtaccagcatccccgctttacctctgaggaaacgaagggctctgacaagctgagctacgtgtccaaggccaggacaagctggaacacaaacggaggtctggctaactccaaagcccacacccctgtcactcactgtgatgccctagtgtggcaggatctggccctggactatcttccacctggctggtggaggggggccttggggcgtcctgcctgggctagaaccgggcctcagtcttcactgtccctgcaggggcggccagaccagctccacttcttcctggctcacacgtcacacgcacccctggacggtgcacacggaacttcctcaaacctgagctgctaagtgggggctgagccacaacagcctcaccagcaccgcctgagggggaggtggagagacggacggaggtaggaacatgcctgtgtcccctaactgaggcctcagtcacccttctccacccc

SEQ ID NO: 1243613 - DNA, 4001 bp, Homo sapiens
tccttgctttgagctgcaccttcttcagggaaaggcagcacctgtaaaacctcaatgaaccacaggagcgttcttggaaagagtgaccaggatggggtgagccccctcctcacgagctggccctttcactcctcattccccactttgaagccgacttcaacaacagtatcacggagaccgaagcaacgtgaactccaggtcccaggtccgtttcactgagtcgaagcttccttttggggaagggagaggaagccaagggtacgtttccttttcagggaggcagagtcaagacctgaccaactcctaggccagaccaaaaagaccatttctcctctgatcgctgaccaggccaatttcaagtgagaacagggttcctgcagccgccctgctgggccgcaggagagaggctgcctcagagcttgcttccatcaagagggtcctgagaaggtcagggggcactggccccacacagcccctccagcacagccgcccctgggaaggagcccaggaaacctgccatctctcttccggcaagccaccatccccctcaagtcagccttcgacaaggagctccaaggagctccaggttaccagggagataggaaagcaaagtgactgagaagggtgcagagccgaaacacctggtgggaaggaagaggaaggtcctaaaaccagccgcctgctgctcccacagactcaggcccagagcagccggcctgggagccacacgtgcccaccccactccctgccacaggcaggcagggcaccccttggcacgtcttgcctcttgaggcagggtccacgggcttctggacacctccctacctgggccggcttcatcctcctacgaccgacagtcgtgttgatgacatgcacctgtcccgggacttccccccagcccccagccagctgcgggagctgcaaggaggatggtccgggtcccttccaccgaaaggtggtgtgtgtgtgtgtgtgtgtgtgtgtgaccttcacagagtagcttgccacacccctctcccgctggccctgccgacctgccttccacagttgagggcccagacctcggctgggggtctctcacggctggaaacaaacctctccttcctgctcccacagcccctccgtgtcctccgcctactgctgcatgtgcgcggagcacacaataccgtgccgcccagcctccgcgcctctctccagaaacaaagaaactcccaacttctccctctggctcgcgctggcaccctctcggctggcaacgccgccgtccggaccatcgccacccatcgccacgctgtgcctggcccccgcagaccctctccctggcctcagggctactacgtctgcgggcacagctcgtcgccgtctctccctaacagcccctccaggaagttctctcacactagcccaccaattccccaccgatcctcggggccacctggacccctccagcctggtccttccatttgcaagcggccctgctctgagcagcccccaggtttcaactctaggctggatgccgccaaaacgaagggggaattcaggtccagccgctcgcccaccctccttccctgcggccctctaacctccccggccacatctaagcccactccagccggcccccagaggtgggagggtccgccacctcccacagcgagcacctgggttaccataggtgcagttacagcagaagcgaataatgaggagaatctccatggcagcctctgtccccgcggcgggagcgtgcagccatcgctccaggctccccggcgcccaccagcagcccggccactcagccaccttgctgatgctgccgcacggactccagcatcgggcagccgctccggagtgctcttccagcaagggggaggggagggaggcgcgtggcgaggagaggagggaaggggaaggggaggaggggtagggagggagggagccagcagcctgctggcatcctaaagaggagcacgtttgtagctggctggctgcctgggcacgaggctagagtcctcgcgtgcgcgcacacgcgcactcagctcacactcacacgcgctcacacacgctcacgctcacacgcgctcacacacacgcacacacaaggggaagggcgccgcgttcacgcagcctgttgcctgcacagccagacaaaggtaggtgcctgtaatccagcccgctccccgaggtaccttccatggtgacagacgtgtggctgtccttggagtccttgggacctttcactttgagttcctgccaaagggaggagaggagtcatggcctgttctgtccctcacctctcccagcccccactgtgagcctggcaagaaggggagttctgaaactcagggtgtacatatgagaacagaggccgggtgtggcggctcacgccagtcatcccagcactttgagaggccgtggtgggcggatcacctgaggtcggaagttcgagaccagcctggtcaacacggtgaaaccccatctctactaaaaatacaaaagttagccaggtgtggtgtcaggtgcctgtaatcccagctacttgggaggctggggcaggagaatcgcttgaacctgggaggcggaggttgcagtgagccaagatcacaccattgcactccagcctgggcaacagggcgagactctgtctcaaaaaaaaaaaaaaaaaaaaaaaaaaaaaaaaaaaaaaagaaagacaaaggagccccatggccatgggctgcctctgccaccccaatcccctgcaccacacctgtgaactcctggagcctcgtggagtccagtggctggggcgtgggcaagaaggaagggactccaggtcccagagatgagagaggctggcagggagccctgtgattacaggaaccccgactcaggaaccctacacgtcggccaagggcagacagggtttgagttgaccagcgccaggtactccagccaatctttagggcatgaggaacccatgaggtaggaaggaagggtcccacacgccagcagggaagtggtggaccttcggcagagatgctgagctccccaggacagtgagctgcatcctacccccatcagagagcacttactcagcccccagcacccccgacactccccacccaccactgcccatgctgggggtccgagaggaagcttcgagggaggaacagccaatgcccctcctggatcccaagccaggcagcaggtagtgagtactggaaagacccccgggatgactcatctgctccaagcctctttatcctcctttagagacgttccagccccagcttttgctaacaggacagtgcagcctgcaactggagctgtaataccatccccacttggcagacggagcacacggagcctcaaagaggggtgtgggagggaaggcaggaggcaaggtgaggccacggtcaggtgcccaggtgatgaggccagggtcaggtgcccaggtgatgaggccaaggtcagctgcccaggtgatgaggccaaggtcagctgccgaggtgatgccacctgcttggtctgcaggggaggaagcgctcagacagcaggaacttcctacttctgtctcaagctgtttctagacagagaaaactcctggagatggagcttgggtgtgtgtatattttggggggcgggggggtgggggatactcagcgtccccagcctgtgtctctggctggtgcctggactcccagatttcgggaatgtttcctcacgccccctccagtgaagtctagggtatgaaatcactcctgctgcagagaggagcctaattgcagtaattaagtggcagcctcagcaggaagcaagcacgtcatcgagtgagtcaggatgagaagccacctggcagaaagccaggggcctggctctgccctccagggtgggcaggctgtgaggggcttatggttgggtgtgggggtttctgcctaggcacagagaacaggcaatcagcccaggccaagagaagaccccacactctctgcaccatgtctgaccccgggatcttgggcggcctt

SEQ ID NO: 1243614 - DNA, 4001 bp, Homo sapiens
gcacaggacctatgcccaggggatccggctttgcccctttgatgttgagaaaccaaagcagaatgaaccatcacaaggacagctcctggggggaggagaggaaggaacatggatggaggaggaggcgggtggagaagaagatacagggaatgacctggacccaaggggatgctgaggtcagaggttgaatgttgggtaccacacagcctccagagtaaggctttggggctcaaggcatcacccttctctactccccccaccccccccatatgacttatcaaggaactctagctgggatgacccttacaaatgcccttgttggctcacgcctgtaatcccagcactttgggaggctgaggcaggtggatcacctgaggtcaggagtttgagaccagcctggcctcatggtgaaaccccatctctactaaaaatacaaaaaattagccgagagtggtggtgggtacctgtaatcccagctactcaggaggctgaggcgggagaatcacttgaacccgggaggcagaggttgcaatgagcggagattgcgccactgcactccagcctgggcgacagagccgagactccgtctcaaaaaaaaaaaaaaagaaagaaaacgctcctgttccatggcatccagtgcctagaatcaggctgaaccaggctccacgtggccccacgtgcctcccccaactcctgcctgggagatgtgctgagagagtgggagggtcccactcacgtgggccaggaagggcgaaatccactatgtaagcccaggaggaccctcttcctaatccctgagagctttcgggaaaggtgtctcagggaagggtggggagaaggggcggtgcctttctagcaacggagcaggagcaaggtgcggtggtgggggcggggggcggctctcggttcgccccaagcccccccacaccattacccgtgatcagttacgcatcccccggggccatgcaagagcaatcacatgatccagagagatttgggagcgagggggtggagaactcgagaaggtttgttttttttttcttctgagggtggtggtgatgatgagggtgggggtggtgatgaggctggcaggaaagattgctgagcccgggattttcagctcccgcatccaaacggcccccgcggatatctgcaccccccgtctcccctcccacccgatcccaccccagcaccgaacccctgggccctgaaccacacatgacccggtgcccctggggtggcaaactcgggtgccaacgactgctcccaaaacggcctttcggcttcagcctggacagagaagctgccggtccaggggcgggggcagcacccagaagggcctccctcccctgaggctcgcggaggccgggttcacaacaggtgggaggggggacgcagctctcggctcggtccgcccacggtccccgcccccggaccgcaggaatcctctctggggaccccccgcccgcgccccccagaccagcccggctcctgggtcccgaccccgatcccgattcccaacccgaccccgatccggaccccgatctcgcccccgcccgcgctccccggaccagcccggtgcctgggtcccgatcccgatcttggggtcccgatcccgatcctggggtcccgatctccatcctggggtcccgatcccgatcctggggtcccgcccccgcccggcacacgtactgctgtagagggtgtcgatccaggacaggcgcggcaggccccggtggctgagcggctccatcccgcggcggcggctcggtcagatccgaaacccgaccctcatcgcgcaacaaaggagggagagcgggcgggagccgggggaggccgaagttgcgagcgcggaggggcgaggaggccgggaaccaggtccccgggaggagcgcggggcggccggggcaggggcgagggcggggcgggagcccccaaaaccctcccgaaccctcccggccccagcggccgcgccgagcccagctgcggatcccggaaccgatgagcaacttcgcggggggcggggcgggggtggggcttcgtggtggggcggggctttggtgcgggggcggggctttggtgcgggggcggggcggggagggaccaatcggctcgaggctccgccctccgcaggacgcccccggccgggctaagggggcagcggggctccggcgctgggcgaggaggggccgcgggggtctcggggggtctccaggcggcggcgcagacccaggtccccctcgtcccccccgcgccgggctcagcaggatcctggcgatccgcaaaccaggtgccgtggggggcccgggagcccacaggggtgacatcacctcccgcccgggatctccaagcgcggcttcgcgggcgggagcggcggccgggcccctccccagccagacccgctgcgggacccacggggtgaacgtcctgcgcgccgcgggacgcgcctctctcctcccgaaccttcccccgctcgtccctttccacacccctgacctctgagcgcggccgttcccgccacacatggaggggggcgggtggagacccgggaggaccgaagtcacgggggctgtggggccaggacagtcccacatgtgcccctcctgggcggaggacaaactggagccaggagaagccccaagggctccacgcgttcccctccaggacccctcctggggaccccgagccgcggcctggaaagcccatcgtgtttgcatcatcacctagaaatggtgggaagtcgggtcaagaggcctgagaaatgaccgtttagagacgaaattccctctaaggaagaccccctcgcccaagggcagtgaagagattgggggccccatgcctgtctcctgtgggctgattctgtgggagccatggcagcttccccacagacctctttgggccaagcgaccctggagcagggaaggacaggaggggagtcaggccaggggggtccagggcagtggggctgaagccccttcctgaacccagggaaagggaagcagtggggcccacccagggggcccggtaccccagatagtgacatttcagataccggagctgtctccaccccaccccatccccaggcagcttaaggggaaaacttctgggagcccagccctacagaggcctaccaggaaggttaagtcagcctggcctttgccgggggcagtgtggtcggcacccgcagaacgctggaggggtgtgggggtcggtcctcatcactccaaacagacacacacacatctagttcttaaggggagaagcagctcctcccccaggatgctgagaggaagccccataagctgcttgggcagaggcctctgcagctgccccaggggagatgggggtcacccactcatcacaggctggggagcccctgggagacgcacaggatgatgctctgggtggggaagcctctacaggtggctgcagcagaagtggttttcaatattattagcccgtccctgcgtccccagggctccctccgccccaatcctcctggctcaggcaccagcgctgtctcttgccgcccctccctgcagctgtcaccctcccaccgtccctgactagcacacaggattgggagggccaagcaggcacctggagcttggcagggagggggcgtgcatctccaatgagacgctccagaaatagagcttcggcatgggaagggaacgagcaggctctcggaggaccgcgaggccggaggagccatgaggggccaagggcatctcttcttcccacctggaactctcggaagacagcccaggggaaaggtggaaacgggcgtgagctgccgccaccaggagccaccagcccaggaggcagcagcaccgtcccctcctcaaaacaacaacaagcaagaacgctcgggccctctccccacactgtggggttttcctgatggccacatccggcgctgactgtgagggagctatggatgtatgcttctgcgtgagtcacatacatttgcgtacattttacatttttatctacaaagg

SEQ ID NO: 1243615 - DNA, 4001 bp, Homo sapiens
aagtgatccgcctgcctcggcctcccaaagtgatgggattacaggtgtgagccaccgctcccagcccacagtgatccttttacagcaaagctactcctttgctctcaacccttcgtcatattctgtcacttcccaataaaatccaaaccttaccagatgatacatgatctgccttgatttccatctaatttctctcatttgctgtgctccagccacactggtcttgccctttctccatgccaaacaaatccccatttcagggtcactgcacttgctgcttctcttctaggatagtttccctctagaaatccatgttgctccttctctcattaaatgatcagatatttatgtgcctccttagctaagaggccttccttatctaccctaactaagagaatccccatatcactcttatccttttatcctgatttatttttccataaaacttgccacattactgggcattatctatcatttagtaatgtgtatattgcttattgacagtcttccctactataatatgagctccatgaggcagagactttgttttgttcactgctgaattcccagcacctacaacaagcctactcactaaacatttgttgaattaatcttcaggatacatcaaatgtaaaatatcctatcatatatttattgatgtgatgcataggaaaatgtctggaagggtacataccaaaatgttaattatttatttaacctggtgggaggtggtttttctttccttttcttttctttttgagacagagtttcgctctcgttgcccaggctggagtggaatggcaagatcttggctcattgtaacctctgcccccagggttcaagcgattctactgcctcagcctccggagtagctgggattacaggtgcctgccaccacacccgcgtaattttttgtatttttagtagagacgggatttcaccatgttggtcaggctggtctagaactccagaccctgtgatccgcccgcctcggcctgccaaagtgctggaattacaggcgtgagccaccgcgcccggcagggcttttttttttttttttttttggaatgaacttgtattatgcatataccaaaaaagaatgaaagggttcacacaggcataaagtgtaagtgaattctaaaaaaaggttgggcaaatttatcaaaggcagacttctaaatagatgtaacagttatatagttcagataaaccatggtttgaattcccttccccagtacttcctagcagtgtgatcccaagttatttatgtcagtgcctagatttcttcacctggaaaatagggataacaacaggtgcctacctcacaagttttaaatgagaccgtatgtgtaacctgctttgtgcaatgtctggcatgcaataagtactcgacaaatggtagctattagaatcatcattaacagcagtaataagagatcttgggacatacctagccctcaagattgacatcagagtagaccaccacatcctctcatcattgcgcctcaatttgggcctctgaagcccaaagaggggatggttctttccaaagaagacaatttcgacgttccaggagcatctgattgaaacgcaccctcttcaccccttaaaatcagtctggttcatccacgagcagcccttcggggcccggactggagaggcgccacggctcgccgtccctgggcccagttccctcagcctcaatttcccttgctgcaacaggggtggagatgggaacgttatccccaaacccaggcagtcccggctcggcccgcctcaccgcactccggaggggaccaaacagccccacgcgccaggaagcctcaggcaacgggccacgcgccacacgggcaaagtgattactggtcggatcaaaagtcaggcaagcggctcagccccatcctcccagtcctcgggcacggggacagcagcaggcgcgcggcggggaccgggaaaaggccaagagggcggtggcgggcgctcagcacccggcgggggcctccacggccgaggggcggaggcggcgggcgcgcggcacgcggcgcgctcgccactgcgccgcccgggggcgcgcacgcaaagcccggaggcgcgcgcgaccggcggctctttggcgcggattagggggtctcggcgaggtgaggcgccaggcagcgctgggcgggcgggcgggcgggtggcggagcgcgagcccctctagcgggactagggagaagcgggggccacgaggtgcggcgggggaggagtcgcgggctgcgggccccggcggcgggcttgacgcggcaggctggcgggccggcgggcgggcagcggcgggcctcgccgctctgtgggggagggcggtgtggggccgggcctgaccccgggggcccgccccgcgtctgggcggtgccccagtgccccggcctcgccatttcccgctcagccctggagcgcgtagctctaccaagaatggccactgtgccagatgcccctgaccagcgttgcccatttgaatttcctagcaggccccccaaagtaggtatttcagtaccctgttagagctgaggcgcaggtaaaatgactggcccaggccggtcccaccccgtaaggatttgaacgttggctccacaactcgggagcctgcgcctttcctcctcccaacgtggactcctgcccggcgaagtgcctcacttccttctcccggtaactgattcgaatttggcgattgttagtttggagctagcgccagtgtttccacggaagttggtgtcagaatgtggtctcttgtgaaagggggagaaagaagattctgcagactgcaatattgtgcttttttgcctttttttttttttctcctaggctgtactgcagtgcagtggcacgatcgcggctcactgcaatctccgcctcccaggctcaagcgattctcgtgcctgaggcgtgggccaccacgcccagctaatatttgtattttcagcagaggtggggtttcaccatgttggccaggctggtctcgaactcctgacctcaagtgatccttccgcctcggcctcccaaagtgctgggattacaggcgtgagccaccacgcccggccctactatttttttattttttgagatggcgtttctttcgcccaggctggagtgcaatggcgccatctcaacacactgcaacttctgcctcccaggttcaagcgattctcctgcctcagcctcccgagtacctgggattacaggcgcccgccaccacacctggctattttttgtatttttagtagagatggggtttcgctgtgttggccaggttgatctcgaactcctgacctcaggttatctgcccacctgggactcccaaagtgctgagattacaggcgtgagccaccgcacccggcctcctactgtgctttttcgagtgttgatcagtccctattgactgtgcatcctttactggacgtctgtttttgtttttgttttttgagagggagtttcacacttgttgctcaggccagagtgcaacagcgcgttctcagcccaccgcaacctccacctcccgggttcaagcagttctcttgcctcagcctcccaagtagctggattacaggcatacgccaccacgcccagctaattttgtatttttagtagagacagggtttctacatgttggtcaggctgatctcgaactgccgacttcaggtgatctgcctgcctcggcctgctaaagtgctgggattacaggcgtgagccactgcgtccagccttgacatctgtatttgaaatgacacagctatcccttgtaagacactgcgcaagtaacatactctttcagagcttgcttgcttttgaaaaagcagcttgccccaaaagtgtgggagtgaggattcaaagaatccccacaccttggtacccacgggtacctagcaaattgaaaaagttcagtaaatttggcagttatttgattgctgcgttcgtaatacacccttgctagactcatttttcttcagagctcaacttttcctgag

SEQ ID NO: 1243616 - DNA, 4001 bp, Homo sapiens
aatgccaccatttcccaagacttcctttttaaaaagcaatttaatcttatgcttgatgtatttctattatgcactggtaaatcaaaacaaaacaagcctggcgtggtggctcatgcctataatcccagcactttgggaggccgaggagggtggatcacctgaggtcaggagttggagaccagcctggccaacatggtgaaaccctgtctctaccgaaaatacaaaaattagccaggcgtagtggcgcacgcgtgtaatcccagctactcgggaggctgaggcatgagaatctcttgaaaccaggagacgaaggttgcagtgagccaagatcgcaccattgcactccagtctgggtgacagagcaagactccatctcaaacaaacaaacaaaacaacaacaacaaaattctacaacactagtaaacacagatggcttcataaattaatactttacctttggcatctttcatatgcccactttaaaatgtttaatattcttgggttcacatcagtcctcctgttatgcattcagttttactgagaaatgaagaaactgaggcaagagaagtgggaaaaaacttgctatttgtagcaagcaggcatctatctggacaggtaaactgtggtcctgctctattaggccacaatgcttttctgaaaagtgcctgtcaaataagcaccacagaaatccttctcatcacagacatccagggcatccccctcaagaagggacaaatatgagtattcttccctgctgagtgagaaaagaccatgtaaccaaagaaagcatgcttctcaatctatactaccgaattgggagggaaaaaatgaatggaaagagagagaaaatccaaggaaataaacttctgagactgaagatgtggttattaggtttatccacacattaggaaattactgaaacatcgcttaagtagaaacagaatcaggaaggcctagggtctttttttttattccagtcttaaacctccaaacaaaaatatctgaaattaaactatttctcctgagcagttatattcttaaatgtctctatagaacccacaaggcctacacgaagtccctgatttttagaggtgatttcaagtgtccattagtgtccactctcccactctcaaatccaaaataatgttggccccgatccgggcaggaccttcacgcacattttcctgtgaaatcattagcttcacatcagcttcctacgtcctatttccagtaacttcccttgatcagcatggcaaacgaggagagtaacaaaaggcatgtacatttactatgtccctcgcagagaacataataaaatcctgggaacaggaactggcagatacaacctgcctggccctggctctcgccacgatacaaaggcacggagagagcaagtgaggtctgcaccccacacctcactctgcaagagagaaaggactttcaatgcaatcagacccaacccgcaacgcccccttcccacgtggtcttctccctctcccgagcccagaatcggattggagaggggtctggaaggaatcagaccacgctggagctgggcaagaggggtggcgggcgagctccaggcagaaactccagccccccttcctagaggagccctgaactgtacgcctcccagttccgggatctgaatccccacctcccgagaccccagacctctccatgtctctagggaggggacctcaaggcctcagagctgcgggaagggctgggctgccccgcacccgatctggatagtgtggagcccaggccgcgtgcgggtgagcggaggctgggaggcggccccctgcctgccgccgcccctcccttggccccagtttctccaggtccccggtcacaggttctgggccggccctcacctcacctcagggtggcaacgtgtgcggtcgggcgattccggagcccctgcgtggaggaactgctgggcgggaggagacgccggcggctcgggcgatggctgacaggcgtgcagcaccaggccggcccggcacacggagaaggggcggggcttcaggggcctgacccgcccccgccccgcccctgtctcccacctcagccggcgagctccatgaggtgactacgtccggggttactccaggccgttcacctccgaccccgctccgggctgcggcgctgccagggccgccggggggcgaggcgcgggcccgagggctcagcggcagccaatgggagggcggcgcggggcggagcgatgtgaggcgatgccgatggtccgagcgcggatctgccattcggggcccagcggctagagggcgggcgggccgcgggcgggccgcgggcgggccctgggcagtcgtggcgcccctggcccggccttcgcggccccttctgccacagccgggtacggggccaacccctcggctcctcctcctggcggagaggggagtgggggaagcggtcccgcatgcgcctcgcatcagggacagaggcgtcccaagtgaggggccaggactagccggcctgtagaggcggggaaagggaacccagaattaaggcgggctagaatggggcaggcggtgtgcgggcccgtttgtctgtttaatcctaacacattaacaaggggtgggcaatcgcgtccactacctgtcctcatcacgctggctggtttccaagtctgggcgagctaagtaaccccatgctggaactccataaccagccccccgtttcgctcctcagccccgagacagcccactccaaaggtgttatacatgctggatcctggcgtgttgaggagaagcctcagtaaacgaagctcagtaagaaggggaatgtaccaaagaaccaccgtcttctgcctgccctgagcaaaatagttgccacagcgttccagacttttcggattggagaatgcttcccgtcctccactgtgggcacgccgagcctttgagaggaagccagtcggtgtctctagttttgccagttacttcatagcaagactttcatggtagctgtgtgttgaaaattaataataactggaaggggtcccaacacaatacaaacattgcgtagggaagaaacttggagaaaattgcacttgagaagaacagggtgaactcagcccttccaaggaggaatttaatgaagcatgcagcgcaccttcttaatgcttacaaacttgtgaggaaggccaggagaggtgcagaggatgacagtttggtaggaagaagttccacgccagagagtaaaaagtgaataggatagaaatacatgcccaggtaagaagttcttggcggaagctgaggcagaaagagggaaagattggtcaacaaggaacaatatttatctaggagccctcataatcccactaagtggggcttccctaagaatttatcaacccatttttaaaataatagggtcaagcacagtggcacgtacctggactgtagtcccacctactcagaaggctgaggtgggtggatggcttgaggcgaggagttcaagtctatatgtagtgtactgtgcctgcgcctgtgaatagccactgcaccccagcactggcaacgtaaaaagaccccatctctaaataaataagttaattaaataacagggattggaagcagagaacttaggaaagatgtggactttacagaacagggattcatatttcacaataattatatcactaatatatcaatcagttggacaaatgtagtgggaggaaaaagataattgggcaagacttcctggtttagtaagatgtttgatttgactcaccgaaaaaaatggcctgggaagagggaagccttgcctttccataacagcagtctctgaagctgacatgaagggagtgacttcaaaagaactaaaaaccatgcggttgcctcttacttttcttttacctttcctagatcctcttaagtaataggaattctttccccaggattcttttttttttttttttgagatggagtctcgctctgtcgcccaggctggagtgccgtggtgcaatctcagctcactgc

SEQ ID NO: 1243617 - DNA, 4001 bp, Homo sapiens
ctcgtactcgtgacctcaggtgatccacccgccttggcctcgcaaagtactgggattacaggcataagccaccaccgtgcccagcctatatatacatttttgaaatatatatttatacatgtatatacataaaaaattttgatactatattatatatatacacaaacatagattatatatatctcagttactttggaaaaaaaatttttagagatgggttctcactgttgaccaggctgcagtgcagtggcaggaatatatctccctgcaacctcaaactgctgggctcaagcaatcctctggcctcagcctacagagtagctggtactacaggctcatgccactgcactcagctatattgtagttacttttatacctctttgcctctcagtggaagttttgcttggttatcccctcaaagggtggaagaagtggtaaaaaagaaaaaggggcaattacagaggcagttgggggaaaaaaaggaatggaaaaggatgatctaaagacagattttgccaactcagtgttttttgtttattttctgtctttgcctaagtttagtttaactttcagtaattttcttcaaaataaaaactctacattataaaaacaagcaaacaaaaaagataatggagggatgccaggcacagtggcctgtaataccaacacttctggaggccaaagtggcagaattgcttgagtataggagtttgagactagcctgggcaacacagtgagaccccatctctacaaaaaacttgaaaaaaaaattagccaggcatgatggtgcatgcctgtagtcccagctacccaggaggctgaggtgggaggatcacttgagcccaagagttcaaggctactgtgagctatgaccgcgccactgcacaagcaaatcattcaagtcttttatgtcaattctctgcagggaggtgcagacctgcaagaggcctgaagaaggcccaagaaggcctgactcatttcctcctcagcctgagttctaatggcaataagaaaggtcccaaagtgaaggagttcggcatcctgaacaactctgtctgactacataccacaattacagcaggcacctttcctagccccagacacacattctaaaaaagttttctgcaaaactatacaatatctttcctttacagcagttgaagagacttcactggaaatactagccaaatccagggagtaaatctgatacatctgaggttcccttcaggaaataatagcacagcagggtctgcatggggtgcttgttttcaacgtagctaaaatatcacacatgggctcagggatcttttattcaaattcccaatataaaataaaggtttagacattcaggagccaatatgcccatttttattcattttcttaaaaaaaatagccttcattttttaaagatagaaaaaaaatgatcaaataaatctcagggcttagctgtcagtaccttactgtttttttaaagatatatatattacccaaatgtggtagcctaacacttacctttgaagcatgtaatatctcatttccttattttcctctggagaaccctccatatcaagatgggaaaagaatggaagctttttcttcagatttcggccttgtaaacacaagccgcagttcctcctcctgttgcagctgcttaaaacccaggaggacaagagatactgtgccttctgcctggcttcagtcagactagaatactcctgatggcctcaaactatagtctttttgtctaattgttcccaatttccttctttccccacctttctcttcctttttgcatcttctctcctccacacacttagcttacacacacaattagttgatttcccaagggaactgagaggagccggggagaaatataaaagcttgtttaactagaaagtagatcttagcagctctcctttagttgcagcaaacattttcaacaacagtcactttcttctgacagtcaacggagaaaagctccactgcctctcctggctgccaggagcacatgacagggaaagcccaggacaaaaagaccaaatttacaaggacaattaagccaagaaaataatgggctcatgaaatccagagggaggagcacagctcggtctaaagaggtaatttctgagatccaatcaaaacaaataataccaattatcagactgcacggtggggaaaagcaggtcaggtgggaaagtaagcacgtagaaaggaaacacgccactactagggaacttagaatcaagtgtgagccacgattctaattttcaggccaaagtagtggtatatatagacacctaaactaaggttttatgcaccaaagcttgagaataggaatggagctggtacaaaacggatacagaaaagattgtgggttaaacccttaaaaggaaaagagaccctgacaaatattttggaggtctaacccccttaagcagggaagaaaaatcctgcctagaaagactacttactgagacacatatattactatgaaagcaaatttgccacagacagatctcttaaagaaataaacactagctgaatgttatcttgtaatatcttcctgtttttagcttttacttaagtagatgctcatgatattctgtgtattaggagaaaaatcaatggcaaaagaccctaaaggcttagaatctatagaaagacaacttcctgaggcaagtcctcaggactgtacaccaaatctaacctgaatcatgaaccataaaaaatttattcccatcaaaatgctggatagaaatagttaacaatctgatgccaaccacgctgagaatatattaagcttccagaaaaaccttcaaaaacagaagtacacaaatgacctggagcatagatagaagttaaataatcagataaaagataaatgattacaacaaacaaacattgatctgaaggacattcgggcaacttaagttgtaaagactcaagttgcccaaatttgaaagcaactcaatcaggccacccaacatgacaaccagctataataaaaaatggaagtcctggttgttctctggtctgtacttcacatcatcccttccacaatgtgccaatgcccattaagttagtcaagtttactttccctttaaagaaccaagctgacacagaggagcccttctatctttacgtctcttcagaataacctgtctcaaaaatagagcactgcagcctttgttcaggaaagttcagtagccacagatgagaagctgctcaattttacacacacttaagtgtctacaaaacaaacttgttatacaagttcaccattcaaaaatgcaaataaagcactaagtgtaaaaataaggcagactattttgcactcaactatatcagaaaaatatactaaagaggcacactcaataatcgagtttatgcttcctttcaccaaacggatctttctacgacaaccaaacactaacacagcatacccaggtccaaaagcaaagctagagatctatatagatcttttatagacactgctgctcacaatctttctctaatattagaatacaagaaataaaaagccacattcatttctccaaatttaaagcatcccccttttaatctaccatgaacagtgtccaacgtagacacatacctggcacaaaatccaactagaagcccacactgatcccagcattgtaacatgccaaacaccaaggatgacgtagcagtttacccggcagacagtgatgcattcgctagcttgactgcaacacagtctgagttatactgcagcacacacactgtgagagactgttttacattgggtttttacaagcagagaaatcttggatcaaggatgtgtctctgtcaaaaaatcaagtgaccatatatttaaaggtttctttgtggactctaaattctgatccattgacctatatgcctagccttgaagcaatgccacatggtcttgataactgtgactttatagtaggttttgaaatcaggtagtatgaagacctccaacttcacattcccttttc

SEQ ID NO: 1243618 - DNA, 4001 bp, Homo sapiens
gcatgtcccaaccagcacactgtgatgcctccccaaaaccttcccccaactgaaatgctcagccatctgataatctaagtgccaactggcctaatctgtgccaagcccagtgtgccccccaatccctggctctcctagggttgcctcaccagatgccagcttggggaggtatttttctttctgggcctttgtgccaaagagcaggatgcctttgaaaccgatgctctgatgggcccccagggtaatgcccacgccaaggtcatgcatgcccacgatctccaccaaacgggcgtactggaggggaagcaggaatctggggttgtcactggctgcagggggacctgaccttaacaggagagtgtgggcaacagggcagttcctgacctagggcagttcctgacctagggcagtgcctgacctgggccatccccagtgtgtagaaaagaagtggggtgtgcaaagggcacagcagagaatgctggtctgtcttaggtctaggtaggagggtgacttgctactagtcagtctattgttaggcaatccccaacttagagatttgtaaggacttgggaaccagggtgaggcccatggctcaggcctaggggactgcatgtaaattgtgttatgtttggacagttaacatccatcccacaggcacccagggcaggtgcttagaagagaccttagccctagtctctaggtctatggcaaaagagctgagtctgccaagctggggtatggcatactgggatgtggcgatagggcgccctcacctgggtgttgcaaaggcccacaccacccagctcactgggcacttgcagaccaaaggcccccagctccttgaggccctgccaagtggtctcctccaccatctccagagcgtcattcttggcgggatcgttcacttcctggggaaggcacaggatcccacatccaggctccttttgagcttaacatctccaaacacctcaccagggaccaagccccgagtcattccttacctcgaagaaacgggacacaggctccaccagctctttaagaaactgtgtctgctcttcgttgagcactgcagagggtgggggacaggctggtcaggccaggctggcaggggaaaccaccctggccccacccagctctgattatcccttcccttaccggacgggtatgggaacacctgatctgtggtgagctggcctttgaacattcccacagcaaaggacttagattcctgggcagagagaggcaaatttcagggctctggttgggtctggctaaggtccacctggcctcggggctacctaccgccttggccggttttttcctggtcagagcgtcagaggggtgggaatctgacttgtccagagccagctgggaaaagagacggttagcaagttcagggaagggacttccgctgtgtcaaggggagaacaggcgagagccgcgcggggaggcggcgcgaagcggtgacctttcccctagtttcgccctagggcaccctggcttgccctttcccctactttcggcgactgagcagtaggcaggtacctggcaccaagagggagatccctgccgatggcgggcgccgaagcggaccgccgctcccacacccccttgccaaggctgcggtgacttacctgagcggcacccccggcatagggccgccgggcagggccgggccggggctgccccaggagcgccgtgagccgcgagctgtggggagtgggggttcagtgccggcccggtgcccagggccgctgcccaccgtccctcttgtcacacacagaccttccgcccccgagcctcagcagctgccgccccaagctcgcggccatccgagccgcctgcatctccgaatctctccgggcgccgctggctcgagctctgacccagctctggcgtcctgcacgcccacgtcctggcgcccctaaccctgactcatcgtccacagtgcaccgggcggcggacggttgcgggccccggggcatgctgggagctgtagttccctggagcccggccctgcgttccgctgacttagagggatctccaagcgtccctcgtctcccccaaactccttaatcccgcccgtccgacctagagtctagtcctccgacggggtgatgggataggatgggacagaagaggaaggggcttaagtcactgcagccagagggatggaggtggactgaagggagggcttctccggtggggttagaagggaaaagtagggaaagagaagtgtaaggtagatggcagaggcagagacatggaaagacagactctagggttcctgatgaaatctatctcggccaacacaaaagggagggtacagtggtggggggcacccaagctagggtgtgagtaccctaagtgtattcttctgagatgtaggccattcactaactcttggaacagctacagtttcacagtaggaagacccccccagattcactgcccctcccttagtaaagcctctgagaccttcctgaacattcccttctgtctttgccctctgttccttccagagaccatgtgcccaggcagatggattcctcccgggcctgagaggaactgcaggaattctcctgcctcttacccgtaaaaccccaacttctctagccctagggcaggaagtcccaaacaatttctacccctttttctgcaattctcattggggtgagaggaggcccaggaggagagagagctgggctcagcttctttttgagctgctggagccctctgtgaggaggccctctttgctggcttctcaggagagcgtggctaggttctgcctgcctatgggaagagggggccagggtgtgtggagcaagatggtggcggtgctggtgccttgggacctgggggaatgggacagctggtcggctcagagacggcctactttactcacagctggaatttagtggggagaagcagctcaactccaatcctggaggattagggagattaaagtgagagaagagagagatgtcccagagaccaagaggtgaaaaacagggctccttgtggaggggaggtctgggagcgaagtggggggctggggctcggagatccttctccccaaatctttccgtaggggctggggtgaagggcacagtctggggagatgaagtgacagtgtgttcatcttcctgtgttggcatcttccctgtcccaattctccttgcatctcactagctcccaggtcagccctctggctcctggcacccccactgctgcggtgggcacccccactcctcacagtgctgcatagcgacctcttccaggccttgctgggtgagtagcccgttttctgagggacctgggcctccaagggccattactgaacttcgggggctgtttgggagcccagagatcatttggtccaagctggagcaccatgcagggtcctgcctatggtgtcctccatgagtgtggaccagccttggctgaaagggctcctcccttgccagccagccagcagcggtgatgacaggggtgatgtgcctggagaggcctggggtggggaggtaactcagttctgttcctgtgacagacatcctggactattatgaggcttccctctcagagagtcaggtaaggaggtgggggcgagcgcctaacttcctgaggggcaggcagggctggaggggtgagccaaatatcactaatattacctggaatcttgggggccctgctgacaaaagcctgagtcagtggcccagggacttggggcaccgagaatgcactctctgtggtcctgtacccactctccctttcttcctcgttttctttggctgccccagtttcaggcactaaagagtctagggcttaactttttaggtttccccctgagaaacctgagggagaactaggcccccagggattgcctccttcagctcctccctcacacccgaccccctaccgcctgccgagaggcctccctcccgtattcaaataaccgtgggtgctcccagcccaactatagatgcttccttctctaagaa

SEQ ID NO: 1243619 - DNA, 4001 bp, Homo sapiens
ctcagcttctttttgagctgctggagccctctgtgaggaggccctctttgctggcttctcaggagagcgtggctaggttctgcctgcctatgggaagagggggccagggtgtgtggagcaagatggtggcggtgctggtgccttgggacctgggggaatgggacagctggtcggctcagagacggcctactttactcacagctggaatttagtggggagaagcagctcaactccaatcctggaggattagggagattaaagtgagagaagagagagatgtcccagagaccaagaggtgaaaaacagggctccttgtggaggggaggtctgggagcgaagtggggggctggggctcggagatccttctccccaaatctttccgtaggggctggggtgaagggcacagtctggggagatgaagtgacagtgtgttcatcttcctgtgttggcatcttccctgtcccaattctccttgcatctcactagctcccaggtcagccctctggctcctggcacccccactgctgcggtgggcacccccactcctcacagtgctgcatagcgacctcttccaggccttgctgggtgagtagcccgttttctgagggacctgggcctccaagggccattactgaacttcgggggctgtttgggagcccagagatcatttggtccaagctggagcaccatgcagggtcctgcctatggtgtcctccatgagtgtggaccagccttggctgaaagggctcctcccttgccagccagccagcagcggtgatgacaggggtgatgtgcctggagaggcctggggtggggaggtaactcagttctgttcctgtgacagacatcctggactattatgaggcttccctctcagagagtcaggtaaggaggtgggggcgagcgcctaacttcctgaggggcaggcagggctggaggggtgagccaaatatcactaatattacctggaatcttgggggccctgctgacaaaagcctgagtcagtggcccagggacttggggcaccgagaatgcactctctgtggtcctgtacccactctccctttcttcctcgttttctttggctgccccagtttcaggcactaaagagtctagggcttaactttttaggtttccccctgagaaacctgagggagaactaggcccccagggattgcctccttcagctcctccctcacacccgaccccctaccgcctgccgagaggcctccctcccgtattcaaataaccgtgggtgctcccagcccaactatagatgcttccttctctaagaaatgaaatccagcctcatcgtctttgctgtcatcgctggtggctggccaggtctccatgtttgcctcaggggcctctgtgcttctgcttctatctcctttcccattatccgggttcctgccagcacagaaggagttaactctgccaaggcaccccccccattctggctcctagctccctccctccctccccctgcttcctctctcctcctctctccccttccctcttcggctccacggctccctcggccgctgccgtttccaacccccccaccccactcccccgccacggcccctagcccctggccgtttggcaagacccccccctaccccggggctccccgaaatccagttcccctcccccaccccagctcatgccccagcccccgaactccggggctgccagcccccggtgcccccgcccctcctgagaatcggggtgtgctccccaagccccctcccctccactggggagccccttttagggcccccttcccctccctcccacgctcccctccccttcccttctccaaccccctccttcccctctcacccctccccccatcctggccccccctgcaaaagtggggtgcggaggggggaggggtgagaacccacggaggggaggaacgaaactccgatgaagtcagagccccttacccgccgccgcggccaggccccccaacatggactgtctctgtatagtgacaaccaaggtaagcatgatgggggggctataaactggggggagggtatgagtttgtggggaggggttagtaggccttatctgggactggcgcccctggagtggcagcatcagaagtaagatgtatttgggggtcttaatttagttttggggttcacatctgagaaaatgcaggatttggccacaggtgccccctggagtgatccctttgtacctgtagggatatggaaaatttaggatattccatggttcggggggcctggcgggtttgggggttcatcagcgctgtttgagggagacttatttaaggagaagcctggctcataagggagtcctgctggtgtatgtgggaaggtgggctatgttggggggttcctctttcctccccagggaaaagctggcttccaagggccttgtccagttttggggggctcctggcatggggtaaaggttattggttgtgagtgcctgactgatctgggggtgtcagctggcagggaaggggtgggccttcagactctagaacaagcatctcgtggtggctgcatttagggatgctctctcaatttgagggaactgttaatttagggttcagtcatatagaatggaggtagttggaagttgtcagagggctggggccctggcatgggatcacctgagggaatggaccaggtgaggcaaggatttgggggtactcccataggaggcagaagattgcagcagccgagcttgccagcccctgaggaggaggatgagaggcttagggagagaggggatttgaggagggggaccgggtgggtggtgcacaatttgggggtggcccaaaggcaggtgcccaatatccccatctcctcccacactgtatctagccctgatcaagagagagggagaagagcagatgtggggactgttccagatacccctgacgcttgggatcaaggtgggggaggacacctggatttaagggtccctgagggcttatgaccgaagttactgaggttactggggtgaaaaggtgtaggaggagggcagggctggcagcgatggggatctgtgcaagagtgtccctctggttggagcctggcaaaggcaggagatctcggatggagcacaggcgagctcctggtgggatgcagatacctaggctctccttggagactctgggactggagagctggatgcctggtgtgtggagggaggcttgggcgggtggcaggcagctgggggctggggggtgggacaggaagtgggggccgggggaggcggggtccgggtgagtcacaggctggggagggggttatatttagtgggaactgcagcttttcatgggagggagctgaggacacacatgttccctgccacaaactcacacatgtgtgtacacatgcattgtgcacgtgtgaggatggttggaagagattgggggctgaggacctttagatctggagcccccaccctctctccaccagggcgactttcttgtccttcattctgtgggtttcgggctttctcccaggctgcctcttccccacatcccctgtagtttcggtggatttttatgcctcagtttctctggcctggtttcctctgctcccgctgtctcctgcccttaggcctgtcacttggccttaggctccatggctgtggtcccctgcattccaggtgtaaatagaaagcccgctggaatgtgtgggctctgcttccaacacgtgaacacacaaatgggagcgagggtgaggggcttgccagcaggcagctattctgggtgggtgggtggccttattcattacccactccagactcctacttcttccatggagcccagggttgagcatccctgaaggaaggaggcttacagagcagatcatgcatttggggtttacagaggcgtggagacccaggcttgccacattccttggctggaaaacttgtcagcctcggtatggtggggactccaactcccataaggccccgaggcaccagatccctcaatgttagagggt

SEQ ID NO: 1243620 - DNA, 4001 bp, Homo sapiens
gcactttgggaggctgcggcaggtagatcatttgaggtcaggagttcaagaccagcttagccaacatggtgagaccctgtctttactaaaaatacaaaaagaaaaaaaattatccaggtgtggtggtgcacacctgtaatcccagctacttgggaggctgaggtaggagaatcacttgaacctgggaggtggaggttccagtaagccgagatcgcaccactgcactccagcctgggtgacagagcgagactccatctcaaataaataaaaataaaaataaaattattatttgtagagatgaggtctcaccatgttgcccataaaacaatgttgcccactaaatttgtgacaatttgttacacagcaatagagaactaatatatagcaagcaaatacataatgtgtcagaggtaaatgttgcagagaaaagtaaagcgaagtaaggggaatgagagagcatttgagtgtgtatttgtgtgaacatgctgtttgatagagtgctcaggggacaccttactgtcttgaattgaaacgtttcactggtttgtcttctagtcagcctttgggctccgtgggagcagaaatgatcttgtcctccctgaatgcccagggcctggcacaatgcaggagctcaagagcagaacaaggaagtccaaaattaagtctttttttttttgacacagagtctcgctctgtcgcctagcctggagtgcagtggtgcgatcttggctcactgcaacctccgcctcccaggttcaagtgattcctctgcctcagcctcttgagtagctggagctacagatgggtgccactaagcctggatgatttttgcatttttagtagagatggggtttcgccatgttagccaggctggtctagaactcctgacctcaggtgatccattcaccttggcctcccaaagtgctgggattacaggcatgagctaccatgcctggcccaaaagtaagtcttgttttccaagatcctgagcttcttgtcggtacagaaccaccttttttgcttctctgcagtctccaaaatatctcccctacacagtattcaataatccctgggatgcattctgtgtctccagctttctccctggccctacccctctcaacctaatccactcctgggtcacctctccatgtcagggtcaccttttccagacgggtctccaattctgacacttcggcttccaccagctcaatagaggctctgggaaagagggggtcatgggaagagagcttgggtccatctggtctgtctgcctcatcaggcgggatggagtcgcagggcggtgggtacggaggagaaagctgcagagttgagaggctcgccccccacccacctacttgtgctctgcccgctctgcagtctgggagctaccacagcccaggccagagcaggaagggtagaaggagggtggatgtggccagggcaggaagttgctaaccgccccagagcaggtgctgggggaggggcaggggtcccactgagaggccagagggaatgccagctctaggggtgagggaaactgcagaggccaggaggagcatgcaggggcagagagcattggagtaccctgctttcacagctggggtaccactttggcccacaggctcgctcctgcctcttagaggcctgctccctggaaggagacctggcctggggaaaggtgtgtgtgtgctgggggtgttagactttcccctccttagccccccagaccagttcacacttaccggaaacggggtgagtccttgagacactcctcgaaatccagcttgaccgtcatctcagcttgcctgctgtggggccagcgggccctggaggccgggcccctggggatgcaggtggaggcactttctgtcccaggaaggggagatgagggggaaggaggagagggacctccgcggggaagggcctgggggcacaattctttccccaaggggaaaggggtgtcctaggaggagctctcaccccacacttccaggcagtgctgggaggggcaggggcggggcctgggcggaggatgggggcctgagatcagagaagccacagccccaccctcagagacgatctgccagctccttcctcctggggctctagcctctgtttctttctctcttcgtggttatcttgggggcctggcagatctaggttcaaatcctggctctgtcacttagaggttatgtgcccctggacgagctctctgattcctcagttttctcatctggaagatgggaatgataaccccttcctccagggctgtacgaagtgaagaaggtgatagcagtaaattcatggttcactaaatttatttatttatgagacggagtctccctccatcgcccaggctgcagtgcagtggcgcgatgtcggctcactacaacctccgcctcctgggttcaagcaattctcctgtctcagcctcccgagtagctgggactacaggctcctgccatcatgcccggctaactttttgtattttcagtagggacggggtttcaccttgttggtcagacttgtctcgacctcctgacctcaggtgatccacccacctcggcctcccaaagtgctaggattacaggcgtgagccactgtgcccagctggttcactatattaattgcatcagtcattgtcatcctgctacagcttgggcctgctcctgtggagtccagtaccccggactgctcccagctttcttcgttttgccgtcatattcatggttcctgtgtgtgaactccccttcctcctcccctctcctcaacgactgagcaggcccagcctgagcacccgattcacagctcccagactcttgctcttctgctctttatttctattcatagggtggtcatgaagggaaggttgcccccactccgcccccaaccagccccattttccattgtttgctttccttttcttgagtccattgaagtcccagggtttcatctggagagaagagtttgagttcatggctttctcgtagcaggcatgagatcttgtccatgtgactctggatcccctagaacctccccactcagctcctctacctccctggccagtgtatgcatccccttgcctctgcccaggctcagtgtgccaggctgtgcttgttctggcttgaggagttggggttgcttccactctccctctctgaactccttgggctttgccagctcagccccccagccaccagctggacaccacttgagactcactgtctttggaggacagagaaatacctggagtggggtggtgtggcagaggagtgaaggaggaggcatggagccagtgtgtggtgccaagctggagggggtcccaaccgcctctgagtctccctggttcctcgcctgtccaatgtggaccttggacttgaggctgttcagggcctctccttccacctgttgctgatgtactggcctgaaagaattggagggctgggagatgggagcttgccaagagacagccccagggagatggtggcctggtgccctcaacaggctgcaatgttgtcattgttgccatcagggagctctccgtggccttgtgatccctaaaggggcctcccatgtggtccagtaggtggacttcagtgcttacggggttctcaatcacctaggtcaagcttgtggagcctagaatcagggatcagggctcgggtacccatcaggctgtgcattcccagccctcctgccccctaggctggcctgcccaggttctcaccatcctgatgctcatcttccacgtcctctacaagctctgggtgggagcaggacctcaggtatagtcctttgccatcatattccttgtgctgcagagcaatctcctgccccaatatgatagtggccacagctggggggactgatttctgtaggtggaggaatctgaggaatcaatcaaatgaatccaagtcttctagccatctggtgtatccatgcctcccaggtgtctgttgtgggccctcaccagaggggagaagctcaggccccagatcctc

SEQ ID NO: 1243621 - DNA, 4001 bp, Homo sapiens
gtttcaccatattagccaggatggtctcgatctcctgacctcgtgatccgccgacctcggcctcccaaagtgttgggattacaggcgtgagccaccgcgcccggcctattgtatctttttaaattaattattttaaaaacaatttttgtagaggcagaagtctcattatgttgcccaggctggtcttcattcaatacctggcctcaagtgatcatcccacctctgcctcccaaagtgctgggattacaggcgtgagccaccgcatccggccaatttattgtatatttcaaaataactgggcgggaagtggtggctcaggcctgtagtcccaacactttgggaggccaaggcaagagaattgctttgaggctgcagtgagctatgatcatgccactgcactccaccctgggcaaccaagtagtgagaccttgtctctaataaacaaataaaatacaaatacaaataactaaaagcggaattggaatgttcctaatacaaaggaatgataaatgcttgaggtgatggttacttcaattaccttgatttgatcattacacattttatacctgtatcaaaacattacatgcctctccataattctctgcaactattaagtgtccataacaattaaaagaaatgtagacttagcctatccaacaacaagaataacaaaagggtaaaccaggagaataaggaaggttgtttctggaggaaggaacggcaggatcaaaagcacaaaggcgaatacgataatcaagaagaaaattcagggccgggcgcggtggctcacgcctgtaatcccagcactttgggaggccgaggcgggcggatcacgaggtcaggagatcgagaccatcccggctaaaacggtgaaaccccgtctctactaaaaatacaaaaaattagccgggcgtagtggcgggcgcctgtagtcccagctacttgggaggctgaggcaggagaatggcgtgaacccgggaggcggagcttgcagtgagccgagatcccgccactgcactccagcctgggcgacggagcgagactccgtctcaaaaaaaaaaaaaaaaaaaaaaaaaaaaagaaaattcaggaccccagagtggcgtagggacccaagccagtgtgcagaatctctgggcctgggagatctgaggatggggtagagcagggcaagtaggtggcaaatcaggccctgagcactagcctctctgtaggatgccacgccgctggccgccgcaaagtggcggtgtgcgcccatgtctctgccggacccaggccaccggccgcagaaacgctgccacctggacgtcccccacttcgcgcacgcactctggtgcttgcatataaatagtaagtgcacacccgactcggccaccagaacctgcacacggatgcccacccacgggttgacgtcgcggacaactacaccgcgggtgccgggctggggtgccggcctgtccaagcctcgaacccagaaccagttgctggggactccaggctcggctccgcctcacgctccccaggtccgtcagctccgagactgtggctctccgagggggcagcacctggcctggcacagggaggttaatcctatgacgtcactgccaacctccccacccccatgcccatcccttcgggttcgcgctgccccgagcggctcagctcccggggttctgccttcgctcccggccctgcgtcctgtcccggctctggttccctgctgaggcctgcggcgcgacggggacgcggaagggaaggaggagggggtcctgcgtcagcctcgagtcagggcccccgggaaggagagggtgtctgtgccagaggatggccctcgtccccggtgccggctcccacccccagccccgcagcatgggggctctagtcacccttgcggccaagatcagaggctcgcccggactaaggggagacggactcacgagcaggggcgagcgctgaggctccgggcttccaggccaccgcctggccccgccctcgcaccgccccggccccgcccccttcccttcccgccccgccccgccccacctcctgctgcctcctccgactccctcccgcgccgctaagtttcttcgctcgccgcctcgctcagagccggggccgggccagagcggcgccccgctgccctgtccccgcgtgcagaccccgggcccggccccggccccccgccaagccatgctgtgcggccgctggaggcgttgccgccgcccgcccgaggagcccccggtggccgcccaggtcgcagcccaagtcgcggcgccggtcgctctcccgtccccgccgactccctccgatggcggcaccaagaggcccgggctgcgggcgctgaagaagatgggtcagtgacgggcaaggggcggtggggtgggcgcggaccgttcccagaggcccagtctggggcgctccagggagcagttcgtggattccccaggctgcacggggctgggaggctatggctaggggcggagggccagctccctccagctgggggtcgcacctggggtcatccgagggtcccggggcgagccgggcgcccagggtgttctttgcttcccaccagggggcgctcgcggggcgtctgaagcgcgaattcgggcacggggcgctggtggggtctccaaggagaatggagcgggagagggaggcttggggtgtccctcgtccggctccccagcagtatctaggttctgccagggtgtctcggggtcttggcagcccttaggaaggatgcgagtttgcggtcggcctccgcagaagaggctggcctccacagcagccctccaagccgcggccccacagaggcggccacagccacactgctctggcaggactggtctaacagcctacgtccgacagccaaggctctcacctcagatttggggaagtcagtcgtggagaaggaatgtaactgtggctcattggaacatcacagaggcagctggcactgggtgggttacacaggtggtgtcttgcaatcttcctcgacttcctaggtgggaggtgaatcctcatttcacaagtgaggaaactgactcagagacggcaaggaatttgcctatgaccacacagccaacaaagggcaaagtgtgactggcaccccggtggtgccccaccacatgggccctggtaccctctcagagtctgggaaaagtgggacccgcagggcagtggagggcttgaatgagagggtgtgtgcgagaatgttgtctgacgtggaaaggaccgcgccactgaagtgctgcgttggacctgccattggtagaatagtcagtgatggagaggctaggtgtggaactccggaacagaaggacaaggctgccagggaccccgtgtagaacttggggcagaattcaggggtcctgattgccagttttgccttcttgttacctcgactcattccacctgagcgctgactatgtctgggcgctgtgcctggcactctggttactgagacataggacaccatctctaccctgccatccattcaactgtgcatgcattggacaagcacttatgcggtgcccatggtatggtactatggtacaagcacttgtggagtgcctatggtatgctccaccctggggctcttgcattagagagctgaggttccagcagggagatcagacagtgaaacaaaggaacaggaccttgggggtgggggaacagggggcagcacatgaggggctggggagccagcaggccctggctggccccagctgaggaagacgggagtggcaaaggggagaggctgggggtgggaggagctcctccaggccctccctggagagtcatggactttatctggagggcatcaggagccccagaaagggcttgggcaggagtgagtgtggagagtggggggcaggttggatgaaggcaggggcgaaacagggagacccaaggagggaggctgaggagttagttgggcaaggggtggggaccagacttgggggacacccaggatggaccccagaactcccaggaga

SEQ ID NO: 1243622 - DNA, 4001 bp, Homo sapiens
agatatcaacacctgaggcacagatgggcgccagaagcaaggccctggaacaggaatcctagaccccggtccccacctttgggagcacaggaagtctcagtgtctgtggagggcacagcgtggcatccagccttctcccctccagccctcccccagcctgagtttggtccacccctcctgctcaagcactaacctgggcttgggggtgccggttccttggggaggcagggaggctctgaaacagccccaacatctccattcacaacctgctctttccaacctgccaagacacagcacccagaggtgggcctggggagaggctggcacctcccagtgtgatcaagcccctactcgtgatgagccgtggatgctgcctgggatccacctctcgggggcttgggggccctaacagggatgtcgcctggagccctctgcccccagcccacctcagcctagacctaagacggttcactcagcacttttggagctcccagcctgggagtctgacctgtgacccttctcaggaaggtctctgggggcctcggcatgtcagggatcacctggtacaggggctcgaagtaaccaaacatgtcctctgccacctcacccaggggcactgtgtcgatcacctgtaggggagggggtctgttggggacggagtggcctcctgtcccttcctccctgctcctgccctgtcacacacctccaccctgtgcccagtcaggggccaaagataggcagggttgggggtaacatgaaggtggtgattcccatgagggggtccatgtgtaggaaacgtagtgggggtcagaactggaagggtgaggccacctggccaggagcctggggacagagaacctgcagcccttaccttctgtgccaccagtttcatttcagtgatgtaggcagacatggcctcctccctgctcatcttgcccagactgttccaggcgtccctgggggcagagggctgtgagagggctgcttgacagctgaggcttgtctgcccagccagcagggagctcaccacttatatcgtccaatggggtcccagaacccgggccgggggaccaggcagggccccatggtggcctgcttgtagtaactgtagaatcgcagcatctcttcataggaggggcggtaagaacctgggcagagagttgggaagccagggcaaagcatcactcccagctccaaggggcggaggggcgggagaaccctgcttggaaagggcagaggtggtgatgggtcccacccagggcatctggactaggataggaagcggagggaacccccaggacagcccaggcaggggcttgtctgcaaaaactgcagtgatcaggaccattctttcttcagagtcagaccccaggcgtcctgaatgcgagtccaaatgcgagtccccgcagcctcaccgttcttgggcaggttctggatgacgctcactgcagcctggaactgtttctggcagtcgggctctgggctttctttctcggtgcccatgctgctgcgagccctggggccctacttttgagcgactctgcaagaagcagccttcgtgtgagggggcctccagggtccccccggcaccataagccaaggattcacttcccagaggggcaaactaagctctttagaggcctcagacaccctgggaggtcagaagttgtggttgaggagcctccttttcctacctcaaggcagtgtggtggggtcagggtcgccaggtggcgaggcaggtggcgagggcctcagtgccagatgtgtccgtccccagatgcgcctcctttaggtgcacatctccaactcccgaacaggtggagaaacaagataggagtactcagggcggggcgaacagtctcccaccctggccgcctgcaccttggcccagcgtgtgccccgcggcgcccactgccaggacacctgggtcctctctcgccaccaccccgcggcttcctactgaccccggggtccagcagggccgggatggcgacgcagatcgagggggggaatttaggccaatgagagagcctgtttcacattcggcttacctacctcaaccattcagcacagctctttcaagatcatgcaaatagtttctcagagcctttcccaatcaggcggggcttaatcgaagggtcggacttcccagcccgggatggccaaggcgggcggcagcgccccctggtgcacatagtgaaaggtcgtggcgtcctagcgccccctggtggaaatccgcatctgttcgctgatatccaggcctggccgatccgaggcaacccactcagctctctagacacttaggcactggggattaaaaaaagtcatgtcctgtggtcaggtgttctagaggaaggacatcacagctcagttttggaagatggtcgggcacggtggctcatgcctgtaatcccagaactttgggaggccaaggcgggcggatcacctgaggtcaggagttcgagaccagccgggccaacatagtgaaaccccatctctactaaaaatacacaaattagccgggcgtggtggcgcgcgcctgtaatcccagctacacgggaggctgaggcaggagaatcgcttgaacccgggaggtggagattgcagtgagccaagattgccccactgcactccagcctgggcgagagtgagactccatctcaaaaaaaaaaaaagagtaagcaaaatggacatcgcagaatgatggttaccagaggctgggaagggtactggggagggggggaaatgggtacaaaaatacagttagaatgaatgagatccagtgttcggtagcacaatacaacgattatagttaccaataatttattgtatctttttattttgtttattttattttatttatttatttttttgagacggagtctcactctctcccgggctggagtgcagtggcgtgatctcggctcactgcaatctccgcctcccgggttcacgccattctcctgcctcagcctcccgagcaactgggattacaggcgctcgccaccacgcccagctaattttttgtattttttagtagagacggggtttcaccatattagccaggatggtctcgatctcctgacctcgtgatccgccgacctcggcctcccaaagtgttgggattacaggcgtgagccaccgcgcccggcctattgtatctttttaaattaattattttaaaaacaatttttgtagaggcagaagtctcattatgttgcccaggctggtcttcattcaatacctggcctcaagtgatcatcccacctctgcctcccaaagtgctgggattacaggcgtgagccaccgcatccggccaatttattgtatatttcaaaataactgggcgggaagtggtggctcaggcctgtagtcccaacactttgggaggccaaggcaagagaattgctttgaggctgcagtgagctatgatcatgccactgcactccaccctgggcaaccaagtagtgagaccttgtctctaataaacaaataaaatacaaatacaaataactaaaagcggaattggaatgttcctaatacaaaggaatgataaatgcttgaggtgatggttacttcaattaccttgatttgatcattacacattttatacctgtatcaaaacattacatgcctctccataattctctgcaactattaagtgtccataacaattaaaagaaatgtagacttagcctatccaacaacaagaataacaaaagggtaaaccaggagaataaggaaggttgtttctggaggaaggaacggcaggatcaaaagcacaaaggcgaatacgataatcaagaagaaaattcagggccgggcgcggtggctcacgcctgtaatcccagcactttgggaggccgaggcgggcggatcacgaggtcaggagatcgagaccatcccggctaaaacggtgaaaccccgtctctactaaaaatacaaaaaattagccgggcgtagtggcgggcgcctgtagtcccagctacttgggaggctga

SEQ ID NO: 1243623 - DNA, 4001 bp, Homo sapiens
ggcagaccttggcggtggagtagatcctgctcatgttgcttagcagggcgttgtactggggagtcagaggggaggaatgctccagtgaccagcccctgggacatctgccctcccctcgctgctagaaggaggagcccacagagtggatgtagcttggacaaggccactcagtggcaccggggcacttctgatcactaagtgtcacttagtgtgaccggatcacttctgagtcccctgccagtggaggcagcctgtggagtgggggacaggagtcctgaaagtcagggtcagggtcaagtcccagcttggcaccaccctgcagtgagggcagatccctcccattctctggctttggtgacttcccagtctttctcaaccttttctctctctcttttttttggggggaggtctcactctgtcacgcaggctggggtgcagtagtgcaatcacagctcactgtagccttgacctcctgggctcaggtgatccttccccctcagtttcaagagtagctgggactgtaggtgcacgcaccaccaagcccagctattttttttttgtagagacgaggttttgccatgttggccaggctggtcttgaactcctgggctcaagcgatgcgcccacctcagcctcccaaagtgctgggattacaggcttgagccaccacgcccagcccttctcaactcttccaaagaagctcataaaccagcctagggagaagtgtatttgaatttggcttcctactccagaatgcttcctttaacagaaagtaactccccaccccatctccaagaaaaatcaatgctcagaaagccattctgtgcttacctgggctttcccttctgtcagggcccatgtggatcccagggttcctccctccctgatgggctgctctcccccgacccccacgatggggcactaggaggccgcccccgagctctgcctcagccctcagcccacctgctgccgcttagccaggggcaggttggcagagcccagggtgcgcacagctccgatgatcctgcgcagctgcgggtccgtgaagttctgccagatcggttcatacagctccttggccttctggccccaggcctccgcaaactcctggctgagcagggctgcttcctcctattgggcaccaggagggcagggagggtgtaggaccctgcttagatgcaggccataaaggagaagccacggtgctgggggaggggaggaaggccaagggcttccagagcccgggccctggggagatccctgcgggagaccttagtttgcggaagccgcgcttcctccttctggagggaatctgcctcatgggaatggtggagcagaaattgggaccagaaaagaggccgggcgagtggagggtggatggacagtgcagtgcggtgacggtgacagcgacagcgtccggaggtgagaaggcagctgcccgagagcgcgggggccccagagccaagcccagcaccttcggcgaaggcgggcgcggcctgggagcagccaccctcatccatccaactcgtgcatgctgggagcgcaggccgtgcgcgcagcccggcgctcgggccccgcggctgactgtcggggcgagggtccggggtcggggtggggttcgggtcgggggcgccagcctgcccgccccacaagccggccgcgtgctgtgattggccgccgcggccccgccccgcccccgcccgggcccgggcgcccacctggcgccttgcattctccgcggtgatgttggtgtcgtgcgcccagctggcggccacgctctggaacagcacctgttcggcgctggagttgtagctctgcgcgaagagctgcgccccggcctcgtcagcagaaaagttgccgggctgcagcccggggtccaacgccagggcgggctgcggcggcagcagcaacagcagcggcagcggcagcagcagccccggcccccggcggcccgaggcggcccccatgacgcggtgcgcggtgctcggctctgccccttctcctgcgccgcggccgccctgcgggttataaaacccgacacacccccgcccccgccccgccgcgcttcctcctccgctccagagtccccagcggcgcgggccgaggttcctggcccgccccgggcaggggcgcgggccggggaggggccgaggtgcagcccgggggtggcgggatggggctgggtcgggctcccgcagaggaagctggagaaagggcctcctctctttagaagatggggacccggcagtttgccggaacacccgagcctgcccaccgtgcggccgcgcagcctcggccggggcctgggagcctagcggcctccggctcgatcttcccagcccgaccccccggagcctcccgcctccggagtgacaaggccggggccccaggagctgtccgcaggcgccgctcgtgcggcggggatggggctgatcgggcctggccggcttcttcaccaggccatggtcgaggggcggggacgtcgcctgccgggggtaggggtgtggcgggggggagaggagggaggcggggaccttaggtgtcttgcaggcgcctccgggaggtgctggaggggctcagggcggccggcacacctggggcttggggctgcgagggagggggagccacagagcgcaggagctttggagcgcctgccctctttccccccgaggacacaggctgccagtcgctcagcagaaaacatcacacacgatcccaacagagtcctagaacccgaggctagcaggctttgagagcgacacaaagcctcagagatgagaacaaccccctcattttacagatgaagaaattgccgctcaggttgagaggcttgctccaagtcacctcaggtctccacactcccctgtgttttcctgtctcatccacgtgtccctcaaagtgacaagtgtgggggagggaggacagtcttgtcctattggcgcacagggcggttgtggaggccacctcggcaccatggcgtctgctgccagaggggggaagccccttgaccctggcagaggcccggcggcgcagtgggaggtggggcaatggaggaaccgtggggtgaggctgggcggtgggatcagggaaggagccagggacagctgctcccaagaccccaacccattaggctgctgggggctgttgggaatcacttgggcttctgggtgagtgggggatggtgtctggggctctgagggacacgtgcaccttgctgtgcagcatggagtgtgtgcaggaggctgtgaccccgcgttcctgtgagatgcacctccagtgagatcgcactgacttgtcagatgacgtgttgcaggggagagggggcggtggggagaggaagaaggtggctgtccctagcactagagggagaaggcagggccttgttaaacactggccggcagtggggccgggagaggagagctggggtcaggcctggccctggcccgctttgccagcctccctcctgacctgcagttttccctcacaactcctccctgcccagtttggcttggagagccagtggataccagaggacatgggtgcacttctgggccggctacgttggtggacgtttgtgatcagagcagccccatcgaaggccaggggccagggagggcaaggtggtggcctgggctctcctcccaggagccaccctgctctcaggggtcctaacagcttggccttccaggctttgagggctgtgggtgtctgtgtgcaaatgagctgctgtctcctgggaggaagcagtctttctgtggaaagaggcttgggtggggaagagatgagagtggggctctgtcagcctctgaaggaggggccaagggaggagagatgagtagagaggagaagagcctgaggcctaacctgtatccagaggccctcagccagaggctggcctcgcctccaaagagttcctgagaaccctcttcaggagggtggagggcgggcattgcttctgctggttcattctcccgtctgactccaaggcatttccacaatgt

SEQ ID NO: 1243624 - DNA, 4001 bp, Homo sapiens
gatacaacgaggaagaggaagcagcgtgaaggccaggccagaccctgtgttgggctcactgccccaggattcccctctccctgtaccttgcgagccacacacctcctccagctcctgggcaggcagtgctgcccgttctaggtcctgaaccttctttatgatccgcttgatagtggtgttctgcaactggttcacatcaaacttcctggcctgggtgccgtacttcagggtgtggttggctatttgcatgttcttctgcagctgagggcacagggggatggtgtcacagggcccaggagctccagagcagcctctgagcgggaggccccaagtgggagctgagggctggaggtggtggtgagggggcagtggaattaagttgcaacctttgcctataagactctctgcaagctggacgctgataacgtcctggatgcagtactcaccctccctggatgcctgcggtcaagcaacacatatccaggcaggggcagagaagagaagacccccaagtgtcgtaaaggcccttaggaaggagccagcttggtattagctctgtggcctttctgaacctcagagttaatatcaaatcccatctgtaaaatgggaataagctcaccaattttgcaaggctgttgagaaaaagatgaggcaacagatcaaagtgccaaggaacagtaacagtgtgtggctcagtggcataatttgtgctcagccaaataggcagggaatgagggtaaagaggaagtgtagccccttttgtagaggagacaaacagaggctttcaatcttttaaaaaacgacttgagcaccacttatttatgtacaaattattctgttactagagattgatttttgtttatttgtttgtttgaatagagatgggatcttgctatgttgcccaggctagtctccaactcctggcttcaagtgatcctcccacctaggcctcccagagactgatttttaaggaaagaagaattgctcaggcattgagtaaatgttcatcaaaatctgaaattgagttttttttttttttttttttgatggagtctcgctctgtcgcccaggctggagtgcagtggtgccatctcggctcactgcaagctctgcctcccgggttcatgccattctcctgcctcagcctcctgagtactgggactacaggtgctcgccaccacacccggctaatttttgtatttttactagagatggggtttcaccgtgttagccaggatggtcttgatctgacctcgtgatccgcccgcctccccctcccaaagtgctgggattacaggcgtgagccaccgcgcccggcccgaaattgagtattgttttaaatattcaatttaaaatgtggtggcagccccactgtgtggtgagcgggacagcatctctgtgtgtatgcacatgctcaggtttgggggtggggaggtggctcccaccagaatcttgctggtctctgtggtgatgttggtgttgtagttccagttggcctcggcatactcgttccacaccacctgggatgtccggtcatattcctccacaaacttgctggcctcagcctcatcagtcaccaggtctgtgggacagagtgcagggaaacagacaaacctctgcctcccctctccaggtttgtggtctcaccagaagccattatccctctcgcactcccttgtaccctgccctgtccctacccggccccgcctctcccacccctggcaccctgcccctcccctgcatggtcccacttgggctctgggctgatgtctggtgggccgtcgcctggtgggtggttgtctggctgctggttgttgcctggctgcttgtcccatgggtgactgtcacctgttgggatgcctcctggctggggaccagcagagggtgcccgtagcagagcagcaggaagaggaggctgggaagtcctgcagtagcccaaccctggcccatggccgcaggagagcagagtcctgcagctaccgtcccctggccaataagagcggagcccgcagtgtgacctcacagagccttgtgtctggcttcctctggaaggggaggggccctcaggtctgagcacaccctctctaggatgctgggggaaagacatgcctgtccccactcgcaggccctgctgatgagcttggggggctgcctggccctccaggacagggtaccagggctcagctggtaggagctgaccaggaacctggggcctgggccaagcccagagttgaggacccaccttagccccacaccatcctcactcagggctttacctatgccctccgggtagttgtcaggcaacggcgggtgccactggtactcgggccagcccaggacctcgccgttctgctggttctgctcctgcagccactgggtgactggctggaagtacttgagcagcggctgggcatccagggcatctaagccgaccatgtccttcagcacctcctgccagggcctggaggagccagcctgcagcaccttcctggtgggcagagtgggtaccatgggcacaggggactcaggctggagtctgctcctggaccccggcccacatgcccctggccacttccgccccccaatggactgcagaaactgtggcaataagaccctggggcctgggatctctctgatggtggcagggggcatttgtgtcgccccatgccagccagaaggcccactcaataaatatttgatgacatagcgaggagacaggcatccacatcagtccagctctgtggttggtgccccccaccccatcagagcagccagacacctcctgccacaccctttgccagccgctcctctctgcctcccacttcccccggcttcccaccacacaccggagcttggcccctgccttggtggaccggtagatgtcacactggtgcagtgggccctcatagcctgcctccttgcacagggcttcatggaactggaactgcaggacaaaactcacaaagtacctgcaggcacagggtgggagtcagggaagatcatggggggccaggaacaggggttccttacccaggcaccatccagcttcctgcagggcagaggctggaccagaagctatcttgggggagaagggagacccaagacaggctcaggagagtgggccactctaactccaggcctttgaggtctggaggagcatggggacaagccctggggatgaggcagctaggatcacaggaggagaagtggattgagggtgtgacagtactgggggtgggtggggtgggggcgctaatacctgatgtatggtgtcacatttggaacatgaaacttagctccagcatcaaagtgggtttcgtttcgggtaacaggaggacagatcccctgatacttggttctggaaaaggatggttaaattgtcttagggcctagaggttgcaaacagatggatttaacttttgtagaaaaggcatttccacccggcaacccttccccatcctgaggaactggggaagacttcctggaagagggagtttcaggcaggaaaggagaaggcggtgggtcacagcgggggacatcattagagaggagaggctagaactggctggggcaggaggcgcctggctgtccaggaggctggggagggctagctggggcgaaggcttttctatccctcctctcaccgaagataccaccagtcgaagttgtagcgggaagggggggtacgcccactaaagaccccccagcgccactggtccaccaagtagccaaagggcaggaaggcaattttttccagtgccatttttagcaagtaattgatgtcactttctgttgggagatgagatgaaaggagagggaagaggtcagagggagaagagggtcccctaagagtgtgggctggcggggcagcagaaagtgaggccagggagatgcagagaaggtatggctggccctcgagaccctgggccctgcttggaagaggacccccaggtgtgctgagctgggcgcagtgtgcaccgtgaggctctaggaggatcccg

SEQ ID NO: 1243625 - DNA, 4001 bp, Homo sapiens
gtagctactggggaggctgaggcaggagaatcgctagaacccaggaggcggaggttgcagtgaaccgagatccaccactgcactccagcctgccgacagagcaagactctgtctcaaaaaaaaaaaaaaaaaaaaaagaatatttgctctagtggaatcagcaaatacctacaaatacctatctgggtttgggaccgctccccagaacgtcttagtctgcctccccagtagctgaatgtgctgtcaaacaagtaacagatgattgggctgagcttggactccaggaactgttacttggtaacagctaaatgtgtaaaccatttgggggaaatcatgccaaggaacctgaaaacacacacatacacacattctctaagggaggggccttatgagctgaatggagtctttctgcagacgggtgagtgacccaggattgagttcacttttagcagacactgagagaagcagcccacacaggaggctgaatgaaagaagcctgttccccagaacacgcccctgggacacagccaggggaagggaatcactggggatgctactaagggtgcctctgggaaagacaaaaacactcatttgaaggttagtatctgcaggattgggacttacgtatgtaggtatttatttatttattttttgagaagacaggcaatccctggagtaaattctagagaggcagaattctgtgagtgccccttactgcggcaggcatagtgtcagaacggggatggagccataagctgtccagtgtctgaggggtcttcccactaccgccccccaagctgtttaggaaggtttctaagaggtgaaaatcacccatctgggcaaatgagacctaccagctgtccctcaccccacattttagttcagctgagccagctgaaaacacagaggaaagttaagggtggagaggagtaggctagctggccaaactgtgctgtgcacttttccttatcgtctcttccaaaatcctcttcccaggaagacctccagggaccccataacggcagaactcggcactgcacggtatctgccaaggttggagaccgcggcaggcgctgggactggcccattgccaggctcgacaggagggcggcggcagcatcctccagccccttgaggacctttccccggccagacttggcgtcagctcaagggtggggtggcaccccggccatctgtcacttaggggctggactcgacgatacctccagtgcgaggagggtccttgctgcgagattccagtcctcgcggcgagacgaggcgaggcctcgggcaccctggggcagcctggccccgcgtggcccgccccggaggcgcgcatagctcattctctccacttgggcgtggagctcaattttgtacccacggaaccaagaagggcctgagcccggccagtgaggaatcggagtgggaccagtcgccaccgctttctctacttcccgtcccggcatccgatgggggaacccggatggagccaaaaggcgtcccgatgagcccgaggagcctcgatagctgtgcccgggaggggtgaggcgcgccaggagggggaccatgcaatgtggcagaggcagaagaggcaaggatggcggcaagccccatgcaaactcccaggaactggaatatgtgtgtgtcgcgcggggggaggggaggggcgtcgacacgcggccaccggccgggaccccgggcgaaggctaacctaaagctaagaccctcaaaacttccgagcagggcgcgtgggcaccgagcccgcgtcggggaaggcggttccgggttgggggacggaggcaggaagctcctagggcgagcgggctccagccagcgaaaacagcctcccgtgctcacctctgccgaagtccgtgcgcggcgcttcttccacaggcccgacgaaccccgcaaaatccggagcaccccagcagccggtagcttcccgggatccggcttttgtcccggcccagccggacttttccccgcccccatcggctcgcggcgagaacggccccgcgattggccacacgcgttccctagcctgagcgccagggctcctcccaattcgctgctggcttggctccgccccacgagggcgggccccggggcctgctgggacttgtagtcccgctggcccatccaccgcctcttgggagcctgcggggccggggcggggccccgggtggggagatgggccgggctaggctgggaggagaacgcgcggtgctgggggttgtggcctgatcgcttgaggggctggacagattgccactcggggagttgggggaggggcgggtaggattagcccaactggctgtaacgcagctttgggacctggagtacccttgctccttcccttgggagaaacggacgtctgcatctcggccgcaccgaatccgattgcttagacagtctccttaagcagcagtgtctggcaggccgctttcctttagcacgtggagcctctctcctccctggactctccccactgggccgatgaggcaaggctgagccgaggctaacagagcatacttcccagtgtgggataaggcaggggccgcggtaagcaagtggggctaggagggtgcaggcacagcgctgtccgtcccactcacctgctcgcctcagcacggatcagggcggagctaggaattcaatgcgagattccagcgaagggctggagccatcccagacagtctcttgttcccaccaaccacaggcttagacactggaatgaatgaactgctgtctcccccttctccattacctgagacagatcgaattttccaaaccaaaaactgggacatccaatctgacaggtgctggtgaacttgtggggcagaatatgtgaaatcagtcctggaaatcaggacatgtatttaccactctgacatgctgcagcctccctccctacctgcaccccaaccctgtaggtccggagctgctccctaagcctaacagctgtctagctccaggaaggaggccaaaagcgtccactgaccgactcaggtgaagaggtcagcccagaatgcagggaagcagcaggcctgtccccctgccaagcactttgggtcatactcacactgcaacagtgttgcgacatttgcagacaaaatcttctccaagaccccctcccccaatcctgttgctgccaggagtaaggtaactgaacttgctacccatgcctgaatcaagtgttccctgatgatgtcactttctggtcccttccctcccattcatctttttgaaatagcagttccttatcacctctcttctcttgtcctaaaatgggggtggccagtcttggtggctcacacctgtaatcccagcactttggaaggccaaggtgggggatcacttgaggtcaggagttcaagaccaacaaggcaaaaccccatctctacaaaaaatacaaaaattagccaggcatggtggcacacgcctataaatcccagctactcttgaggttgaggcatgagaatcgcttaaacccgggaggtggaggttgcagtgaggtgagattgcaccactgcactccaacctgggtgacagagaaggattctatctcaaaaaaaaaaaaaaaaaaaaaaagatacactccaggcaaggcatgctgtctcatgcctgtaatcccagaattttggaaggccaagtcaggcagattgctagagcccagaagttcaagtacagcctgggtaacatggtaagagcccccaccaccaccatcaaatctctacaaaaaataaaaagaccgggcgtggtgattcacatgcctgtaatcccagcaatttgggaggcctaggtgggtagatcacctgagttcgaggtcaagcgttccagaccagcctggccaacaggtgaaaccctgtttctactaaaaatacaaaaaattagctgggcgtggtggcaggtgcctgtaatcccagctactcaggaggctgagtcaggagaatcgcttgaacccaggaggcggaggcaggagaatcgcttgaacccag

SEQ ID NO: 1243626 - DNA, 4001 bp, Homo sapiens
gggcgcctgtaatcccagctactcaggaggctgaagcaggagaatcgcttgaatccgggaggtggaggctggagtgagccgagatcgtgccactgcactgcagcctgggcgacagagcgagactccgtctcaaaaaacaaaaacaaaaacaaaaaacacaacaaaacacatggtctgaaaaaaggatatactctcttccacactagaaccaaggcaggtttttatgacgtctctctcatatgcacaagacaaccattcaagcactgtcatggattcagaactactgggttcttagactttctattcattcagaggcgtcacagatcattcttcatccaggtccacactaccatataatataatctgctattgctccaaaatatttaaatggtcgtgcaactaaaaaaaaaaatgctcccagattcagaattttagcagtcctccttacaaagagcaaaatgattctgcatttaaatcagtcaaatttgagttgcttgggcagaacaatgcttttacaacatccttgaaactgtactcttgagaacaaaaactcctgcatttccatttattatcagcattctacaaacacgtcatcccacgaaaaggcttggatacaaaagtgatcacattatttttcacacatataactttatttatttatttatttatttattttttgagatggagtctcgcactcttgcccaggctggagtgcagtggcgcgatctcggctcactgcaagctccgcctccctagttcacgctattctcctgcctcagcctcccgagtagctggaactacaggcgcccgccaccacgcccggctaatttttgtattttcagtagagatggggtttcaccgtgttagccagaatggtctcgatctcctgacttggtgatccgcccgcctcggcctcccaaagtgctgggattacaggcgtgagccaccgcgcccggccacacatataactttataaagttgcatgaaaatatgccagtttgcatcttcaaacaccaagcacggtgatgaaaggccaccatagaccgcagctgtaaagtttaggcttaacaacacttgctctgttctaaggcatacctactttttaaaccacataatttcatcagggtcagcgatgccaaactccctcatcttcttcaccatgatggcacttttcctgacagccacctcataacgctggctgcgagtgaggaagttcaagtcctcatgctggaagtctgggtcgttcaggatcatgttctctgaaagggggttaaagggcattaaaaggcagacagacactcgggcctccgttccaccctccctgaatcacaataggcttcagagtcgcggacacacctggggaatggcgatatccccccaccagggacacaggctgttcctcgaagtgggggtcccggctcccctaacgctgggccagagggcctaggccccacagcgcccctgactccgcatcgagggagtctccagcttttctcgggaaaggagggaggtctcgcccgccgccctcaccgatctctcggcggcgccgggttttctcggggctgccgtccaggatgtgtgtaagcagctccgggttgaagctggcggaatcccgctccctgcgcaggtccgggttcatggcgacgaccagctggcagcgaagtaagcaccgaccgaggtggcagtgacaatctaaatccgcagctccagcgccggccggaccctaggaggcagcctcaggacggcgcaagtccccgcctccgctcgcccggcccgccccggcccgccccttctttctccgtggccctttggcgcgtgagtgacagcggcccagacagagggggcgatgtccgcgtcgtggctggggccggtcgcggggcagactaatcccctgctcctggccaggggaggctcccgagcggatcctcgggaaaggggctccgaaggtcaagaaactgccctgctgggcgtccggggagtgggaaaataaagcactttttgtatcccgcccctcccccgtcacgtgaccacgcgaggcggaaagaagaaatccgaggaccggcgacgcctagaacaggttggctggggccttgggaagggggcgggacaacgaggctgaggagggattgcgcctgcacttgcccccctcttaccccgcggcctctgtcacgcttccgggtccgtgcccctaggcctctccgaaatgagagtggtcgggagactctggagtctggggcgggagatggggctttgcggaattgctagggagggtcacttgggcttttgccaaatccacccggattggagaagaatgggacgggaaccagtctctttggggagaggctccagttaccttttgttaagataatggcgtctttactggcagaggcgtgggttccggggccctgggtgtgggattgtgagcgctgttcaaggggtggacggggacttagaatgagaccaagcgggcggtgctgctctaagccttctgtctgggaaaccagacattttcccccgcaacctggcagttactagaggtcttggaatccagacttctttgctttcgccatcaccgtcatcaaagtgggaaatgcacacttactgttaaaacctagtgtagggccgggcgcggtggctcacgcctggaatcccagcactttgggaggacgaggcgggcgtatcacttgagcccaggagttcaagaccagcctgggcaacatggcaaaaccccatccctacaaaaaataccaaaaaattagctgggtgtagtggcatgcgcctgtagtcccagctactctgaaggctgagatgggatggtggcttgagccccggaggtggaggttgcggtgagccaagattgtgacattgcactccatcctgggcaacatagtgagaccctgtctctacagaaaaaaaacaaaaaacaaaaacagttctgcccagtgggattgtagacaagggagattcagggatttgttgaatcatctctagtcattttttttttttttcttgagacggagtctcgctctgtcgcccaggctgcagtgtggtggtatgatctcagctcattgcaacctccaccccctgggttcaagcgattctcctatctcagcctcccgagtagctgggattataggggctcgccaccacacccagctaattgtatttttagtagagacaggattttgccatgttggccaggctggtctcgaattcctgacctgttgatccacctgcctcggcctcccaaagcgccgggattacaggcgtgagccgctgcgcctagcctgtctgtagtctgtgtaatactatgactttggttttctcagaagtaaaactacgagagatgcataacattcataatttgaataatagaactataatacacactcttaacccctaggacctcaggatcctcatttgtcttattaagctgctgatctcaggccccttcaacagcagagagggtgtctagtttattctctgtacctggcacagtgcctgccccgctaaaggtgctcaggaaatctttgtggagtgaacaaatggctgcttgacagctgaccttctagttctaatattctaggaaaccaattgctcttaatgtaacaatgataaggggtgtacttagcattgaatagaaaagacttagatgaagagctaaatttgctgagtttttattttgaaataatttcaaatttacacgagaattacaagaatagaacaaagaacttttcttctgtgactttaacgctttttttttttcttttgagatgatgtcttcctctgtcacccaggctggagtgcagttgcatgatttcagctcactgcaacctccgcctcctgggttcaaatgattctcatgcctcagcctccagagtagctgggactacaggaatgtactaccacacttggctaatttttgtgtctttattagaggcagggtttcactatgttgaccaggctggtctccaactcctggcctcatgtgatccgctcgc

SEQ ID NO: 1243627 - DNA, 4001 bp, Homo sapiens
agagtgcagtggcatgatgacggctcaatgcagccttgaactcctgggctcaagtgatcctaccacctctgctttccaaagtgctgagattacaggcataaaccaccttgcctggcctgagccctgaggcttctgaaggggaaagtaggagagaaatcaggtaaaaccatcacagtcagacaataagggtgcaggcacaagggagtggaaggggcagaaagaaagtaggccaaacactcagaaaatcatctgtctggataaatgagtctcctcctgacacagcaataagaatttctctgaagcttggtgctctcagaggtcccagggctgtagcaggtaagtgacctgttttgtttatagataaaaaaaagtcaaaggtcagaaatgttgccatgtggcctgatttattacttatttattggtttgtttgtttgttttctattgggcagcctcctgagccagagtaggctgagagacttcccctgtggcctgatttagtgtgataaaatatgtacactttgggaagtaactttcctcagagtcctcccagcctgagggggcagccatgagtccagaggagaggcttaagagactagggggtcaggggagggccgaacttgtctagggagaccctgggaagtagtgagtgacttcccagggtcactgggaagaggaccccactgtcctcatctcaatcccatctactgaccagccttgatccacttagttttctcagcaaattaggcagagtgatgttaaggcattgcatgctttctagcattcagaaatcagcaagttcagaaagtgtgatcttggagttctagccaaaaaggagtctgcatgtccctccaactcttcctacttagcctttttaaaaacaaaaacaaatctagttctctgagacacagctttgttctgacttctcccttttccatgtccaggcccacaccccatctgatgttgctgaaagtgctgtcctgaccatagacttagtatctggccgagttgagtggtaggacaggctcagtagtgcacagggctccccagtggtgctgctgaagctaacagccctgataacatgagtggcagcctgctctctgtgtctcaagcactttcacatttgccatctcacggggtcctcccaaggactggtcacaccgggaaggcagctttacttactgtgctgctgcagaggcagtgaagctactgggaactgaaatcctctgcctgccagcttccatcccaccccttgcactgaggacagaaggaaataggcccaggagtaggcagcaaagaattaaagccatgttagtgagcagctgatgaggagacaggagactgctaagtttagtggcctgggtcggggagactggggctgatccccaagtttgcccatgaaggggttccaactcagaggcagtgtcctgggggtacagcccaggccttggcccttgcccctccccatcggaatattctccttaaagcccacactccttgccctctgtgcccataaaggagaaggaatcgagagtcttggaccagaactcgaagtcactgcagccaccaaccaaagccccctccccacccaagtccaccaggccaagccagcttttcctattgcctaggtgctggcggggggcgggggaggggcgggtaccttccccccagtgcactcgtccagaggtggggcttccgaagctcgccgggacctccaagttcctctcccggggaactgccccgccccctctcttcccgcggggggccagtacctgaggaagcggacaccctgcaacctggcttcctgccaactccgagagagggcggcccgggcccccagcacccccgagctcccggcgcacagcctccccaggcgcagcatcccgacgtagacagccatggctcgctttgccctgcgtcccggcccgagtaaacttttaaagtgagccggggcggggcgggcgcgcagcgggcggggaggcggggagggtggcctctgcctatggggtgcggcggattcggtctccgccggcggggcggggcggggcgcggcggcggcgacttcgcgcggggccaccttcccctccgaccccgcggccctccccctcccaccctcgaagaatagccctggtttcctctggatccgaaggccccagctgcagtccgaaacagatcttcctcgcgaccatcctcaggggcctggatgttagaagcgcaaaaatttgttgatttcctagagggagagccagcagcacatccgtgaggggccagatggcaaggtcaagatccatccatcccctgccccctcgggtcacgtgctggccccgctacttgcgagccgggggccaaaggagcaggcgcgaagcgtccttgaggcatgccagctggagcagagggccccgcggggttggggaggcagccagaacaaagggtgtcgcgggtgagccccctgcgggcccgctggcgccagagtcccagctgaggccagatgtcagcttcagaaggaacaccagttgtaccccatctcacaggaggcatcctcccatccctcctcggcgcctctgccttgaccttctgcacagggttgggggccggacacgtaaggtggcctcagggactgggacctgtgtatttcatcctccatctgcctgtcttggggcctgtggcacagttccctgtgctgccccaggtgtgaatggaaagcaaccctatgcccctccttagggttcctgaggcccaggggtgagtggggtactaagacctgggcagagctgcgggacagagaaggtgatagctctggtcctggctaggaaaagtggcactgggcaccaaagagtagcacagtttatacctgttccaggtccacactgcctcggcctagccatgactcttcctctagagaaggagctggagaagaatggggcaaaggccctggcagtgtgacctcccctctcctgactggaggagatgaagtaaaccctgccaggcagaaggggtggctgagagtggagcctggcctgaggtgacctttgcccttatctgggaactctggctccacttgggtcatgagaaggagtccatgctgggcctctttatgatcttgagcgtgacctcaaatcctccctggaaccccggttcctagggagggtccccacacttcagtttctgtggggttggggcaggaagagacagaggaacaaagagatcaccggaggctgggcctgcaagggtgtgctttcctaattagactaactgtctttgatagcggaccagggaatgtggagggctggggcattcacaagtctgggttcccagccgtggctggcaggcttagcctctagcatgctgggtgaccctgggtaaaccactgtccctctcttggcctatgaagtgtggggtgggtactgatcttgtaggtccttccactcttctggctagtttgagggtcagtcctagagtgggagagaagtgagttcctccttgaactttgctccagcctcggcttttcaagacactgggctttcctgactcttcctaggtgcacaggccgtggcatcatagccatcagtttcagggtatcttgtacatgccaggctcttcaaggacattttctctgaccctcacaaacaccctgcaaggaacaggcatggcttggaatgtgtctttgtttttatggatgaagaaactgaatcccaaagaggttcagcttcttaaacataggccaaagctctgccagtagtctctttgtggctttgggcaagtcacggggcctctccagcctcgttatctgtcaaatggggataataataccaacttcacgcagagggctgggtaagaattgagtaggtggcacagaactggtagtcggccagttttcagtgattgtttctttttccatcctctccttcctcttgtgtcttcactctaagaccttcctctgtgtaggaattgcaaaccttttttaggagggagaattgttttatttgtgcaaagccctggtaggc

SEQ ID NO: 1243628 - DNA, 4001 bp, Homo sapiens
agagcgccccccagtcagctctcccgagccaggcagagggccaccaacccctcgactcaccttgatcttcatggtgctgggcgccagggcggtgatctccttctgcatcctgtcggcaatgcccgggtacatggtggtgccgcccgacagcaccgtgttggcgtacaggtctttgcggatgtccacgtcacacttcatgatggagttgaaggtggtctcgtggatgccgcaagattccatacctaggggacagagccctcccttagtgatgctgtgtcaccgaggatgtaagagtagaaacctttagctcacaacacctacccaggaaggaaggctggaacagcgcctccggacaccggaaccgctcattgccaatggtgatgacctggccatcgggcagctcgtagctcttctccagagaagaggaggatgcggcggtggccatctcctgctcgaagtccagggcgacgtagcacagcttctccttgatgtcgcgcacgatttcccgctcggccgtggtggtgaagctgtagcctcgctcagtgaggatcttcatgaggtagtcggtcaggtcccggccagccaggtccagacgcaggatggcgtgggggagggcgtagccctcgtagatgggcaccgtgtgggtgaccccgtctccagagtccatgacaatgccagtggtgcgcccagaggcgtagagggacagcacggcctggatggccacgtacatggccggggtgttgaaggtctcaaacataatctgagaagggacaaggggcggcttagtcagggacagagacccacggccaccccatgctcacacgccacaacatgctgcatgccagtgtgatgtgtggagaaaagaaaagaacgcaggcagaaaccaaatgagaaacctggaggcttcagggaggaaatgccgggagaggaacagagcctggaacagcgaaagaaacacttaaatgtcagaaatcaagccgggcagaaaatgactggggaaaggacgggaggagcacgggcgtcggccgagcctcacctgagtcatcttctctctgttggccttggggttcaggggggcctcggtcagcagcactgggtgctcctccggggccacgcgcagctcgttgtagaaggtgtggtgccagatcttctccatgtcgtcccagttggtgacgatgccatgctcaatggggtacttcagggtcaggatgccacgcttgctctgggcctcgtcgcccacgtaggagtccttctggcccatgcccaccatgacgccctgcaggggacgacccgtcagcctcgccggcgacaccgaacccaccccgcaacgcagaacccaggagccccgcggcgccatccactcacctggtgtctggggcgcccgacgatggaaggaaacacggctcggggagcgtcgtccccagcaaaaccagctttgcacatgccggagccattgtcaatgaccagcgcggcgatctcttcttccattgcgacctgcccggaaaaggatggactcaggcgggcgcgtctgtaacacggtcccctccccacagccacctaatgccctcccgcggggaagcctcggccctgccccaaccccagcggccgtggcctccaagatcgcaaccgcctggaaccgaaggccgggccttttacgtaacgtccacggctcggaagtctgcactgcggccgggccccgccctggacccccggcgcccccccagccccgtccgcctgacccggcccaccccgccttttgttcccggggaaggcgcgacgaggcctcggcagctggaagcggggccagccggggtcggggggcgcaggcctgcgacgtccagctcaggccccggggcggggcgctcaccggcagagaaacgcgacggcggagcggcggaagaacagagtgcgagagctggcagcggcgactgagaccgaccgcggcctcccccgccgttatttaagcggaagcggcgcgcccgcgcggcccggcggcgcgcgcggccccagaacatgtccatatatggcgatctttccgaaagccgggcacccattggcccgccgggcagggacacgtggggccccggcccgccccgcccccagcccgcaccgcctcccaacggccccgcccgcgccacccccgcgcgctcgcgaccctgcgcgggccggcgggcgggtctgagttggggcgccctccgagggtcgccgggagggccgaagggctgacgggcctggcccctccccgggactgccgcgccgtggggagggccctgctgcgccccgaaactgcctgacccggggcggggccgcgccggagctggggtgggtccccgagtccccggccacgctgcggggctttgctccctgggacgtcccttgcaatctttcccctcgggctccacgaggatctcgggcgccagtgccgggctgaggaaggggcgcggcgggggtccgcgacgctctgcgtccctgggcgcgggggagctctcaggagccctcacctcgccccggtcaccataggaaacagcccgcccgtccccaagcgcagccaccaccatgcaggtccctccacggggcgccctgccccggatctccgttcgtttgaagaccgaggcccctttctacccgacccgacacatccctgcccctcaaatcacaggcctgattgtccccaggcgcgcgctccgggttggggctaccccgcccccttatgtgctgagaaggtggtgtggagtgaggcctttgtttcattctggtcacctgtagacattatagggaaactgaggtagacaatgggagccctgacttttttgaaggtcggctccccagcttcgggcggtcggggggataccctcttctgtttacgatgctagttaagagcagcgatcagggctggcgtgggtttagccacaggcttgtccagggcgctcactcctcgccaggagcggcgccggtgctttggttacaccccgagaggcgcccggcactacggtttccttgtgcgctgctggaattttcagggttggagcgccggccgcgtaggggtggcagtgaggccgcgcagtgaggggacggactcgcccgaggtcgcagagcgttcagattgactcgacaggctggggggcggggccggggtccccacgcggagtccggggccctgcaacgttagctcgcgaccccgtgtttgggagtgacaacagcgagtcagggcaaggcggccggcccagctcacctgcgggctgcagtcagcccggacgccgagacccgtgcctaaggcccccgtgccccaggcctcccaggggtgctgagcgcccccaggcccagaatctccgggggcccgggcaaggctgtcaggtatgttccctcccgtggcgaagccggggctgggcctccaacagacccacccggactcgcgtccctgggcagaaccacacagcctgctcgacccccgggtgaggacttccacttggggggtcccaagatgcgacgtcacacaccgagggacacgaggcgggtggggaatagccacaagcccctccatcctgcgttcaccccacactacgttctgctccgggccggccggggaccctgcccctccgggtctctggtctcctccgaagcttctttgtctaggaagtgcggggaggtgccggccccgggcgcgcgtccccgtcccccacctttcttccccacgttgcggacccgaggccgccagggtcgtgggggcgggggcgaggctggcgcctcgagacccccgggttccccgccacccgcagggcctgagccgcggggaggggcggggaggggacgccgccgcgggccgggggtggagagcgacttcctcctccgcggccgcgtcacgcggcaggggtcaaggtgtggcccaggtacgcggcggggggcggtggcgcggccatatttggcgacttcggcgccgccggagccccgcccgcctccgccgggaagcccggcccggggcagcgccatccccgcccgccgcc

SEQ ID NO: 1243629 - DNA, 4001 bp, Homo sapiens
ccatcagttcccccacagtgtaaccacggggtgcacagttcacaggtagggagtgacaccaggcaagacagccagactcagcggccaggacaccccatccccggccctaggactgcacacctcccagggagcctgggcagttgctgaaggcagcttccaccccccaccccacccccagtgactgcgggccttggaccattagccccctccccctgcccctctgcacggccctgagtgatggtccatctattatgcatgctcccttcctgctccatccatttcatcagtattctccacccctgcaccaccccgcatccccctctgctcccctcccttaagggcttttaaccaagtacattaggcagggccagatgccagtctgacagatgtccgtaatgttagcctccgtttccctccttcctccctctgcccagcccaatttacctcccaccactccccgctgccaaaacttcccaggcctcagttgtacccctcttctgggtctcccccctatacctcctgtttgtgccgggcctttgccagccaacctgccctctgctgccctgttggcctggctcactttcagctccagctcttggagcgctggggtgtgctgaatgaatattccatctgggtgattattattcacatgatattaattaattattaattgcaattaatctccttcatgcctaaccttcctctgggaggcaggaggggcctggcagctgaaagggacagtgggcaggcaggtagagctggcttggggcctcaagttattttccaaggccccaccttcagccaggacaggaagaacaacaagcctatctgggcactgtgtggaaactgaggcaggagcaagcactaagttgttccaagaaagcccactaaggtggctgtggtgagaacctgagagccctaatccctgactggaatctgggctgcctctccctgcccccaacttgccccatccaagccctgttttgaacagaacaactagctttggccagagcagagcagggggccattggaaggctgacccaaagcagacctgagacctaggcattagtggtccctgtacactgagggcaggggaccctacaataatggaagggggccctggggctgggcaggcctggtgctccccaccagtgggctccagcacccaccggatagcccactgtacagaaggggaccctgcggggcagctgctgagggggactccaaccctggttaccccgtgggcttcctggggctctgaggcctgcttcagcccctggcctcaccacccagccccactcaccgggccccctggtggctcctggcggacccttgtgtccagctgctgctttcggacctctcccccggagctctccctaaccagacggctgggttccgtgacctcaggggctcctgggcctcccagctggggtaagcccccccatcgcagagctccagcaggaccttgggtcccaagacctggggaaacaaggccatggctgcaggcagctgcccaccctggggcagaagacttgggaatggggtgggcatgcctcatcccccactctggtgtggcccctggagccctagggcgatccgggtgggaggatctggctgccctgcagaggcaagagcccgcggggagggggccaggagcttcactcccgcccaaccgtcacgactgcccccccatccgcccaaacccgcagagacctgcagagctggccggtcggcggcaggggcagggacgcggtgggcccggccagctggggacaggtgggtggacgcaccttccctcctctcccgctcccctaccctcccgcgctccggaccggctgtcaccccgagcactgcaggaaaaggtggctgcagcagcaagcgccgcacatcccggggcgggggcagggagggggcgccggggccgggcgggggtcactcaccgggcgtggggagcagcgacagcagcagagccgcgaacgcccagcgccgcagcagcctcatggctcgctcattcctcccggtccgggggctgcggctgccagcggcgcggggagggcgggagcagggacgggggtggggaggcgccagctgcggagccggggcgggggcgcggggccgggcgggggtcgcggagaggtgggggcggcagggacggcgccggggctcagcgcgctccggccgcggccatcccggcggggcggcggggccgggttaagagctgagcagcgagcacgtgagcccagggcccgccctccgctctcccgccgccccccggcccccccagccccgcagggcccgggccgccgccgcggcaggacaaaagaggcgccgccccggggtccctcctcgcacctcgaagtctcctcggcaggtgcggggcggtggcgctccgcgtacttatcccgcggcctctcctcggccacctctgcctgagcatctccgaggactcgtagatttgtaggggagggaagcaggggacggggtacccccggggtcgacccggcgactgcctgtctggggcccgggggcaggggcgtggctgcggcgcccacgttcgcccctctgtcgtggtaccccagagaggctgccccagccccagcttggagcgccccgcttgaccccaggctgtggaagctggggttggggtgggcaaaggctcttggcgaacgccgggctctacgcctctgggatttcttgcaccttcgctacgggtcgtgtcactgcggagtcctctcacgcccgcggtacagaccccttcccatcggctccttctccccgccaaagatgccccggcctccaggagggcttcagggatcgctgtcactccaaccatcaggaagggctggcatgtccgtctgggttcctgagtctctcacaggcgtcctgtccttcctcctagataaaatataaactagccaggtcacttatatgctgctagcatgccccatggctccccctcccttgctagtcccaatccttaggagcagaagacacctctggagccccccagcattccctctctggtcagactaggctgccctgtctgcaaaatacttgacctcccaacctacattcccagctgtgccctccacccagctcctggggatgttgggtcccaataccagggctgggacctcagacttctgctaggggtgctgaaggccagatacctgagatggtgtggggtgtggtagggcatggtgggtgggccgctgagtccccaccctgacctttttggtacccatgctaggggaccacaggttgctgaagaacaagattggaggcaggaaaccccttcctgggtcctctgcttccgcaaggacccagggcctctgctggggatgagggaactgcctctagcttgtgacacccccaccccccgctctattttaggcccaggagaggtgagaaggcgatttcccaggaggcgctgacatcaatgtagggaaccaagtgactccccccacccccaaccacctgccatgccaggcccagatgctcagtaaggctgagccaattcttccttcgctctggagacatcttgagaacctcctccaagatgtaggcatgaggaggctcctgggaatgagggcctactaggtggtattcctggaaactcatcatgagcccagagggagagattgtgctccccattttacagatggggaaactgaggctctgagaggttatgtgagcttctcaaagtcacacagctggtgaaaggcacatcccatactccatggccccactcctcttagccacccctagtcctacttccatctctgccctccatttgggaccagaggggactggtatatctggtcccatgcaccctcaccacacaccccagacacgaaggtggctgtcctgctccagcctgcccatgtcccagggccacatcagcaagtcccgatcaggagtgccccccagtaggctgggtgaggtttgtcatttcacagtgcgagcccggggctgggagagtctgggtcctccaacatgtt

SEQ ID NO: 1243630 - DNA, 4001 bp, Homo sapiens
aagagtgaaactccgtctcaaaaaaaaaaaaaaaaaaaaaaaaggaagaaagaaaaaaagagaaatggtggtggtatcccttgaatacagatgtggaaactgagggtccacagctaggtcaaagtacctagctcagggcctcccagcttataggtaagcaaatgatggccaggagcggttcaggatggttcaggcctgtaatcccagcactttgggaggctgaggtggtggatcgcctgaggtcaggagttcgagaccagcgtgaccaacatggtgaaaccccgtctctactaagtacaaaaaaattagccgggtgtggtggcaggcgcctgtaatcccagctgcttgagaagctgaggcaggagaattacttgaacccgggaggcagcggttgcagtgagccaagattgctccactgcactccagcctggacaacacagcgagactccgtctcaaaaaaaaaaaaaaaaaagtaagcaaatgatagagccagaatttgaactctcggcctctgtctaagctgccatcttataagctgtgtttcctctagctagacttgcccctctctggttctcagtttccccctctgtagaatgggagccccctgcccgctgcctctactccagtcccgcagttccatggctctccacgggcatgcctttctacctccacaatactgtcgtcccagaagtcaagtcgcacagatttaactctgctgatgtcagggaagttacggtggacgccgcagcagttgagacagatgaagatccccagcttgtaagaggcccagtcgggatctgcaggggatgaggcaggagaggagctgagcggaaagcgcggtgaagaaaccagggctgggctcggggcactggggcaggtggggcgccccttctcccacctaaggcgaactaagcggccagcctggcaccttctggttagcccaccggccgctgcgcggcgaccggggtgaagatcctggaggcagttcagggcccggggagagagtctgaggctgcgcgacgtggaagtgaagggactcagaaggaaccgagaggagggcgcggggggcgcaccgcggggctcggcgcggagctgcaggtggggaggctgagttagggggccctcggcgtccccgaggtggggcgctggggaggccttcggggggcgtctgggagcgggcagggggcacaggactgtcggcggcctgggcccgacgtttagccctggctgggatgtctgagtccgagggcgtggggcgcgcctgggtgcgcagacatcgagagcccggactcgggcggtcgggtgcctggccagggaagagagcgggactggaagggctctaggctgccggctctcgtgtccgggtccaagcacgtgggaagatgcgcatctggtcccgcgaggggagcagagcctgggctcgtaggggccggggcagggtgtggtggagacggccctcggggctcgggtgagaggttcacggtgtgggtgggaggggtcggggcccgcaggtgccacgtctgggtccagggggccgagggcgggacccggtggggccgaggggaggagtcgggtgggcctggggtccggccgggggtctcgcgctgcccgcgccgccgcgcccttacctgccgccccgcagtcggcgcagtgcgcgttgcctgtgtccggcgcccgcagcagctccagcagccgcttcttgttgcgctcgcgatcgcccatggccggcccggcgggctcagcggggctcagcccatggcccgtgcgctccgcccggcaggtggagagggacccggccgcggcgcctcagccaggcctgggcagccgccagccccgccccgcaccgtcaggactgtccgcccctccctcggcaggtccagtccggccccgagctccgccgacgcgcggggagggacaggagcacgcaaattggagtttaacacactggcctgagatcaaatcgtggcctgtcacttggtagctacgagactgtggacaacctattcaacctctgtgggtctcagtttccgcgtctatgaaagaggaacaagggcatatgtctgcatctcagcgcttcttggaaaattaaccagaatctaacttctgttaaagcgttctgttaatgtaagatcttacatctatttggagacgtatttatatgcaaatgccacctcctcaggaagccctctgtgataccctgcctggagtaatctttccagcctctgggtctccaagaatactcttgtagtatctgtctatttgttttggacctgagcactttctatctaccttgcatcacggttatttatatacttgtgttaattccactctctgaccgcagacacatacacatgtccacaccagggagtttgacgtcagcagttttatgtctgtattccatattgctcctataaatgatacctgcacatttttagaagtccaactaatagttgcatgattttgttcaccagaaaagtgtggtttcaccaaggtggacacagccaggcactttaacctgtgaagttccatcaccgcgaggtgaaggcagggtataggtggtcttaaatgtgggcatttcatttcctctttccctctctcccatctttgttactgcttgacatcatcttcgttactccttgacatcatctgcaatgactcatgggcctcctggtgaaatatatactgtacatacttgccatcttctatgtaggttaataccttaatgcacacagatgcattaagccatatgcatatgatagacaggtgttaaccttcaggataaaatcaggtttccatcctggtgaattgcagctgatgttctagctgacctgcccacactcccattcaacatacatgcgggcgcaagcacacacgtgcacacacacgcacagcaatatggtgtaatggaatgaattcaggaatccagaaattcaggctttaaatgttgactccttcatttccacatttcccaactgtttgtctctgggcaagttccttcacttctctgagcctccaaaccctcaactgttaaatggagagcgtaagatccactaatagggtcattgaaatggcacaaagaaaccctccaaacatggtggcctccttgcttcccctgcccctatggtcagcttgtggaattgtcgcttggaatgctgtgtgtgattcccgtcatccctggggtggaggaggtcaagctgccaggactgagcaggaagggagggtggagagtattaccaagaatagccagccatgagggggtcttgcctgtgagggggtgaggcctagcccaggagcagccacagaggaaccagtgagagagtcagctggggtcagggggcatggggctgtttattaaaccggctgaaagatgattcatttccgttgctttagatgaaaaaagggacagaaataaatctcccaggagaaagatgggaaagtcaacttaaggtatgaaggcaaaggaaagagggagagagggagaagaggagacaagctaaggacatttctcctctgcccaacactgggacaaaattgtgatgctgggggtgcttcctcggcacccgagccttcaccagtctgtgctcctttgcttctctgacaccttaggtctcactgccacctccctgtaggtcccacaaaagccaacccagttctaagtaggctctggttgaatctcagaaactttaaaaaaagccgggcgcagtggctcacgcctgtaatcccagcactttgggaggccgaggggggcggatcacgaggtcaggagatcgagaccatcctggataacacggtgaaaccccgtctctactaaaaatacaaaaaaatggctgggtgtggtggtgggcgcctgtagtcccagttacttgggaggctgaggcaggagaatggcatgaacccaggaggcggagtttgcagtaagccgagatcgcaccactgcactccagcctgggcgacagagtgagactctgtctcaaaaaaaaaaaaaaaaaattaaaaaaaaa

SEQ ID NO: 1243631 - DNA, 4001 bp, Homo sapiens
ctacaaccaccagtttactgcaggcaggctcctcctcccaaaacagcagagcacttttctccctgactcctaaacacggtgccacacatggccttgcagagtggcctgatggcatgggtggggacacggtgccagctgtgagttcaagccccggctctgacacccatccctgatacaccatcctgggcaagactccaacctccctgggccatcacccctcctctacgagatgaaggttacagcacccgtcctctggtactactgcaaggactgctggggacacgtttattataaactgtctgcacagagttggcacccaataaatgaattccttcccttccttcctactctgtgatttagtttccctgtctcagctccaaatttaaagagatctcaagctctcctcagaaatgccaaagtggcccaggcaccaaagacagagaataaatactttcaacaaactctcaatgttgaagtcatcagctccaactgggaatccactctggtcgctggctgactccatcccctgaatcctagattttctcagtgtgggagaaagagtggacaagtaagttcgccaccattttctgcacttctcagcccgctcccaacagggcagcaggagataaatagttacacaagggcagtgaggctgtaaggccgtttgccagacacgaggaagcattgtaactccttttaaaagtatataatctgagtccgtagcgttccccaaagttaacggacaccttcccctgggatgggccgggccgcctctccgcagcagacacgttctgaagctggctcatgcgtgtccattctgacggtgcgaatgcccagcgtccaaagttgccttgcccttagtgggaacctcccgggcctccgggagccgcagcactcacgggactgccgctgcaccgccgctgcgggcgagtgttaggaacggccttcgtggcaggagtggagatgtgatcaccaaaactcccgcgccccgggctccacccgcccacgggggtgacgctttccccgggggtgacgctttccccggggtttccacggcgcctccccgggcgccggggaccgcactccccggaccccctagagctgtccctacgcagatctccttagagcgacgcgcatctgggatgtcttgggtgcccgggcgcactggtctagcgttgcggggtggccaggctgggaaccagccctccaagcgccccgcgcgcccccagcctggcccgtctggggcccccgagggaggaaccccggcctggagaagacgacccatttcggagctccgacggggccccgagttcgggcgacgccgagcgcctcacctgagcgggacacagatggccaggtatctgtcgactgccacggccagaaggctgaagatggagctctgcgtgagcaccagcacgaagcaggcgaggaagaggcagccgtagaagtcagtgcagaagcccaggctgatggtgatggcaaaggggatggcgaagagccccacggccacgtcggccgcagccagggacaccaggaagtagttggtgggcgtctgcagagtgttcgccgtgcccaccgcggcgcacaccagcacgttgcccgccaccgaaagcgcggcgatgaccagctccagcgccacgtacagcgcgtcctgtgtctccagcagcatggccgggccagctgggccccgggcgccccctaccgaaggcgcgccgggcgaggggcagccgcgtgagacccgccgggcatggccatagcgcccggaccgcgcctccgcctgccgcttctgagcctcggggctggggcgctggtggccgggacccacgggtcggggccccccgcggccaagaggcggcacccattggcccgcgcgcccgcccgtctcgggctgggcggagcaccacccactcgcccgagcccaaagttcgcgcccgcgcggggcccctccggtccaggcgccgtgccgcgtcttggtggcggcggataactaacaaattgccccaacttcccgtcacgctcgagctcggaggctgtgtcccagtgctcgcactgccttccagtccgggcgactcctgggatggggccgggctctgcccggggcgccagcaggtcccaggagccgccgcgagaggaccccccagggccgcgcaaccccgggcggggcgagctcactccaggctaaccctgcgcaccccgggcaggccgactggatggggggctgccgggcaggcagggagccgaggccgcagtccccgctcgtgcagcagtctcgggcagcgcagcaccaccggagctgtctccaggctgcggggccggactgcaaggagccctcgggggctgcagccccctccggccgcctcccagcgaggctcagcgctgttctccaccctcgcccgcgccactgcccctacggccccgctctgccttctaccttaagacaagctcgtggccgtcccatcctcgtccaccgcccgaaaataccagtgttccccgggccctcttttttctttccttcacactcaccctggatcggcacaggctcccgaggcctcccacgtggccctcacacccttaactcccaaatctcttgcttcagccctaacagcctcctgagggccagatcctaacaccccactgccgactctcgccaggagagagactggtgcccccaaatccaacaagaccaaaaccaagctcatctctaattctccccaaacctgtgctgccgccttttcctgggaccctgttcgttattgacctggcaaccctcacccaccctaggaagtttgctgacaccctgagccttcgcctttctccacgtcccaatgatcagcagtgctgctggttctgcttccagagacttgcttccttttacccccaaagtcctgccccgagtccctcctcaccacctgcttctaccatccctccctctctgcctgtgggtcctcagcttctgcagccctcaccaacaccattgttctagagcactcctggccacgctatttcaccacccgaaagcctttgctgacagtcaccaaagaggatgggtaaggagattttccagcaacaggaaaagatgcttgtaaaatcatgtaaagcaaaaatcaaaacatggggtgactgctaaagggtaaaggattttgtaaaggattttttagggtgataaaaattttctcaatgtggtgatggttgtacggttctgtggatatacctcaatgccactgaactgtacacttgaaaggcatgcattgtgtggcacataaattatatctcaatgtagctgtaatgacgacaacatggctcacgcctataatcccaaaactttgggaggccaagacaggaggaacatttgaggccaggagttcaagaccagcctggccaatgtagggagaccccatctctaaacaaacaaataaaaaataaatcagccaggcacggtggcaggtgcctgtagtcccagctacttgggaggctgaggcaggaggatcctttgaggccaggggttcgaggctgcagtgagctgggatcatgccactgcattccatccaggctgggcaaaagagggagaccctgtctctaaaaaaagacaagaagaagaaaaacccctctgccctccacaggcataaacagtcacatctgcccttgcaccaacgaggacagcaaaatgtcaaaaacacacacagtagacctcctagctgggtgggatgattacagggaatttttttttctatttcccttgaggttttgttacttccataatgaaaacagttgatttatatatcaaaatattggcaagcccacacattccgtgtcctggtcacgtgagttctggaatcacctgctccaccaatcacgttcccacagcagttgacacaaacttctgctgccacacagaaggccagagagatcaggcagctcctccaatagcacttccttggagtggcagagggcaaagggttagaggaggcttcctggggtactggcttttacagagtgaggga

SEQ ID NO: 1243632 - DNA, 4001 bp, Homo sapiens
ggaggttgcagtgagctgagatcgcaccactgcacactccagcttgggcgacagagggagactttgtctcaaaaaaaaaaaaaaaaaaaaaagaaagaaaagaaaaatatctaacttggaaaacaaaacataaacctcatttggtgactttggtggtttcacagcagtaataaaagtgataaggtctataagggataacactgtaggcgccttctggcactaaagtttcatgggtccttgccatcaggctcaggtgttactagcaattcatccaaaatgcagttataaaacacctactttgagccaggaactatattttatatttattttatttattttttagaggcagagtcttgctttgttgcccagactggaaggcagtggcccgatcacagctcactgcagcttcaaactcctaggctccagtgacccactcacctcagcctcccaaagtgatgggattacaggcgtgagccaccacatctggccccaagaactgttttcaatgatagcattttatttaatattataaaattaatatgaagaagttgctactaaaagaagcactttagcaaataaaatttaatagatcaggtagaaacactgacttcaatcttaatttgggtggctgatcaggtaacctacaattgggcaatcagagatgaacaataattttgtatgctatctgcctgactacacaaggtacttttatgtctttttgtcaattacaagaaaaaattatccctgggcaaacaaatacacaaagataaaagagcaaaaatcctacccacaggcaactataagatagaaaaaaatagtttgattaacgacttgaagtgctgaacaaacatttaagaactttggcagaaatttctgaaaattctagtccaaccgcgaatcaagaaacacaggtaacactatgttccgttactgggttagagaacagaacagttggctagtttggctaactcatagaaaacaagcaaaccaaccatgctctggtccaacaatcatcagagcacgagtttctcctactcagagtcggtcccatgggggaaaaaaaagccacacaggagcgggatctgtagttaaggaagataattagaggacgattttcctttttttatttctctgtattttgtaaagcaaccaccgaggtaggggcggggagggagtggttaatattgcggatattaagatataaataaaggcagatgaaatgaagttagactttcacaaagaacgaaaaacctacgaatgctcttggcctcattaacaaggaacataagcagttccagatgaggaacccataacaaacttcaaataacgaaactgtagggagcaagggagtccgtgagagtattttaagaaactgggacccaggaagactaagttaacggatgggatatcatgctgtctatatttctttacacactgctatgctttattaattaggttacattataatgttaaataactagaagcgctgggcatttaaagttcttccagaccgccctaaccactcaaattatcctaattagcaattttttttaagttaaagactatttcaatcgcaatgggtcggtttctatttcaaagatgtaaaggagtcaacattctggcacttcctcttggccggcaggacgaggttgacaaagtcggccagacaaggtagggttatgggggctgcccagtcccgtgggtctctaggcagtgtgttctctcttccgaggtgggggtgtccccggcgcgaggagctagctgtggtcaccgaagcccacgaccaaagcgggggcccccagcgcttggggccgccttgcctcggcccagccgcgcacctggacccctaaggcagcccccttcccggcgctccgctgtcccgcggccccgcagcaccgcccagcccgcgccagacccgcctccagccgcagggaactacctaccgtgcgccggcccctgggctgaaaggcctctgactacgggctatgtaacagcgccaccaacgagcgggacggacagagcgactccttccgacttccggaggaagcggaacgctaccggaaatcgcggggagggtcaaaggagacccggtctccgaggctcatggcgatgctggtcctagtacccggacgagttatgcggcctctgggtggccaactttggcgcttcttgcctcgcggactcgagttttggggcccagccgaggggactgcgagagtcttgctgaggcagttctgcgcgcggcaagcggaggcgtggcgtgcctcggggcgccctggctattgcctgggaacccggcccctcagcactgcgaggccgccacccccgtggtcgcagaagggccccggagactccacgcgcccctcgaagcccggggtgagtgcacacctggaacccttctggtgctcgtcgcggctgtcggccagcccagcggccacatcccacttggtcgtaacctcagacactactccgcctcccctaaagttgtccttagcttgcgcgccttacctgggtcatggaatttcatcctacatttcccgtgccttgcgggtagtcccagttctccacagagaacttgagactttacaccctctccacgtggctggatgccccgacttggattttatgttagcgtttccatcaaaaaaaaaaaaaaaattaagtttcaggttttcttaagggtatgaacctaaagtttaccgtgattgagaagtcagaggacttttataatttgtcacttgagccccatccagagttccatgtatacgttgaaattgaaacaaaaagtggaacttagttatgtgtggatctgcctttttcttggggttctctcgagttctaattctgacccagaaataacttgagagccactaccctgtggtaagagaagtgggtttttggagctacgggaaggttaatgagttaggcctagtctagttggccaacatcatcttcatttggggagttgaataagggtacaaagaaataatgggtgtaatttgcaagaagctccacttttagattcctcttctactttggcattgttacttctggaagccagagttaagttaacctcccaaatttcgtttggtctatttatctcagtatcagcataagcagataattgttttttgtgtgtgtgtttttggattttggtttttgttttgagacggagttttgctcttttgcccaggctggagtgcagtggccctatctcggcccactgcaacgtccgcctcccgggttcaagcgattctcctgcctcagcctcccgtgtagctgggtttagaggggtccgctaccacgcccggctaatttttgtattttcagtggagatggggtttcaccatgttggccatgctggtctcaaactcccgacctcaggtgatccacccgcctccgcctcccaaagtgctgggattacaggcgtgacccaccgcgcccggccataattggttttaaagtcattactggagctagggtcacacatagtaacaatcgtggtacttgagcttttttttttttttttttttttttttatttacatgaagagaactgacttagggaactttcccctggagatgaatgcctttgtagttcagatcccagacctaactgcatccacagaaactttgagcattttctcatccctgaaacattttgcacatttaacatcatggcctgtgtgtatgtatattaaaaactactttaataagtttgtatggttaaatgtttgcatcttactagaatttttatgtttgaaatccctgccccagtagcctgtttcctggaagtctttagcaatcacatttgctattggaggagctttactggctggaatgaagcacgtcaagaaagaaaaggcagagagtaagtagattatcatctgctcagccctgtataaaggtcttcctggctatggactagcaccttttttgttgttttttagctttttgttttgaaacaactttagatttaccaaaaaattgcaaagatagcat

SEQ ID NO: 1243633 - DNA, 4001 bp, Homo sapiens
tcgggaggtggaggttgcagcgagctgagatcccaccattgcactctagcctgggtgacaacagcgagactccatctcaaaaaaaaaaaaaaaaaaaagtaacaaggaaccagattttgaagaaagggctcaaaaccatcatgagaaatgggaagtcagggcagcctcatggcaaggcctgaggtcaaatgccatctgacctccctcacttacttactgttttatcctcaacaagttacttagtctctgagattcagtttcctgactggtagaaggtatctatccaggcccggcacagtggctcacacctgtaatctcagcactttgggaggccgaggcgggtggatcacttgaggccaggagttcaagaccagtctgtccaacatggcgaaaccccatctctattaaaaatacaaaaattggccaggcgcagtggctcatgcctgtaaacccagcactttgggaggccaaggggggcggatcatgaggtcaggagttggagaccatcctggctaacacagtgaaaccccatctctactaaaaatacaaaaaaattagccgggcatggttgcgggcgcatgtagtcccagctactcaggaggctgaggccggagaatggcgtgaaccctggaagaagaggttgcagtgagcccagatcgcgccactgcactccagcctgggcgatagagcgagactctgtctcaaaagaaaaaaaaaaaaaattagccaggcatgtagtaccagctacagtgtgcctgtaatcccagccactcgggaggctgaggcaggagaatcacttgaacccgggaggtagaggttgcagtgagccgagatcatgccactgcactccagcctgggtgactgagcgagactgtgtctcaaaaaaagaaggcatgtatccaaatcacaaggttaaaagagataaagcatgcgagtaaaataaagcaagccagtcagtgtgggttgcttcttcctcccagtgaaggagctctttgtcagaggtccttggatctgtccaatctgtacctggaaaggttattacctgtaggatccttacagccacacctggcacactctgtgatcactaccaccatctttgttgctattatttatgatcatgattatacaatgggtttcttttctttctttctttttttttttgagccaccgcacccggcctgtatgtttctaaccttcacaaccccaatgtaaataccagctgttctgaatccttcagcctgtgccacataagcacagacccaaaaacattgtgtaacctcagatcaaggtccagaactttgtcccctaacctcctgcgggtctatggatttttttttttttttttttttttttttttgagactaagtcttggtctatcgcccagccttccaggctggagtacaaatggcatgatctcggctcactgcaacctccacctcctgggttcaagcgattctcctgtctcagcctccccagtagctgggattacagaggtacatcaccacgcccggctaatttttgtatttttagtagaaacggggtttcaccatgttggccaggctggtctcgaactcctgacctcgtgatccgccaaaagtgctaggattacaggtgtgagccgccacgcctggcagggtctacggatattattagcatagtcaggacttcaattttctttatcctgaaaaccaggttaacaaaaatccttaggagaaggtaaaatacaccatggtgctcaagcactggggacctggcacgcactaggcgctctgcatgcccacaggagtgctctagacggcttctaagcttccttcttggaattccaatctaataaatgagctaactccgccccagccccttagtccctccctgcaatccacctacctctgcagacatcttcttccaaggaaccttgcttgggaaacccacaccagacacatccatcatggcgtctacagccgcatgggcgtgcgtccctctgtttatatggccagagccccgcctcgctccgcccctttaaacttggtgggcggaccgaggcggggctcagaccaggccccaccccgatcagccacgtccatcgccctgatttccaggccctcccagtccctgggcgcacgtcccggattcctcccacgagggggcgggctgcggccaaatctcccgccaggtcagcggccgggcgctgattggccccatggcggcggggccggctcgtgattggccagcacgccgtggtttaaagcggtcggcgcgggaaccaggggcttactgcgggacggccttggagagtactcgggttcgtgaacttcccggaggcgcaatgagctgcattaacctgcccactgtgctgcctggctcccccagcaagacccgggggcagatccaggtgcgggggccagccctgcgcgtggctggggatgaggtggtcgtggtgatagcctgtgtccaggcatccgcgcagggcgggccctcaaatgacctcaccttctctcctaggtgattctcgggccgatgttctcaggaaaaaggtaatggcttcgcggggctggggtggagctccttcctcttctccggggaccccttgtcccgtccctcccctccccttccctcccctcccctcccctccccttcccttccctccccttcccttcccctagaaggaccagcacagcctcctacagctcccgcctggggtgctcctcccttgaattcagtccaggaggaagtctctgccctcttctgcccaggccaagcccctcgtcctgtgtggacgccactccctcctggagctggtgacagctgcttacagcttagctgtcttccccaccaagtcctctgagaaggtggcaaccagttgtgtcccctgtaggccaggcctttttgtacacccctattcaatgtggctgtttccttctaaggccaaggaaacgtagtcgctttctaaaccaaggagtctgaagccgtggagcctctgctctcctgaggtgatagaaccattccctgacccgggtggggctagtgagtttcttgagtaaactacccacgcaccattctttttgttttgtttttgttcttctagaggtaggatcttgctatgttgcccaggctggtctcaaactcctgggctcaagcaattctctcacctcagcctcccaagtagctgggactacaggcgtgcacccccccgcctccacccagctaattttattttatttttatagagctggggtcttgctatgttgcccaagctggtcttgaactcctggtctcaagcaatcctcctacttcagcatcccaaagtgctgggattacagatgttagccaccatgccctgccccaacattcttttatggccctggggatcacttcagctcaaaccccttgctcaggaagatgtggctcagagttggacttcttggacccagaagcaagtgcttttgacgctgcacacaaagactttctgaaattaatttagaaaagctgtatgccaggtgtggtggcccacgcctttaatcccagcgctttggaaggctgaggtgcgttgatcacttgaggttaggagtttgagaccaccctggtcaacgtggtaaaaccccatctctactgaaaaaaaaaaccaaaaattatctgggcatggtggcagcctcctgtaatcccagctactcgggaggttgaggcaggagaatctcttgaacccggaaggcaggggttgcagtgagctgagatcgctccactgcactctaacctaggcaacagagcgagactccaccccaaaaagaaagaaagaaaaactctgaactctgggaacaactctgggatgaggttactttggaatgcagtcgcaggttccctctacatgtagcctttgcttctgccttccccactacatcttggagaaggttactcctcccacacttcctgggaccacctgagtaccattcctggacctcttccccatagagaattctgacttccaaccctctttgtagggatattat

SEQ ID NO: 1243634 - DNA, 4001 bp, Homo sapiens
aataggagggcaaacttgcaatgtgaggaggagggcaaaaaagtgaccagtgctgctctaatcatgctgtataaaatctccagatctaatcatgctgtataaaaagcaaggacttagccgggcaagatggctcatgcctataattccagcactctgggaggccgagacaggaggattgcttaagcccaagagtttaggactagcctggccaacgtggcaaaactctgtctctacaaaaaatacaaaaatgaggtgtggtggtgcacctgtagtcccaactacttggaaggctgaagtgggaggatcacctgagcccgggaagttgaggctgcagtgagccataattacgctactgcactccagcctgggtgacagagcgagaccctatctctctctctctctctctctctctcacacacacacacacacacacacacacacacacacacacacacagatgtgaggactgtgaagtgggccagctcactcctgctggtcatagccctgctccccaccagccagccacagcatgggtcaccccttccagcccttgttccctccatcttcacatgcacagcggtggggaataagtttgcaggactggctttgcaaagcttcgcttgagtcccagctttcccgaaacacagcagccccgcaaagcgggtgggtgagcccagaaaagactagtcccaggagacaggcgcgcagggcctacttacgatggtgtcgcaccagaactcggccacctcgtgcacccgcatggaggtaagcaggatctcccagacctcgagcttgaacatgtttccgatgatgatgtgcatgggctggcccacctgccgactgtcgtcaatgactgtccgctcctcatcacatttcatggtgcggaaatgaaagatcacctagtcaccgagacggtgcactctgctctagacacactgttcaaggcccggcagaagccacccccttgccaccgacacccagggctgtccccagggtcagctcactcagttcaccccatcagatgcctcagacccctggagcacctccaccctgcctgcaccccccagggaggagggacccacccctccctacagaccccattccactccccacagccctgtgcgtccagaaatccttcctcaagtaagcccgagttcttttttttttttttttttctgagacagagtctcactctgttgcccaggttggagtgcagtggtatgatctcggctcactgcaacctccacctcctgggctcaagtgattctcctgcctcagtctcctgagtatctgaactgggattacaggcgcccagcacatctggctaatttttgtattttcagtagagatggggtttcacatgttggtcaggctggtctcgaactcttgacctcatgatctgcccatcttggcctcccaaagtgctgggattacaggcgggagccgcctcgcctggccaaagcccgaattctgtagccacagacgcacccttcagtccagggaagcctaacagacatttggggacaaataccaagactcctcggactccctttcttctcactcaacatttagggccccagaaaattcccaaaagcccttcccctcagcccatgctaaagttgaatctgcaaagtaccaaaaatgccccctgaatgggtaaacgctgggagctccccggaggcccagcgctggggctgcctggctgtttttttggcacagctgaaagctgtttacagtgccttggggcacacctggaatgttgaaagctgctgtgggggaccctgtctgctccggaggggccccactcactcgggatccggtgatgaagtttgggagctcgcccgtgcccccgtgcagaatggttttcttgaccccttccacgttcaggagcagagcggcatccatggctgcaggagaaagggaggtgtccagcacaggcggagataatctcacctccggggaagacacttaggcggctgagactctgggatttacccagccaggaggagtggggggaagggcagacggtgggggcggtgacctaggcgccccggcttctcatcagagccactcgggccgggcctgtggtccacaggcagcctcgcctcctatcccatccacctttgcttccagtgattctgggcccctgcccagggttgtgctagatttggctttttgttccaccccaagaaggaaaaaggtccgctgagctttcttaaagaagacaggggaccaggcgcggtgactcacgcctgtaatcccagcactttgggaggccgaggcgggcagatcacaaggtcaagagatcgagaccatcctggctaatatggtgaaaccccatctctactaaaaatacaaaaattagccgggggtggtggcgggcgcctgtagttccagctactcgggaggctgaagcaggagaatcgcttgaacccgggaggcggaggttgcagtgagccaagatagcgccactgcactccagcctggcgatgtggagagaggcctggaggccactgaaggggaaaaggaggggaggcatgggctgggcccagactctaagtccccgaggaccccaggccagccggggtgacagctgccctttgccatccagccacctttctgctttccctgttccccctcccctccccagaatctgccttcaggaggccctgcgatggtggcccaaggcaagaggggacaggtttctggcttgggagagaaggaagacggagaacgaaaggcggggtgggtttgggtaaagttgaggcgccctccgcagccccgctcctgcctcccctgcaaggtctggctgggggaagggtgggtatcccctcccctcccctcccctcccctcccctttggaggcccttagccctgtgccctgggaaccaggcagagtttattgagggcatcagggacgcccagaagggctgggaaacataaatgcgaagacctggtgtttggcaccaccgtgtggccagttcaagctcctacacctccgcaccctgagggcactggactcagctccacgaaaccattctcttcctgacaccaggctcaccggttgcagagggaaggggtgcaggactctgctacagggagagataaaaacacgggactaaggaggctgaagtaggtggatcacctgaggtcaggagttttgtatttttagtagtctgtactaaaaatacaaaaattacccaggcatggtggtgcgcacctgtaatcccagctactcaggaggctgaggcaggagcctcgcttgaacccgggaggcggaggttgcagtgagctgagatcgtgccactgcactccagcctgagcaacacagcgagactctgtctcaaaaaaacaaaacaaaacaaaaaatgctagactaggctgggtgcagtggctcatggctgtaatcctaggactttgggagccaaggcaggtggatcacctcagatcaggagttagagaccagcctggccaacatgatgaatccccatctctactaaaattacaaaacttagtcggatgtggtggtgggcacctgtaatcccagctactcaggaggttgaggcaggagaatcgcttgaatccaggagatgaaggttgctgtgcaccaagatcatgctgctgcactccagcctggggcacagagtgagactgtgtcagaagaagaagaagaaggagaaggaagaggaggaggaggaggaggagggaagagggaagagggaagagggaagaagaaggaagaagaagaagaagactggactgagccagatacagctaagttcaaagggctgatcctttcctatttactgaccttgttgccttggatgtctctcgttttctctaactgcattttcccaactgaaatgagaaaattgacctctcctgctccttctcaggggaagttgggagggctgcagcagtgaatggcaccctgaaatccggcactcatgaaagtcttgcttcccgtgaggagtcattggcatagaggagaccaaacctgg

SEQ ID NO: 1243635 - DNA, 4001 bp, Homo sapiens
aaaggtcagtgagttttgccataaggcaaggaagctaacttataggagtaatttacggagtgccataaataggagggcaaacttgcaatgtgaggaggagggcaaaaaagtgaccagtgctgctctaatcatgctgtataaaatctccagatctaatcatgctgtataaaaagcaaggacttagccgggcaagatggctcatgcctataattccagcactctgggaggccgagacaggaggattgcttaagcccaagagtttaggactagcctggccaacgtggcaaaactctgtctctacaaaaaatacaaaaatgaggtgtggtggtgcacctgtagtcccaactacttggaaggctgaagtgggaggatcacctgagcccgggaagttgaggctgcagtgagccataattacgctactgcactccagcctgggtgacagagcgagaccctatctctctctctctctctctctctctcacacacacacacacacacacacacacacacacacacacacacagatgtgaggactgtgaagtgggccagctcactcctgctggtcatagccctgctccccaccagccagccacagcatgggtcaccccttccagcccttgttccctccatcttcacatgcacagcggtggggaataagtttgcaggactggctttgcaaagcttcgcttgagtcccagctttcccgaaacacagcagccccgcaaagcgggtgggtgagcccagaaaagactagtcccaggagacaggcgcgcagggcctacttacgatggtgtcgcaccagaactcggccacctcgtgcacccgcatggaggtaagcaggatctcccagacctcgagcttgaacatgtttccgatgatgatgtgcatgggctggcccacctgccgactgtcgtcaatgactgtccgctcctcatcacatttcatggtgcggaaatgaaagatcacctagtcaccgagacggtgcactctgctctagacacactgttcaaggcccggcagaagccacccccttgccaccgacacccagggctgtccccagggtcagctcactcagttcaccccatcagatgcctcagacccctggagcacctccaccctgcctgcaccccccagggaggagggacccacccctccctacagaccccattccactccccacagccctgtgcgtccagaaatccttcctcaagtaagcccgagttcttttttttttttttttttctgagacagagtctcactctgttgcccaggttggagtgcagtggtatgatctcggctcactgcaacctccacctcctgggctcaagtgattctcctgcctcagtctcctgagtatctgaactgggattacaggcgcccagcacatctggctaatttttgtattttcagtagagatggggtttcacatgttggtcaggctggtctcgaactcttgacctcatgatctgcccatcttggcctcccaaagtgctgggattacaggcgggagccgcctcgcctggccaaagcccgaattctgtagccacagacgcacccttcagtccagggaagcctaacagacatttggggacaaataccaagactcctcggactccctttcttctcactcaacatttagggccccagaaaattcccaaaagcccttcccctcagcccatgctaaagttgaatctgcaaagtaccaaaaatgccccctgaatgggtaaacgctgggagctccccggaggcccagcgctggggctgcctggctgtttttttggcacagctgaaagctgtttacagtgccttggggcacacctggaatgttgaaagctgctgtgggggaccctgtctgctccggaggggccccactcactcgggatccggtgatgaagtttgggagctcgcccgtgcccccgtgcagaatggttttcttgaccccttccacgttcaggagcagagcggcatccatggctgcaggagaaagggaggtgtccagcacaggcggagataatctcacctccggggaagacacttaggcggctgagactctgggatttacccagccaggaggagtggggggaagggcagacggtgggggcggtgacctaggcgccccggcttctcatcagagccactcgggccgggcctgtggtccacaggcagcctcgcctcctatcccatccacctttgcttccagtgattctgggcccctgcccagggttgtgctagatttggctttttgttccaccccaagaaggaaaaaggtccgctgagctttcttaaagaagacaggggaccaggcgcggtgactcacgcctgtaatcccagcactttgggaggccgaggcgggcagatcacaaggtcaagagatcgagaccatcctggctaatatggtgaaaccccatctctactaaaaatacaaaaattagccgggggtggtggcgggcgcctgtagttccagctactcgggaggctgaagcaggagaatcgcttgaacccgggaggcggaggttgcagtgagccaagatagcgccactgcactccagcctggcgatgtggagagaggcctggaggccactgaaggggaaaaggaggggaggcatgggctgggcccagactctaagtccccgaggaccccaggccagccggggtgacagctgccctttgccatccagccacctttctgctttccctgttccccctcccctccccagaatctgccttcaggaggccctgcgatggtggcccaaggcaagaggggacaggtttctggcttgggagagaaggaagacggagaacgaaaggcggggtgggtttgggtaaagttgaggcgccctccgcagccccgctcctgcctcccctgcaaggtctggctgggggaagggtgggtatcccctcccctcccctcccctcccctcccctttggaggcccttagccctgtgccctgggaaccaggcagagtttattgagggcatcagggacgcccagaagggctgggaaacataaatgcgaagacctggtgtttggcaccaccgtgtggccagttcaagctcctacacctccgcaccctgagggcactggactcagctccacgaaaccattctcttcctgacaccaggctcaccggttgcagagggaaggggtgcaggactctgctacagggagagataaaaacacgggactaaggaggctgaagtaggtggatcacctgaggtcaggagttttgtatttttagtagtctgtactaaaaatacaaaaattacccaggcatggtggtgcgcacctgtaatcccagctactcaggaggctgaggcaggagcctcgcttgaacccgggaggcggaggttgcagtgagctgagatcgtgccactgcactccagcctgagcaacacagcgagactctgtctcaaaaaaacaaaacaaaacaaaaaatgctagactaggctgggtgcagtggctcatggctgtaatcctaggactttgggagccaaggcaggtggatcacctcagatcaggagttagagaccagcctggccaacatgatgaatccccatctctactaaaattacaaaacttagtcggatgtggtggtgggcacctgtaatcccagctactcaggaggttgaggcaggagaatcgcttgaatccaggagatgaaggttgctgtgcaccaagatcatgctgctgcactccagcctggggcacagagtgagactgtgtcagaagaagaagaagaaggagaaggaagaggaggaggaggaggaggagggaagagggaagagggaagagggaagaagaaggaagaagaagaagaagactggactgagccagatacagctaagttcaaagggctgatcctttcctatttactgaccttgttgccttggatgtctctcgttttctctaactgcattttcccaactgaaatgagaaaattgacctctcctgctccttctcaggggaagttgggagggctgcagcagtgaatggcaccctg

SEQ ID NO: 1243636 - DNA, 4001 bp, Homo sapiens
cttagggaaaccaattcgtttttcctcccaaacaagcttctgggtcagaggctaaggagaggggtgcttttaatagaattcaagtcactcaagtaattcaagagaaacaaagtcagtctcagggattgttcagggaggagaggggaagagcaatgcttaagcacctatcacagtccccagtatcacaaatatgatctccatttgtctttaggacaggaaaagggaatactgtagaggctaacaccagccttcccctaaaatatggctgcaacccagcctatgtccaaagctcaagaataatttgggttaccaggcagcaagataaattgcttttaaatattgatgttcagcaaccttacactggagacatatcgacttcagcacctgagcaggccacttacaacagacacctccactgtcaccctgcagtggccaagtgagaatgcatttcctagaaacaactgggagatgggagagatattcctacaaggaactagacctagacacaaatccattagacctgtctcactcattggctaggatctgttacctgcaagttctgagccatcatctgacaacatgcatgaagacagagcctattaatccagtaatggactcaagctttagtgatttgcatgcctgtaggatccagaggacctcctctaacctagggccatatttcaaagagaatacacccaagaattatgcagaacctacaaaactagttagaggttaaagaaaagttcaacacaagtcaaaaggttcccaaaacataacttcacttgcttccagtgctcagggtcttaaataatcagcaggtgaaccacttcaatgccaagatcagaggaattatataaatgatcaagtcaggcagccttcttcatttcaaagatgttctgtacctttaagagcaaagtggatgggtggtgctaagagtccaagctttgctttctaaataaagagttaaaaaaaaaaaaggtactaatttgggaaggacttagcagttacaagagcttgtaaggctactagttgccagaattaatagctttttgtgaacggtgttccttgatcagtaactaacagatactgttgcaccaggtccagcagcctagatttcactggagacaaatctaaacacgaagtaacgcgcactacagtaggggaaagatacccaggttaacctcactaattgccctgcgcatacaccctacccagcttgagaggcctcgactcgcacctggagcgaagtccaccgggtttgtgttaacggcggcaggaaggcgccgccacccaggacatcccccaggagaggaagatcccgaaacgcccagggctcccatgccgttccgagtcgccacagcaccgcctaccacgatcagcacctttcttctcctatccctccctggaagggaaacaggaagaccttcagctagggcacaaaagagttgaacgccagaaagcccgcgttcgaggcatccagccactgcctctcctagcacatcgtaaccccaaaactggcgcggtccctccagatcgcagaccccgggccctgggccgcaggcggggccggacacgtgaccgtcggggcccccgggcgtgaggtcggcagacaccccaggctggacggcctccacccctccggacacgcctgcaggggctacgaatgcaaattccccccgagacgcccctgagcctccgacctccagaccccaattcggttcgaacggtccctcagcccgaaacacggttggatcacaaccggccgatgtcccggcccatcttcccagttcccctggctcgccgcacggaactcccaggggctgcgccggcgggcgagccgagggtgagaagttgggcgaggctccagaagtgaaggggcagctccggctcagactgtgtacacacgacctttgaaaagtaaacgcccgcggggctgggcgaccttgggtgggacgcgctcgggtcagcctcgcaggcgggtgtgcacgctccggttaagttgaggtgcagagaggcgacccgggcgtcgcgccctcgccccccgcccccgaggacagtgacgcgcgtggggaggacggcgcggccgcagagcgccgcccagagccgcgcacacgcgatctgtcaggagcccgcgggcagacaaccggcggggaaggacgagagggggcgcagacgagggagggaaagatgggcctgcctgacagcgcgcggcggccgagagcccccaggacacctctgcgtccggagcgtcccgcccccggggtacctggagggcgcgtcgcaccctgcacctgcacctcaggctccccatcgccccgaccccgccgccttcgggtctccggcagggggtccccggcgcagctgcccccgacctaccagctcctcggctaccatcggggtgcgggatgcggagtccgcgcgccgccgccggcccccggctgtgccccgcggcccggcccgcagcgccgcgcttccgcagctcccccacgtgctagcccaggcgggtggaacacagagacattaaatactgaagacgcgcggcgacgtgcccgcagcgcgacgcaggccccgcccctcgcccttgtgcccgcgcgctcccgagcccgccccgctcacctgcgcgtgcgcgccgccggccgctcccggcagtgcctccgccgcgcctctcccagctgcgccagagggggcgcggtctacagcgctgggctaacatcccgccgccgcccggagccgggtcttgctcgcgctctcgcgagagagccgtcatctctccggtgcccgggagaggggccgggcgggacggtacagcaaccggaggaaccttgattccctgccccgcaagcccagcaccggttttgccgccttgtctcgaagggtcaaccaggccatctcctgcctcgggacggagagcgccctggaaaaggcggaggggccggtgaggagcagggcttccctcgcttcggggctttgagcttccctgtgaccgtcatttccttgtagcgtataattgggttggccattaataattgctcgataactgcataatggtgaaacctggtaccactcaaatgcaactttcttgctcgttttcacaagtcgatgttatcgaaatgaagcacttttctctgaattggtgtgggttttggaatgatttttgcagagatagtcacggtgagtcactatctctgccaggaccttgggaaaataaattcctccaaaataaatggagagggtagggttttggctgtccagccctgctgtcatccttaaaacaaagtgactttaaatgaacatttgtttggccaaaatatagaaaatagatcatgctaagaactaacaattacttgggaaaatgcttaatcttcactagtgatcaaatgcaagtttaaatgacagatgccatttactatacctaatgagatttaagtcaaattcatatatatatgaatcccaattgcatggtgtggtagatgtcaggaaggaaacaaataggaaactgacataggaaagaaagaaaaagagccctattttttatttttttttttttgtgagacggagtcttgctctgtcgcccaggctggagtgcagtggcacgatctcggctcactgcaagctccgcctcccaggttcacgccattctcctgcctcagcctcccgagtagctgggactacaggcgcctgccaccacgcccggctaattttttgtatttttagtagagatggggtttcaccgtgttagctaggatggtttcgatctcctgacgtcgtgatccgcccgccttggcctcccaaagtgctgggattacaggcgtgagccaccgcgcccggccaaaaagagcccaaatgttttaggtcctgtggtcagaaaaggcctaaaatgaaatttaaactgagacccattggatgagaaggaaccagccttgcaaattgtatacgggcataagggttggaggagtattcctagcagatgcacaacacaggaaaaagcaggaaacaacttc

SEQ ID NO: 1243637 - DNA, 4001 bp, Homo sapiens
agaggggtgcttttaatagaattcaagtcactcaagtaattcaagagaaacaaagtcagtctcagggattgttcagggaggagaggggaagagcaatgcttaagcacctatcacagtccccagtatcacaaatatgatctccatttgtctttaggacaggaaaagggaatactgtagaggctaacaccagccttcccctaaaatatggctgcaacccagcctatgtccaaagctcaagaataatttgggttaccaggcagcaagataaattgcttttaaatattgatgttcagcaaccttacactggagacatatcgacttcagcacctgagcaggccacttacaacagacacctccactgtcaccctgcagtggccaagtgagaatgcatttcctagaaacaactgggagatgggagagatattcctacaaggaactagacctagacacaaatccattagacctgtctcactcattggctaggatctgttacctgcaagttctgagccatcatctgacaacatgcatgaagacagagcctattaatccagtaatggactcaagctttagtgatttgcatgcctgtaggatccagaggacctcctctaacctagggccatatttcaaagagaatacacccaagaattatgcagaacctacaaaactagttagaggttaaagaaaagttcaacacaagtcaaaaggttcccaaaacataacttcacttgcttccagtgctcagggtcttaaataatcagcaggtgaaccacttcaatgccaagatcagaggaattatataaatgatcaagtcaggcagccttcttcatttcaaagatgttctgtacctttaagagcaaagtggatgggtggtgctaagagtccaagctttgctttctaaataaagagttaaaaaaaaaaaaggtactaatttgggaaggacttagcagttacaagagcttgtaaggctactagttgccagaattaatagctttttgtgaacggtgttccttgatcagtaactaacagatactgttgcaccaggtccagcagcctagatttcactggagacaaatctaaacacgaagtaacgcgcactacagtaggggaaagatacccaggttaacctcactaattgccctgcgcatacaccctacccagcttgagaggcctcgactcgcacctggagcgaagtccaccgggtttgtgttaacggcggcaggaaggcgccgccacccaggacatcccccaggagaggaagatcccgaaacgcccagggctcccatgccgttccgagtcgccacagcaccgcctaccacgatcagcacctttcttctcctatccctccctggaagggaaacaggaagaccttcagctagggcacaaaagagttgaacgccagaaagcccgcgttcgaggcatccagccactgcctctcctagcacatcgtaaccccaaaactggcgcggtccctccagatcgcagaccccgggccctgggccgcaggcggggccggacacgtgaccgtcggggcccccgggcgtgaggtcggcagacaccccaggctggacggcctccacccctccggacacgcctgcaggggctacgaatgcaaattccccccgagacgcccctgagcctccgacctccagaccccaattcggttcgaacggtccctcagcccgaaacacggttggatcacaaccggccgatgtcccggcccatcttcccagttcccctggctcgccgcacggaactcccaggggctgcgccggcgggcgagccgagggtgagaagttgggcgaggctccagaagtgaaggggcagctccggctcagactgtgtacacacgacctttgaaaagtaaacgcccgcggggctgggcgaccttgggtgggacgcgctcgggtcagcctcgcaggcgggtgtgcacgctccggttaagttgaggtgcagagaggcgacccgggcgtcgcgccctcgccccccgcccccgaggacagtgacgcgcgtggggaggacggcgcggccgcagagcgccgcccagagccgcgcacacgcgatctgtcaggagcccgcgggcagacaaccggcggggaaggacgagagggggcgcagacgagggagggaaagatgggcctgcctgacagcgcgcggcggccgagagcccccaggacacctctgcgtccggagcgtcccgcccccggggtacctggagggcgcgtcgcaccctgcacctgcacctcaggctccccatcgccccgaccccgccgccttcgggtctccggcagggggtccccggcgcagctgcccccgacctaccagctcctcggctaccatcggggtgcgggatgcggagtccgcgcgccgccgccggcccccggctgtgccccgcggcccggcccgcagcgccgcgcttccgcagctcccccacgtgctagcccaggcgggtggaacacagagacattaaatactgaagacgcgcggcgacgtgcccgcagcgcgacgcaggccccgcccctcgcccttgtgcccgcgcgctcccgagcccgccccgctcacctgcgcgtgcgcgccgccggccgctcccggcagtgcctccgccgcgcctctcccagctgcgccagagggggcgcggtctacagcgctgggctaacatcccgccgccgcccggagccgggtcttgctcgcgctctcgcgagagagccgtcatctctccggtgcccgggagaggggccgggcgggacggtacagcaaccggaggaaccttgattccctgccccgcaagcccagcaccggttttgccgccttgtctcgaagggtcaaccaggccatctcctgcctcgggacggagagcgccctggaaaaggcggaggggccggtgaggagcagggcttccctcgcttcggggctttgagcttccctgtgaccgtcatttccttgtagcgtataattgggttggccattaataattgctcgataactgcataatggtgaaacctggtaccactcaaatgcaactttcttgctcgttttcacaagtcgatgttatcgaaatgaagcacttttctctgaattggtgtgggttttggaatgatttttgcagagatagtcacggtgagtcactatctctgccaggaccttgggaaaataaattcctccaaaataaatggagagggtagggttttggctgtccagccctgctgtcatccttaaaacaaagtgactttaaatgaacatttgtttggccaaaatatagaaaatagatcatgctaagaactaacaattacttgggaaaatgcttaatcttcactagtgatcaaatgcaagtttaaatgacagatgccatttactatacctaatgagatttaagtcaaattcatatatatatgaatcccaattgcatggtgtggtagatgtcaggaaggaaacaaataggaaactgacataggaaagaaagaaaaagagccctattttttatttttttttttttgtgagacggagtcttgctctgtcgcccaggctggagtgcagtggcacgatctcggctcactgcaagctccgcctcccaggttcacgccattctcctgcctcagcctcccgagtagctgggactacaggcgcctgccaccacgcccggctaattttttgtatttttagtagagatggggtttcaccgtgttagctaggatggtttcgatctcctgacgtcgtgatccgcccgccttggcctcccaaagtgctgggattacaggcgtgagccaccgcgcccggccaaaaagagcccaaatgttttaggtcctgtggtcagaaaaggcctaaaatgaaatttaaactgagacccattggatgagaaggaaccagccttgcaaattgtatacgggcataagggttggaggagtattcctagcagatgcacaacacaggaaaaagcaggaaacaacttctggtaaactggaagaccagtgtggatggtatgtattgagggagggagtgtcaggaaa

SEQ ID NO: 1243638 - DNA, 4001 bp, Homo sapiens
catgaagacagagcctattaatccagtaatggactcaagctttagtgatttgcatgcctgtaggatccagaggacctcctctaacctagggccatatttcaaagagaatacacccaagaattatgcagaacctacaaaactagttagaggttaaagaaaagttcaacacaagtcaaaaggttcccaaaacataacttcacttgcttccagtgctcagggtcttaaataatcagcaggtgaaccacttcaatgccaagatcagaggaattatataaatgatcaagtcaggcagccttcttcatttcaaagatgttctgtacctttaagagcaaagtggatgggtggtgctaagagtccaagctttgctttctaaataaagagttaaaaaaaaaaaaggtactaatttgggaaggacttagcagttacaagagcttgtaaggctactagttgccagaattaatagctttttgtgaacggtgttccttgatcagtaactaacagatactgttgcaccaggtccagcagcctagatttcactggagacaaatctaaacacgaagtaacgcgcactacagtaggggaaagatacccaggttaacctcactaattgccctgcgcatacaccctacccagcttgagaggcctcgactcgcacctggagcgaagtccaccgggtttgtgttaacggcggcaggaaggcgccgccacccaggacatcccccaggagaggaagatcccgaaacgcccagggctcccatgccgttccgagtcgccacagcaccgcctaccacgatcagcacctttcttctcctatccctccctggaagggaaacaggaagaccttcagctagggcacaaaagagttgaacgccagaaagcccgcgttcgaggcatccagccactgcctctcctagcacatcgtaaccccaaaactggcgcggtccctccagatcgcagaccccgggccctgggccgcaggcggggccggacacgtgaccgtcggggcccccgggcgtgaggtcggcagacaccccaggctggacggcctccacccctccggacacgcctgcaggggctacgaatgcaaattccccccgagacgcccctgagcctccgacctccagaccccaattcggttcgaacggtccctcagcccgaaacacggttggatcacaaccggccgatgtcccggcccatcttcccagttcccctggctcgccgcacggaactcccaggggctgcgccggcgggcgagccgagggtgagaagttgggcgaggctccagaagtgaaggggcagctccggctcagactgtgtacacacgacctttgaaaagtaaacgcccgcggggctgggcgaccttgggtgggacgcgctcgggtcagcctcgcaggcgggtgtgcacgctccggttaagttgaggtgcagagaggcgacccgggcgtcgcgccctcgccccccgcccccgaggacagtgacgcgcgtggggaggacggcgcggccgcagagcgccgcccagagccgcgcacacgcgatctgtcaggagcccgcgggcagacaaccggcggggaaggacgagagggggcgcagacgagggagggaaagatgggcctgcctgacagcgcgcggcggccgagagcccccaggacacctctgcgtccggagcgtcccgcccccggggtacctggagggcgcgtcgcaccctgcacctgcacctcaggctccccatcgccccgaccccgccgccttcgggtctccggcagggggtccccggcgcagctgcccccgacctaccagctcctcggctaccatcggggtgcgggatgcggagtccgcgcgccgccgccggcccccggctgtgccccgcggcccggcccgcagcgccgcgcttccgcagctcccccacgtgctagcccaggcgggtggaacacagagacattaaatactgaagacgcgcggcgacgtgcccgcagcgcgacgcaggccccgcccctcgcccttgtgcccgcgcgctcccgagcccgccccgctcacctgcgcgtgcgcgccgccggccgctcccggcagtgcctccgccgcgcctctcccagctgcgccagagggggcgcggtctacagcgctgggctaacatcccgccgccgcccggagccgggtcttgctcgcgctctcgcgagagagccgtcatctctccggtgcccgggagaggggccgggcgggacggtacagcaaccggaggaaccttgattccctgccccgcaagcccagcaccggttttgccgccttgtctcgaagggtcaaccaggccatctcctgcctcgggacggagagcgccctggaaaaggcggaggggccggtgaggagcagggcttccctcgcttcggggctttgagcttccctgtgaccgtcatttccttgtagcgtataattgggttggccattaataattgctcgataactgcataatggtgaaacctggtaccactcaaatgcaactttcttgctcgttttcacaagtcgatgttatcgaaatgaagcacttttctctgaattggtgtgggttttggaatgatttttgcagagatagtcacggtgagtcactatctctgccaggaccttgggaaaataaattcctccaaaataaatggagagggtagggttttggctgtccagccctgctgtcatccttaaaacaaagtgactttaaatgaacatttgtttggccaaaatatagaaaatagatcatgctaagaactaacaattacttgggaaaatgcttaatcttcactagtgatcaaatgcaagtttaaatgacagatgccatttactatacctaatgagatttaagtcaaattcatatatatatgaatcccaattgcatggtgtggtagatgtcaggaaggaaacaaataggaaactgacataggaaagaaagaaaaagagccctattttttatttttttttttttgtgagacggagtcttgctctgtcgcccaggctggagtgcagtggcacgatctcggctcactgcaagctccgcctcccaggttcacgccattctcctgcctcagcctcccgagtagctgggactacaggcgcctgccaccacgcccggctaattttttgtatttttagtagagatggggtttcaccgtgttagctaggatggtttcgatctcctgacgtcgtgatccgcccgccttggcctcccaaagtgctgggattacaggcgtgagccaccgcgcccggccaaaaagagcccaaatgttttaggtcctgtggtcagaaaaggcctaaaatgaaatttaaactgagacccattggatgagaaggaaccagccttgcaaattgtatacgggcataagggttggaggagtattcctagcagatgcacaacacaggaaaaagcaggaaacaacttctggtaaactggaagaccagtgtggatggtatgtattgagggagggagtgtcaggaaaggagataaagaggatcgtttcttgtctttgttttttgggggaataggggcctgggctgccttagtaaatacttagtatttgccatagtaaatagtgaagcttggattttattctattctgttcagtcccaaagccagtcatgactctacctcagggcctccctccacatggaatattctgcaaagctcactgtcttcacctctttcaagtcctttgctcaaaggtcacctactcagactcagtgaagtcttccctggactctctgttttattttattttttattttttgaggagtctctgtcacccaggctggagtgcagtggtgcgatctcagctcactgcaacctccacctaccaggttcaagcgattctcctccctcagccgccagagtagtcccactacaggcacgtggcaccatgcccagctaaaattttttgtatttttagtagagacagggtttcaccatgttggtcaggctggtctcatactcctaaccttaggtgatctgtccgcctcggcctccc

SEQ ID NO: 1243639 - DNA, 4001 bp, Homo sapiens
ccccttaaaaaaacaaaagttaaccacttcaataccaataaattagagagctattaggtatacccctgccttaccaataaagcttcctcctactattttaccggtttcattcattaagcactttcatgcattcatcacctggcatcagttaccaaaaccgtgtacccacttaagaagaagtatttaaagtcattcagagttcaatgggcctttgggaatcatctaattctcagctgacagaagacagaaaagtaggttaactggtctgcccctgttacagttagcagcagagctgtcatatgaaaccaagttcgattttgtttagtgctttttccaaaacccatttctggctggccgcggtggctcatgcctgtaatcctggcactttgggaggccgaggtgggaggcccacttgaggtcaggggttcaagaccagcctaacatggtgaagccccgtttctactaaaaatacaaaaattagccgggcatggtggggcatgggtaatcccagctacttgggaggctgaggcaggagaatcgattaaacctgggagacagaggttgcagtgagccgagactgagatcgcgccattgcactcgagcctgggcaacaagagcgaaactccgtctcaaaacaaaaaaagaaaacaaaacccatttctgtctggtactttttttttgagacggagtttcgctctttttgcccaggctggagtgcaatggtgctatctcggctcaccgcaacctccgcctcccaggttcaagcgattctcctgcttcagcctcccaagtagctggcattacaggcatgcgccaccaccctggctaattttgtatttttagtagacacggggtttctccatgttggtcaggctggtcttgaactcccgatctcaggtgatccacccgccaagcctcccaaagtgctgggattacaggcgtgagccaccgcgcccggcctctgtctggtacattttatctgaagcaacaggaattgacaggaaaaatcactgctgtccacagacccatacttgctcacttcggatatgtatttttaatgaagtgcaacaacgttacccagaatcaaaattaagctgtttctacgtaaacattgggcaggtaatacaactggaaatcaaaaatgtaagtagttcgtttgtaagttagggttccagtagttagcaaacttgccaaagtcatcaaaagtagtggtcttcctgttggggaactttagcaataagtaattttattttagtaacagcagtaactacccctccccccaaagaggaaattggaagacagcactgggtgaagaaaacaattttttcacgtgttgcttttagacataaaaccctcaacatttggaaacttcagacttccataataaggttctaaagagatttccttgatcttgatccacggtcctcaaagaaacacaaaaaaactaacccccacctaagaactgttcttaaccaaacaggcaggaacttctatgggctttagcaatcgcttctgaaccagcgcgacaatactcctctgacctcgcgcaagaaggccaccttctccctcccagaagagtcccggagcagagcaaggcactcagggggcatctgcgccgaggtcgaggctcgctgaaggccttgctgccgccttggggaaagccctcgcaggcccacctgccccaccgccgcccctgaggcccggcctgactccccgccggcgccccctcagctacctttccgccggaagaaggacatggcggggcccgggtcgggacggagggtgcggggggactggcgcggggagggcccggctcccctcattcagcaaccggcccggacttccgggtccagaggggccgctgcactagcgcgaaaagggacccttcttccgggagtgggccccaccgcctcctcgggatgcccaggcagctccagccgccatattatcaacaagccgcccgcccggagttccggtccttccccgcgctaggcttcacgggaggtcaagcgccggccccgccccttttccccatccccctcccgcgggtgcaggggcgcacgcccgcatcgcccacgtgacccgcgcgtgctacccgcgcctctttcccgggccctgggtgcctggagcgagccaccgttcctgcagctgttttgtggcgtctgtcgccggcccccggtggagcgctgcagacccagtctctgcaaaactaactccctggggcgggagccctcccagcagctggaacggggcgggccttaggtccccggcttccggcccctgggtacccttcaaattgtgcccttctaaaaggcagggtcaaccctgccacgctccagctcgacccctcctgctcctccgtttgagttttgctcacaggcgctggccggcacgagcagcttcaccctgcaccccagtccctgcttcctcaggagaacccgccacggcctgcgggttcgaggcgatgcagaaccctgattaggaaaaggcacaacctgccgcatgcggaaccagcagctccctggatcattagcgaatgaaaaggggaagcgggcttatttcggagtgcagtccctgcgaatgctcaactttgtaagggactgcaacataaaagcctcgccagtatttaaaagctagctccagtgaatcatccttgctcaaatgccattttcctgtgaatcttctgaccctctactcccaaagcaaaatcaatcaagcctccctgtctttggtgcttcttaacacccggcgagtgcgctcagcggctgaggttgtaactgctccctggggttggggttggggagggcaggaaggtaatagtaactcaataaatgttcgctggggtttttaaaccaatgaagtttatcatgtgacggatggggaaacaggcccagaagagacaactagcccaagattgttcagaatgttagaaataccaaaattgttagaaatagataatcggtgccacgaagaaaagtcagcacggagacaaaagatctccagcaaggcaatctttactttctgcagaaagggtgctcaatcgcagatggaacgatgtcgagagcacacctgaacaaaggaaaagcaaacatatttatcccttacgcatttgggtcgtcctcactgctatgtcctgcatccattggctggagcgggacctcacactcttaaactgatagccgatttgctaatagcctaaaactttctaaataggtaagtgcaaggaagaacgaagaaggagaggaagttgcttaccgaaaggtttaaggaagcaataacatttccaaataaggaaggggcataggctgtgaactggaacgtgcctgtgagcatgtccaacagttacataggatagggcttaacaaagagttattagcacaaagcaaggaggcttgaagaaagttagtctttaaaataaactattacttctaacacttatgatgtattctttaacaagaaggggaactttgaagaggaaactttttactttctacaagaatgtccaagtttaagactataactagaacccgaaataggcaaatcccttaacctgctctaataataatatggtcttttcactatattgttagagcaggttaaaagatttacttatttcatttctggccagatgcagtggcttatgcctgtaatcccaacactttgagaggctgaggcagtcagatcacctgaggtcaggagttagaccagcctggccaagatggcgaaaccccgtctctactaaaaatacaaaaattaactgggcgtcgtggcatgcctgtagtcccagctaatcaggaggctgaggcaggagaatctcgaacacgggaggtggaggttgcagtgagccaagatcgcgccactgcactccagcctgggcgagaggaagactccttaaaaaaaaaaaaaaaaaagatgtgcctatttcgtttcagagcatggcatgtttgcaagtgcatgaaaggtaaccaaaactgacatggaaatttactatgcgacggtac

SEQ ID NO: 1243640 - DNA, 4001 bp, Homo sapiens
aaggttagtgagatttgctagaagtcaagaggctgtcagtggaagcggtatttgaaggcctcgggtaagtaatataattactttcagcgagactccatctaaaaaaagaaaaagaaagaaagaaagaaagaaaaacagaaaacaagttacagaacaacagatgtaccaggcgtgtgcatgtgtgtgtgtgcgtgtgtgtgtgtgcgtgtgcgtgtgtgtgcatgtgtgtgtgtgcgtgtgtgtgcatgtgcgtgtgtgtgtgcgtgcgtgtgtgtgcatgtgcgtgtgtgtgcgcgcgtgtgcgtgtgtgtgtgggcgtgcacgctctaacatgcaagaaaggactagaacggtagcccccgacacgatgagacaactgatgggggtggaattattgatgatctgttttcctcttatgcaatgtttgactttttgcaatgagcttgtattttttaaattttggtgcgttttaagataggcactacatgctcatgaaacaaaatgtaaaatatagcaaaggggcacagaaaaaagtctgcctccctcctccctgctccatcagctgtcaggtgctgccccacagaggggccactgttaccagttccttactccccttcctgagatactcagcccacttgcagacccggcataacttttaacatcagcagaaatagggtatttccatttttttaaaaaaccctatatatcatatgtaatatataattatattgtatatagatatatggtcctgcctacattccagcgagtggcttccaatccttcctctgcctcccctccccataggctgacccctaatcccaggctttctgcacagggaggagggacctgctggcattgagggtgctctaagcctggcccttccatggtccctccctatgttctgataggaggctgggaaagccccctcactgggacctcctcagtcccatgggccaggcccctcctgctgaccacaacccaggagagaaggtcccgcttctctcccgagccttgtacggtcaaaccaaggcaggcagcccaggtgggaagagcctggtgagcgtgggacgggattggccttgcaccccagcatcgccacttggaactgtggtctctgggctggacggccttcccaggacttccccgagagacaggttaacaaaggtgccacttcacagagatgagtggacaccatcacgtcgcagctgcacccaaatgggagctgctgcagcatgcactgggggcctccccagagcccgtcgcctcacaccccacattcctgcaccccgctcctctcacctgtgccagtgttgactttgccccccagtgacacctcctcccctcctcattgccttccatcctcacaaaagctctgtagtgatgcccatgaagaagaaacggttatgagtgcattttacagatgaggaaagggagactgagaaacgtttaatgctgtatctgatctcacagttagcaggtggcatgtcagggtttgaacccacatgcatctctgtcagcagctcatgcctttagcactcggctctgctgccttccttccagtcatggagtctgacggcccatcagggcctctcactccacggccaccttggtgtccctgctccgcggatccctgggacctctgcctcctggtttgggggatggcagagctgccagaggtccaggaggatgctccagagatgatggtcccagaggcagggaccccctggagagatgatgtaggactcttgacacttagggccccggctctgagtgcagactccacctagacaagagaaaaaataaggaatgcagggaagaggattacctttgacacagcctctcccggtaactggggctcctggaacggcaagagccaagaggggacgtatttaaggaccctgcttcccgtccattgagcccttggagttcctgcccaggaagtttgcgtgacaagaaaaaaaaatattcaaatgtggggtgtggcgtcctctggacctctgctccctacagcccaggttttggggattaggtcccgggctgtttgcttttgttcacttctgaaatgcgagaatgtttctgaaggcttgggcagggcacatctccaatcttcaaaagagcctatgtttgccctgggcgtgggggctgctgattgattcagcctggcatggagctcttccagctttccagacttgccgctgccagatgcggttctctgagttctctggttacataagatcggcagggctcagccacgaaccacagtgagagcatgcagctcccccgaaacgcacccccagccaccgctgccccgggcccttcacatcccccagtgtgcacagggccccattgagtcagagatcctaaccctggggagccacaggctggggacttttgatgggggtctccaatccataaatctgctctctcgttgaatagctgagaagagggccaagggtctgtgtggtcaccgaaaaccagagatgcttgggaaggaaggagtctggaaaagccgttcccacgctgtctgatcaatgttcgctgggctcctgctctgcaccacgctgtggggaggaggcaggtgtggaacagactctcggcccctctcaccaggcgcttcccgccaccctcacccgcctgcaggcagactgcttaccagcatggggtccctgcttcccatttcattcgaggaaaacacaaggttccggtcctggcctacgagtcctgaggatgtgctctggccctcctgcttctctccacctggagcccccttcccctacatccacccacacggctacgctccaatgtgctgtggaaaatagcacaatgctgtcgtcttcctccattattttttctctggagcgtttatatcttgtttgctacctgtcccttaactcctgacagctagaatttgatttgttcactgctgtaacctccatacagcatttatagtagatgctcaataaatatttattgactgacaaaataaacaggaaatttcaaaataatgtgaacactgtagtaaccaggtaggcagaggatgctagaggggctggggtgagagtccgtgggagggaacatcatctgagctgagtgagaagcatttgggcaaggaacagcaagggggctggaagagcagaagcaaaggcacagaggctgggaacgttatgtcacgaaaaagtgcgatgtgtccactgttgccagcaggaggtgtggaggtgaatgactctcctggggcgggggctcacggaggcctgtgggccaggctggctgtgggggtgcagggcgctgaggagattatcagacagacaaatgtctgctattttttgttttagagaaccccctggacagggcacagtgtgagaaaggtctagcccaaaggctgcagcttccagcaatgcaggcaagaaatgacgagacccccaaataagactaacagaatgggaaacattccagaaacagcagaaagaagcatctgcaggacctcgcacctgtgcaggggctggactgggtggtaggtgcaaagtggggtgcctcctgagaggggagaagaccgagcctgtgccagcctctccccttttctggtggcagcagctgattatctttgcaggcaaccccttcctacttggtgagatgatcaaccaggtgccttctccaggccagccatgggttggggtgggctccccatgaggcctccctgactctcctgggaatttggatcttgagtagagggcagaatgcaaggccgaaggccattcggagctgacttcttgtggcagcggccctcccctgggagaaccatggaagcaactagcaaaagccagcaacacagcattgagtacacgaagtgaccagaacagtgcctggcgggccgagggcatcctggaaaggttaggtggtgtgggtgtcatcaaaagtggcagcagtagtggtggaagcgtcagagcaaggagcctaaaagcagttcaaatctacgaagaacaaaatccttgtttgcgtgtttg

SEQ ID NO: 1243641 - DNA, 4001 bp, Homo sapiens
cagagccaggattagccgttggacctgtgggtctgagaggacccctttctgccagaggggggcccaggtaggtttgcggccccaggggagagagccggtgaagggaccaggcatgggcaacggaatggatccaggtagggggaatagagccgggcaggggagagtagattcaggcagtgggaatggatccggggagggggggatggatccggggaggggggatagattcgggcactgggagctggatccgggcagggtggagggagccaggccctttagttgtctggagggggatgcaggaccaagggctgctgggcgctcagggcctcctgtggggagcaggggtgagaagaggagatgcagacggcggaaaacgcgtctcttttataaacttgggctgtgaagagcaacacagaagctgtaaagtcaacagaatgggtttccttgttgtttctggtttaagatgagaagtcctgagccatttcttgaaaagtgcagtagcaggcccggcgctgtggctcatgcctgtaatcccagcactctgagaggccgagaactcctcctgaggaactcctgagggcaggagttcaagaccagcctgtccaacatggcgaaaccctgtctctactaaaaatacaaaattagccgggcatggtggtacacgcctgttgtcccagctactggggaggctgaggcaggagaattgcctgaacccgggaggcggaggttgcagtgagccgagatcgcgccattacactccagcctgggcgacagagcgagactctgtctcaaataaataaataaaataaaataaaaataaaagtgcaggagcaaagagggtagtcggtgggaggatgggctccggagcgctggaccccaggcagcatgtggggacagcagggggctgcgaatgcagaggtgtctggtcttgctcagggtgagggacggaacagcccctgtgagaactgggagggaggggagagccccccatgccctccggggtgccaagctgctctggttcctggtgtggagaaccaagtggtcctgcgtggggctgaggaatggggaggaccagaagttcagggtgtcggggcagcaggaagttgaaatgggggacgctgcgggcgggacgcggaggccgggccaggaggaaaaggccagagggcggaagaggcggcgggggcgcgcggggcgcggcggaggggagggcggtgcgcccagtctccgcgaccgaggggccaggtggccccaagtccttcctgaacctctctgggtcgcactctccccagcccctccccccacgccccatcgcatggccccgacactggcagaaggcggccgcccagcctgagcaccttgtgcaggtctgcggccagcgcgcccaccagctcctgctcctgctcctggatcaggcgctgcagcgcctccagctgctggatccggaactgcagcggacgggtcctgcccgagctgaaggcggcgcgggcgcgcttcacggcctcgctgatcttgctcatggcgcctggggacagagagcacctgcagctggctgaggggcacgagcgcgccctgcctcccaccctgcctgaattctataggaagggacttccctgggctcggccttggggaaaatggcctttccgctggaaggtccactttctgcctcgcctcctctcccgcccctcactcagacgcctgggccctggctgccttgctagcccctgagaaggtgacacccgccgcaacccgagtcctaagccgaactgctgctgggggctcttggcagcgtgctcgcggcagggcctttcccggccttttccgctcccttacttgcttgcaaagctgatggcacaatcccagaccaacacccccagagctctgcacacgcagtcagccactctccagatcagattggaggggcgcagtccgcgattccacacccaagccgataaagaaaaacccagcaccaccctcctggctaagccattgttctaaaaagcgctggtttcttggcagagctgaaccaggcttggtgtgtaaaccacgcgtgccacacctgggagacgcacgcccatgcccgccaaggattcagagagctgcagatttccacaaagaggtgtggaggcgattcctgctaccaatacacgaaagtatagtggcaaatcgggatggccctgctgggggcaatttggcaatatgtggcaaaagtttttcaaacatacttctctgtgacgaaaaggtcctacagcctttcctaaacattcacgaataagaaagtcatcactgttttctataacagggaagtattgtaaacatcccaaagatccgaaagaaaggagacagtttaaatgactcctgtcacacccacgtaagggtttactgtgcagtatttagggattaggtggagcaggctattcagcatgtttgtaggggctctctctgcaccaggggtgtctcaggcactggggataagaaagaaaacaggttacaggccgggcgcggtggctcacgcctataatcctagcaaacactttgggaggctgaggtgggcgggtcacctgaggtcagaagttcaaaaccagcctggccaacatggtgaaaccctgtctctactaaaaatacaaaaattatctgggagtggtggcaggcacctgtagtcccagctacttgggaggctgaggcaggagaattgcttgaaccaagctgagaggaggaggttgcagtgggccgagattgggccattgcactccagcactttgaccgggagaatggagccataatcacagagttctcctattagattagtggtaggaggtaaggcaaggttagtgagatttgctagaagtcaagaggctgtcagtggaagcggtatttgaaggcctcgggtaagtaatataattactttcagcgagactccatctaaaaaaagaaaaagaaagaaagaaagaaagaaaaacagaaaacaagttacagaacaacagatgtaccaggcgtgtgcatgtgtgtgtgtgcgtgtgtgtgtgtgcgtgtgcgtgtgtgtgcatgtgtgtgtgtgcgtgtgtgtgcatgtgcgtgtgtgtgtgcgtgcgtgtgtgtgcatgtgcgtgtgtgtgcgcgcgtgtgcgtgtgtgtgtgggcgtgcacgctctaacatgcaagaaaggactagaacggtagcccccgacacgatgagacaactgatgggggtggaattattgatgatctgttttcctcttatgcaatgtttgactttttgcaatgagcttgtattttttaaattttggtgcgttttaagataggcactacatgctcatgaaacaaaatgtaaaatatagcaaaggggcacagaaaaaagtctgcctccctcctccctgctccatcagctgtcaggtgctgccccacagaggggccactgttaccagttccttactccccttcctgagatactcagcccacttgcagacccggcataacttttaacatcagcagaaatagggtatttccatttttttaaaaaaccctatatatcatatgtaatatataattatattgtatatagatatatggtcctgcctacattccagcgagtggcttccaatccttcctctgcctcccctccccataggctgacccctaatcccaggctttctgcacagggaggagggacctgctggcattgagggtgctctaagcctggcccttccatggtccctccctatgttctgataggaggctgggaaagccccctcactgggacctcctcagtcccatgggccaggcccctcctgctgaccacaacccaggagagaaggtcccgcttctctcccgagccttgtacggtcaaaccaaggcaggcagcccaggtgggaagagcctggtgagcgtgggacgggattggccttgcaccccagcatcgccacttggaactgtggtctctgggctggacggccttcccaggacttccccgagagacaggttaacaaaggtgccacttcacagag

SEQ ID NO: 1243642 - DNA, 4001 bp, Homo sapiens
cattctgcagcgacagagccggagtgagcttccagggccagggcccgcctgcagctggggcgagtggggagccccactgctcagctgccagggtgatgggggtcactcacccagcccagggtgggggcagccgcagaaggctcccaggggaagcagagccaggattagccgttggacctgtgggtctgagaggacccctttctgccagaggggggcccaggtaggtttgcggccccaggggagagagccggtgaagggaccaggcatgggcaacggaatggatccaggtagggggaatagagccgggcaggggagagtagattcaggcagtgggaatggatccggggagggggggatggatccggggaggggggatagattcgggcactgggagctggatccgggcagggtggagggagccaggccctttagttgtctggagggggatgcaggaccaagggctgctgggcgctcagggcctcctgtggggagcaggggtgagaagaggagatgcagacggcggaaaacgcgtctcttttataaacttgggctgtgaagagcaacacagaagctgtaaagtcaacagaatgggtttccttgttgtttctggtttaagatgagaagtcctgagccatttcttgaaaagtgcagtagcaggcccggcgctgtggctcatgcctgtaatcccagcactctgagaggccgagaactcctcctgaggaactcctgagggcaggagttcaagaccagcctgtccaacatggcgaaaccctgtctctactaaaaatacaaaattagccgggcatggtggtacacgcctgttgtcccagctactggggaggctgaggcaggagaattgcctgaacccgggaggcggaggttgcagtgagccgagatcgcgccattacactccagcctgggcgacagagcgagactctgtctcaaataaataaataaaataaaataaaaataaaagtgcaggagcaaagagggtagtcggtgggaggatgggctccggagcgctggaccccaggcagcatgtggggacagcagggggctgcgaatgcagaggtgtctggtcttgctcagggtgagggacggaacagcccctgtgagaactgggagggaggggagagccccccatgccctccggggtgccaagctgctctggttcctggtgtggagaaccaagtggtcctgcgtggggctgaggaatggggaggaccagaagttcagggtgtcggggcagcaggaagttgaaatgggggacgctgcgggcgggacgcggaggccgggccaggaggaaaaggccagagggcggaagaggcggcgggggcgcgcggggcgcggcggaggggagggcggtgcgcccagtctccgcgaccgaggggccaggtggccccaagtccttcctgaacctctctgggtcgcactctccccagcccctccccccacgccccatcgcatggccccgacactggcagaaggcggccgcccagcctgagcaccttgtgcaggtctgcggccagcgcgcccaccagctcctgctcctgctcctggatcaggcgctgcagcgcctccagctgctggatccggaactgcagcggacgggtcctgcccgagctgaaggcggcgcgggcgcgcttcacggcctcgctgatcttgctcatggcgcctggggacagagagcacctgcagctggctgaggggcacgagcgcgccctgcctcccaccctgcctgaattctataggaagggacttccctgggctcggccttggggaaaatggcctttccgctggaaggtccactttctgcctcgcctcctctcccgcccctcactcagacgcctgggccctggctgccttgctagcccctgagaaggtgacacccgccgcaacccgagtcctaagccgaactgctgctgggggctcttggcagcgtgctcgcggcagggcctttcccggccttttccgctcccttacttgcttgcaaagctgatggcacaatcccagaccaacacccccagagctctgcacacgcagtcagccactctccagatcagattggaggggcgcagtccgcgattccacacccaagccgataaagaaaaacccagcaccaccctcctggctaagccattgttctaaaaagcgctggtttcttggcagagctgaaccaggcttggtgtgtaaaccacgcgtgccacacctgggagacgcacgcccatgcccgccaaggattcagagagctgcagatttccacaaagaggtgtggaggcgattcctgctaccaatacacgaaagtatagtggcaaatcgggatggccctgctgggggcaatttggcaatatgtggcaaaagtttttcaaacatacttctctgtgacgaaaaggtcctacagcctttcctaaacattcacgaataagaaagtcatcactgttttctataacagggaagtattgtaaacatcccaaagatccgaaagaaaggagacagtttaaatgactcctgtcacacccacgtaagggtttactgtgcagtatttagggattaggtggagcaggctattcagcatgtttgtaggggctctctctgcaccaggggtgtctcaggcactggggataagaaagaaaacaggttacaggccgggcgcggtggctcacgcctataatcctagcaaacactttgggaggctgaggtgggcgggtcacctgaggtcagaagttcaaaaccagcctggccaacatggtgaaaccctgtctctactaaaaatacaaaaattatctgggagtggtggcaggcacctgtagtcccagctacttgggaggctgaggcaggagaattgcttgaaccaagctgagaggaggaggttgcagtgggccgagattgggccattgcactccagcactttgaccgggagaatggagccataatcacagagttctcctattagattagtggtaggaggtaaggcaaggttagtgagatttgctagaagtcaagaggctgtcagtggaagcggtatttgaaggcctcgggtaagtaatataattactttcagcgagactccatctaaaaaaagaaaaagaaagaaagaaagaaagaaaaacagaaaacaagttacagaacaacagatgtaccaggcgtgtgcatgtgtgtgtgtgcgtgtgtgtgtgtgcgtgtgcgtgtgtgtgcatgtgtgtgtgtgcgtgtgtgtgcatgtgcgtgtgtgtgtgcgtgcgtgtgtgtgcatgtgcgtgtgtgtgcgcgcgtgtgcgtgtgtgtgtgggcgtgcacgctctaacatgcaagaaaggactagaacggtagcccccgacacgatgagacaactgatgggggtggaattattgatgatctgttttcctcttatgcaatgtttgactttttgcaatgagcttgtattttttaaattttggtgcgttttaagataggcactacatgctcatgaaacaaaatgtaaaatatagcaaaggggcacagaaaaaagtctgcctccctcctccctgctccatcagctgtcaggtgctgccccacagaggggccactgttaccagttccttactccccttcctgagatactcagcccacttgcagacccggcataacttttaacatcagcagaaatagggtatttccatttttttaaaaaaccctatatatcatatgtaatatataattatattgtatatagatatatggtcctgcctacattccagcgagtggcttccaatccttcctctgcctcccctccccataggctgacccctaatcccaggctttctgcacagggaggagggacctgctggcattgagggtgctctaagcctggcccttccatggtccctccctatgttctgataggaggctgggaaagccccctcactgggacctcctcagtcccatgggccaggcccctcctgctgaccacaacccaggagagaaggtcccgcttctctcccgagccttgtacggtcaaacca

SEQ ID NO: 1243643 - DNA, 4001 bp, Homo sapiens
gccaggcacggtggctcacgtctataatcccagcactttgggaggctgaggcgggcggatcacaaggtcaggagatggagaccatcctggctaacacagtgaaaccccgtctctactaaaaatacaaaaaattagccgggcacggtggcgggcgcctgtagtcccagctacttgggaggctgaggcaggagaatggtgtgaacccgggaggtggagcttgcagtgagccaaaagagcaccactgcagtccggcctgggagaaagagcgagactccgcctcaagaaaaaaaacaaaaacaaaaacaaaaacaagatgatagcctcatgcctgtagtcctagtatctgggaggttggggcaggaggactgcttgagcctaggagttggaggctgcagtgagttatgattgagtcactgcacttcagcctgggtaacaaagggagaccctgtccgtttaaaaaaaaaaaaagtaacaatattatcagcaaacatacaggaatatacttacaccctaaaacactacttaaaactttgctaccacaggccgggggggtggctcacacctgtaatcccagcactttgggaggcccaggcaggcggatcacttgaggccaggagttcaggaccagcttggtcaacatggtgaaactccatctctactaaaaatacaaaaatgagccgggtgtggtggcgcacgcctgtaatcccagctactgaggaggctgaggcaagagaatcgcttgaacccaagagatggaggttgcagtgagccgagatcgcaccactgcactccagcctgggagacacagtgagactccgtcttaaaagcaaaacaaaacaagcaaacaaacaaaaaaaccacacacacaaatcaaaacaataaaaactttgctacacaaagcgtgcttccaaaagaggcatatgatatcactggggaccttgttagaaacttggaatctcagatcccacccccgacatactgaaccataatctgcattttaacaagatccccaggtgactgttagtgcattaaaatttgaggagaactgacctaataatacacaaagttatgaagaaaaatttgactgcaactataacttaaaaacaaaactctgtctaacaaagaaaccataaacaaagctaaaagacaagaaatagacccagaggctggtctgatggtaatgggttattcagaacttattaatattactgttattcaagttggtatgcaactctcccactgctaaatttggcttaaaaaaaaagaaaagaaagaaacccaaagaaagtatccacaatacagtaaactgacaaattacttaaatccagaatatacaaagagttcctacacatcataaggaaaagaaccacaaatgtaacagaaaaatggacaagaatagaaaaggcagaaaaggaaccacagaagctaggtaacatatgcccttctgagtgctagaggaccgggaaagtctgcgggaactttggctttatctgtatcgctggagatcatactcccagtgctggagtaatccgaaatgtaaaagcaaaaacaaaacccagccgaagctccagtccacaagtgcgcggcgggggccagtttccccacaccccgccgcacgcgtgcgtaccttgcacaggtcggcggcgatggccgtcaggatatccttctcgcgctcctgcaccatcctccgcagggcctccagctgctgcagccgaaaccgcagaggtcgcgaccggccggacaggaacgcctgtcggacccgccggacttcgagctccatggcctggtcctgcagagaactgcacggtccgggggcgctggggagtgggaggcgggaagcatgcaggtgcaggcctcgcctcccttccctccgcctccctccggggggtgtctccaccgtcaacccacagccacaattcactcgcccagggctcgctcgctcagccgcgacctccacgcccgctgagtcccactgccagtcggaggcgccgggggaggactgagctcgacccaaagcctcacccctattggcctgggcggcccacgtgacagccgctgttcacggcctcgcccacgcggcccccgccctctccccggctctggcagcgggctgggatgtagggggtggagtgagcagtgcgggagccgagcgcggccacgggccagggggcggcggggtgtagggatggagggaaggtgttggccatcctgctgagagcgccccggggcggccccagaaagggcgaagaggaatcctggaggagcaggcggagggcgctcggctgggagtgggcgccctgccggaagcgccccgactgcgacggagagcagtctccgctctggcacgctctgaggggttccctcctccattttgtggctcttcaaacatggccagatggacgtagttggaggcctagcgctccccattccgcttccctgtcccctgctccttccttcagcgaggagctgcctcgaccggcactgaccgtcccagttccctggagagctagtccctgagggcgggaagccggggttcgtctcccgcggagccgggacagcggtcatttccttcttgcacaagcatcatcctcgcacgtccgttactcagagcttctccccaggctgcatttgcctcgctgcccatggttccgtgttcccgctcccaagagagaacccgctgccctcaggtttccccctcccgccttattgcctttcgggcgagagacttcagctctcatcactgtactcagcagcagttggctcagctgatcggtcctgtcttgtggaaagctttcttttctttaccatttccctgcactcttctgcacttttctttttagctcactggccgggtcctctggggttcctttgctggatttttctccccttcctgacctctcacttgttcaggtgcccagggcttagtccggggccctcttttcacagccactccctcatgtaatcccatgaatagtgctcacagaaggctctaatcccagcctttcctctgaactctaaagggtatatttgtgaaaagaaaataactcggggccctggcccaaatgaactctccacttatgtacaaaacaacaaaaaccgtgggagctcaattcactatgccaaaaggaaaaaattaagcaaaaagctgagtcatgcaagaaactgcctttctctatgtccctaagcagatagctacagataaaaggttaaatgtccccacaggtagctgctctgtcctcaccttatcttactgaagtgctgatttacacagcaggaggcaaatacataattgactattcccctgcctgttcctttttctatttgtgcaatgtgtggattcagtaatgaccatgttctccctctttcccctccagcccgctcctcccttttaaatattgaagccctcaaaatcatctttagataaaggcacagacctccctcccaagcatgtccttaaccttggcaaaataaacttccaaattgattgagagctggttttggtttacaagctggcagccaaaggaagtgactcagtggaggtggccctgacctttgacaaatctatcagtgcttggtaccagcttgggctatttttattgctcaaacaggacaatttgctgaggcctgggagcaccccactccagagaatccctgatgtcccaaaatttggttgagatctaaagtttattttgctgtacacctctttgtctgcagttttacttactcccaacaaagaaggtgcgttttcctgcctccatgacgatggaggggaggcaactcctttctggaatttcatctggcttccagcagggaaggtgagtctgagttttttttctccttctaaaatggtaaagagcagtcttgagcctggaccctattcctaggtaagcacctgaattggagttttgtcttggaaactctccttggtgactaaagttaagattaacaaccagctggtcttaatttctccttaccattagagcgctcaataatacaaattg

SEQ ID NO: 1243644 - DNA, 4001 bp, Homo sapiens
agcccacccatcctataccttgagtggtggtttctccatcagtcccagctagaggcaccacacccttgtcaacctgtagaggaagtacaagcagagggttgaatccaggcaggattctccttgctacccctcctacacaagcttattttcacacccagcttccattcagagcagggccaggggctgcaccttgatgcccacgacgatgcccttatcctggatggttcggacgaagggaacaccattatcatctttctggtagagggtctcatggaagaaaatgacgcctccaatgcactttttcacacggtcatcagcactgaacaggacctggcggtacagccggcggttctcctctgtgttttccaccccaatttggctcagccgcttggccatgctgcctaggggcaaacaaagagaggcagtgagaacatccccagggtcccctagccacctgtaccctacctggctacagatgtccacttacctacagactcatccgcagccagaatgcctttgcccggggctacaatccgcagggcaatgtcagacaactccttcttctgctcagcagaaagggctgggtacgagtgaggcatggtgacagctccctggagtggagacaagataaaaaagccagacctcaccctctgctgcctctcctggccagatgggccaaatggcctccccatcaagcaaggggctgggaacagggcagcagtccttggcatgagtcctgggcatcaagtggcaccagtccttctgacagctagcaagcttagggctccagttcccacatctccttttgtccctggtaggcatccttcccagccctggggaaagatgcagggtgggggtggggaggtgagcagccctgaagccacagctcttctgataaatctgctgcccaatcaaggatgccaacccttctttcactgaacttggtcccttgttgaggtaggcaaaagtcctggcctttccagcttcccttttctcatcctccacaggacccctagggaaagtgtacttacttccaaggcttcagaatgaggcaaaagtacttattgccaccctcttctctcagcttctagaggaaaaggttggaagaacaggtagggagtaggagtggcacaaataccagtcacaggctcctgcagcttctccttttctgtactccaaacctgcctgcctatgcctattgcctattcccacccagtaccagaggttggccccagtggggctgcagtgatgtaggaaagagggcccagcgggtcagctgtgttagtgtgtggagactagggctagtgacacctccgggtcatctctgtgcccaggaagcacttcacctgtttggcaggaggatagcaataggaagcacttcaattccccacaactcagacacccagacgggagggcagaggaccaaggctgaaaggagtagagagcctgagagagagatgagactgaggggagctagtggtgatgcaggctaaccagtcagcgggagagacctagaccggggggcagagaaggcgggagaactggagagaggacctagcctaggaggagagggagcaggctgagaaggaaatgctctgggtaggagagacagactccaaggaaaaatccaacaagtagaggaggatttgggattggaaaagctgaggtccagctgggagagctgaagagggatagaacagaagaggttgagccatggggtttcaagtacgcggaaaggagcaaagatgttaggaaagggtcgaaagggcacatcccggagtcccaggtagcaggacgaggatggcaggggaagagccaaggaaatgaagcggagatgttgagtggctcccgccttgcctggccttacctgtgcgcagccagttagcagccgcagccacaagcacagctcgggttctgatccgcaaacagatgaggctgcagccctggctccctctggtaaatgaggctgcggatgtcgcagagctacgtgactcctccgggggcgtggcctgcatgccccgccctgaccacaccccctccccaggactggtgtccggggcaagaccacgccctcagaggcggggcggcgaggtggagtgagcgccccgccaggcatccgtggctgttagggactgccctcccacctcggggagcctggccatgaccttgcgttcatttctgccacaatccctttaccacgtgccgggcacttgctggatgctggggattaagcttagtctggtgaagaggaggcaccagaacagtaacaacaggttgagtaggtggggcagaagcatcttcaaggtgcccaagttcagggcaggaagtaatgaactgagcttctctgtcctcacccccatatttgccagggtatacccccgagggggctggggaaagtaagagaatgaagcctttctgtttcctccaggcggtgagccagggaacaagcagtccagtgcccagagttttggtgaaagcagaggaagggaggaagggcaggcagccttggctttggatgcagcaggaggtggagagggatctatggagggtgcccaggcaggaggcccaagctgcttcttccctgacttcatcatccgccccctctcacccaaaaagtaagattccgtaagcttggagaaattcattaaatacactttatttaaatagcatttatctcagttggctctatgccagttggtcttggtattggggtaagggggtattgcaggtaaaaagaggtgaagcagattctggctttcagtttcttagctcagaaattccagcaatccctgtagttctttgcatcccctcaccacctctggaatagagagcagggtctgggaagagaggcagaaaacgcagctcaggaccacagacttaaggcccagggctcccagccccaggaggcagccgctgaattagaggggagaaaacagacaccacagagaagcctgcaatagtgattcaggcccagctctcagcacaggctgggaaccagatctgtgctcattagtacctcctggggccaggccttgtaccaggttcattagtgatatcacctccctcctgcctataccttataaatatgctgaacaatgtcatctagtttttctaactccttgtcagagcgccgaaggttctcctctaggatatttctctagaaagcaaacagattttataagtcctatgcataaaagagcaaacttggtaggacaggggaaacatggcggggcatttgttaacgatggtaggaaatggccctggaatggcatggacattcttacatggctctggaacttgatcatgagtttttccttctcatttttcatctccaggaacatcactctcagtttgtccacctagaaatatgtccagatcaacaggggtacagcctggggtccccacctgctgtccagctcctctgttaactctgagtcacctcctgagagagccacactttctcctggatccaattggtggccataggctggcagttggagtccagctggcctgccagggcctcctggagcactttggtctctgtctccgcacgccgaagtgagcgggtaaggtgggtcacctcctctctaaggctctgggaatgagaatggagaggtgtccaataggacataaggatagacaacatgtggtgaacaaaagcaaaccatttctcatacttgggatcctggctgaccagtaacacagaaggcaaaggcctgggcatgatggtgaacatactatgagctcgccactcttgtctatctgttctaggatcttctcattctgctgctgtatcacttcctggagctccttttcattctgtgagggaaagggaggtgagaagacacatgaagagctggtctcttcacagcccttgccaggaggtaggagagagtgcctgacccatgcttagcccacatgggaccaattgatatcacgccaattctttccccagggccaagccaggcaaggcacatttcagtgttgggagagctctgcta

SEQ ID NO: 1243645 - DNA, 4001 bp, Homo sapiens
ctgttcaactccagggaagtcactccccctcctgggaatggagaatgtgcttcaattaaataatctctggggcctttgcctgtgactactttctctgttaaggaatccaaaaatggcagaacaagaaagacttttagataaattaaaaaaaaaaaaaattttaaagcatagatttgtaaatggaaggccagaatggaaaaccggaaaatcacaaagggacttatgctaagaaatggatggtgggaaaaaaaaaaatcaaagggaacagccttctgaaaagatggctttcgatgaattctcagccaagtcagtgatcccgtcaaacctgccttcggggacaggatttccacatcggttccctattttcttgctataggtatcttaaacacaaaacccttctctcgctccctacaatctacaaacagaagaactggtcagaactgtaaaaaacgcagactcctacgggctgctgctttctgggccagggtgggtagctaaggcagcaggcgcagggccgccccctccacccgggtgggttacctgagcacagtcacgcttcccctgcgcaccggcagggaaagcactggttccgacacccgaataggcttgaactggaacttgcagccgaagcacagcgcagagtcgctaaagaaggacacggacacgatggggcgctcgaagatgtggatggggtccacgtgagacacgatgcagccgccgggctggtagtcgttgatgacggcgctgttgacgaagccctcggggatgacgcggtgctccaccagcttttggatcaccagctggtgcacccactcggggatctcgtccacgtcgcccggcgggtagaggcgctcctggccgggcccgcgcttctgcagctgggcgccgtaagtgtagccttcgccgaagaagtacttgttgcgcagtggggcccggtccaccgtgtgctcgttgtacaggcccttctcagcgcgggacaccacctcgtcaatgcgggcctcgatcttggcgcactcgtcctggctgaagaggcgcatctggcggatgccgctcttcaccttgcgcgcctcctcctccttctgcagctgctgctcctcatagtcgctgcgctcggggtccgagtcctcctgatacttgcgcttggccccggacacagggtaaggttcggcggcagcggcggctgcggctgcggcggctacggcggctgcggcagcggcggcggcctcccggctgcccgccttatagttgtcccgggacgtcatggacttgagcttctcacgcaggtccgtgtagccgctggcggccgccatggcccccacgacgctgctctagggtcctccggggcgggcggggcagccgggcatggctctaaggggacgcgccccggggcccccggagggaggggggtccttagcgccgaacccccatgcgtgagtgggggacccggcggggggcgtcgagggtccgggcgtggggtagggcctcaggagcggcgggtcatgcaacggtggcgacaacggggcttcttcctcctccaccttctccacgtcccgcggggcaggggcgccggcagcgcctcatgccgcggagggctgctgcggagacgcggcccgactcccgaccagaccctcggacgcccggcccggcccgcactttaaagctctccgcacgacgtcacgggcagccagcccgacgtccgccagcgccgctccttagcgggctcctcaccgcgcacgcgcagtgctgccggccaccgcggctccgcgcgctacgggcatgcgcgtgcgtgcaggccgggtcggcagaggcgccggcgcaagcgcagacaggaaccgcttgccgtccgccgcccctcccccactctctgaggggcttcaagggaacgctctcaaatagcaacctgtcttcacgccgcgccgcctccaggaccgaagggctccctctacaggggtgcgctcatattgccaacagtgtcgccgtgccgcgtcacggcatcgtccgaacgcccgcagacgcctcaaccccagggcgcattcaccagggaaccgccacaacgtaggccgctccgttacctccccctttggcgcttccacttctttaattgggccgtgggccacgcgccgggcaggccctgactggagtttccggaagtcggttggtaatcatgcgtgtcaatcaggcagtctccttagctactgtgtccgtcacttaattagcggctgggcgagcagcgaggacccctaaaggagaaatgggtggttaaataagtgcctgaatggagactccacctgagtaaagcccttagaacgcctaaggaaacttctgaaacccgcgaaaacttctcagactgcgggacctgcagcacccggccccagttctgaacccagataggaacgtccggcagaagccagacgcgcgttgtcggggtacaagccagcctgccgccgctgccgccgccgcccggagcggacgtttcacgagtcacgtcccggtgacggcgagcgtgggggcgcgctggggttggcgtcgagcctccttggtgctggagatgggcgtgggggcacctcctacggggactctggaagaaaactccaggaaacgaacgggcgcaaggctaaggctaagctatagataatgactacagtcaattcaaaaaagttttgaagcagtcagcaaaggcgttgccgggcgcggggcctcacgcctgtaatcccagcactttgcgaggccaaggcgggcggatcacttgagcccaggagtttgagaccagcctggccaacatggcaaccccatctctacaataaaatttttaaaaatgaactgggcgtggtggcgcgcgcctatggtcctagctactcaggaggctgaggtgggaggatcccttgagcccaggggattgaggctgcagagagccgagctggcgccactgcactccggcctgggcgacagagctgcaaaacaaaacaaaaaggcgtagccgtgcaggatgcactggagggctccaacaaatgggggtcgggggggatctgctggaaaatctcccatgtctcccaggataaagttcccctgctttatttggcactcaaagcttttcttcaagactcttctggccttggctcctcctctcctctctttccatgtacactgagccccagcctggtcctcatcctgtaagccaggtctacaaacatactgtgtctcacctcctggcctttgcccaggctgtttgccatggctgttgcccatgccagttccttatcacccgtctccctctctctctcccccttcccctcctcctcctcgttcttttttgacagagtctctgttgcccaggctgaagtgcagtggcacgatcttggctgactgcaatctcgacctcccgggttcaagacatcctcccacacctcagcctcctgagtagctggaactatgtagaggcgtgtaccaccacaccccgctaatttttctgtttttagcagagatggggtttcaccatgttgtcaaattggtcttggaactactgggcacaagatcctcctgcctcggcctcccaaagtgctgggattacaggcgtaagccactgcgcccagcctggaatggacatttttttaaaaagcttatcaagtttttactatgtgccaggacctgtgcatatactagcccaattaatcgtccaaacaattcaatgaggagggcattattattattaccattgtatatatagggaaacaggcccagagaggtgaaatgacttgcccaaggccatacagcgagtatgtggcctagtgatgattcaaacccaggctgcctggttccagaatctgtgctgtccctcaccggggctccgagaggggagagtcctagctcaagagcagtcagggaggaacacagggaagcttccaatgcagtgtccgttatgggagaggctgtgtcaacctagagaagaggtgattcacattttggctcaacctggatgatctacttccaagaagccgcttgta

SEQ ID NO: 1243646 - DNA, 4001 bp, Homo sapiens
ttctacatttgcttttttttttttaaacctcatctttctggatttactatcataatctgtatctatggacttattctgggtcttttctgcatttacactcacctgtctcaaagtcatagatttgatgttccatccctactgccctcactcatctctggattcatctctcttttactcattacccatggttaaaaattcactatttgggccgggcgtggtggctcaagcctgtaatcccagcactttgagaggccaaggagggcggatcacgaggtcaggagatcgagaccatcctggctaatacggtgaaactccatctctactaaaaaaaatataaaaaattagccgggtgtggtggggggtgcctgtagtcccagctactcgggaggctgaggcaggagaatggcgtgaacccaggaggtggaggttgcagtgagccaagatcgcaccactgcactccagcctgggcaacaaagcaagactccatctcaaaaaaaaaaaaaaaaaaaattcactatttgccatcctcattcctcctcgtctcctgcgggccagtgtgcttcttgtctttcacgggtgtcttccgtgttattccaaccaaaccagctctccagcatcctatgttttcttcccttagctgtctgctctcacgggtcacccaccccctcctgttccatgtggtcccctcacctgacttctgagtcacctttacatctccttcctactttcactttgcttctctgttttcctggatcgctgcaactcccactttctgtctttgccttcttggaagatgggatctccagatcacttactccctgcctccagcctcacacgcagcctctcttagcctgtgtaaaactttgggaattcataactccttcccgttttctgtccagcaccctgggatccctacatttcacctgccctgggcccatacatcctctaagtctgctccgaccgtccttaactctgccctcctagccccgcagcagttcccgagaccttgtgcctccttccccgacgccgcctgctcaccggtgccctcgggcaggctcaggatgtcctcgccctgcacccagcggtagcacgggaaggccacctccgcgcaggctccagggccctgcaccgtgatgcggtcgcagaaccacgcgtcgtccaccagccagtggtgcttgcgcagcctcacgaactgcaggagccccaagtcctctgcaacgtcatgatcaaactcctcctcctgtgcaggccggacccaggccagacttagtaggagggacccgactgaggccgtttcgaggacagagccgcgctcctgtgcaacctcagtttctcagggcctccaaagacagcatcgcctcgttcccgcccccgcacaacctgctctttgggtctcagacgcccggagtcgggtggaggacgagggcccgcagcgcctggagctgatgctggagcagcatcgcccacgtgggtcccattaactgagctctccccgcgccggttcttggaggagcttcacgtctgacctctggcctcatacttacattggctctgggtcactgggagaaggagctgggggctgccgggaccaggggcgggaaagggagatggggttgagcccagcccgggatcccagctgcggaccctgtccctaatcttgcccacctcgtcccagcttcgtggaagtcccagtccgcgaggtcgcgctgtcacctcgcccccagcctcccgccctcccgccgcgagcccagctcggcccgggcctgggcccggggtccccgctgccctagctcccctcgctccccgcgctgacctcgccccgcgcgggccgcagctgcagctccagctccgcctccccgcgcgtcccgaccagccaaagctgcacgcggttgtacgacccggagaagagccaggccccggtggccacgcggatgcggtagcggcccatggcgccccccagcagcttaggcgaggggagccgggtcctgtgcgattcccgggaccgcccagggctgccggcgcctcggggccacttccaacctttaaaggaccggtctgcggccccgccctcctcgcaagttttaggcgctcccaagtccccgccccagactagcccaaacctgcgagcagagcggtagagccggctgtggggactggctgtgcctcctggtcggagcgtagctgcaggatgataaaggggcccgagccagggtgaggccaacggggtgggtgcggcgggaccttcctggacctcccgggaaggcgggatcgaggtgggcctgagcccccgggttggagcgaacatagatgagaacacttcccgaggtctccaggtcttctggggagccaggaggaagtaggggatgagtccatcttccaaacggaggggaaggtctccgcttttctgggctgggacccggggaaggcagtgggccggcttctggaaggtcggcctgggaggccgtgctggggtctggggatgtcccgcggctagacccggcgcggcccatgtgtcctccagtacctgagctctgccgcccttgaacgctgtgcttccgtcaacgaccaggggttccccagggtacctagaacctggaaatgtagcagctcaacacccgctccccaccccgtttcaaatatctgggcgctggggtcccaatgtacaccaaatatcatgggccagacctttgagagaggcctgaggcagggcagtgaaaaactcattttgtccaacctccgaagcgggtacagacaatgttagggacccaggaacaccagtcggggtgttagggtgcgggatggaattgcttagggacctggcctacgtggccagttcccaagaactttgtcttttccaggtgagtgcagccccttccgctccagtaggttccagattaattttttatccccaagctctttcctgctccttcatgggtctcaggtctcctggaaatccaggaacagcaattagcccactgctatttagggcctttgtaaacattgaaggatgattcggagcttaggctttctctcccgtgtcaggaatcagtcagatgaagcctgctgcacgcgtccctgtctagatcttgattcaagtgattatatgcatttggatctccgtggatgcatctggtggcctgggctaggccagtgtaagttaaatctgctttcttgagccagtcctcagaaatgacttggtggcctagttgttggtagaggtaagtgagtgggagttttagccccgccttccagcctccagatcagactctatctcaaaaataaataaataaataaataaaaataaaaaaataaagtgtctgtcccttactggattcaattccctttcttatcttctaggtccactctggcctacatcctctgctcaggactgcaggtcggccatttgctggtccccagttcttccagttttctggggtcaccccattctgtaatatccaaataaaatggctcaaattcccatcctgcctaatagtaggatctggcctttccacacacattttcgtgggttacttttgcctagaaaagagtttgtctcatacctacttccaaaagcactgtttctttgctgttttgtgacttattttctgcccactctagtgtactctacggccacgtgcagagagagggaatgaataattgaaaaaccggattcaagctactgcgcatgctaaatgagtgaatatggctaaacagtgagaacagtgcttggcgtgtagtccctctatgtattagctgctatgattgtattatttacaactgaatgttagcgttgctcctctaccgttcctctccgcatgctatttctccatgtccctctctaggcctagcctctcactagagctcttatcactctagacccttccccctcctgcttttgtttcccttttaagcacatgcgctatgttgggagaatataattagaagcaaaattttctcccaacccagaaaaaacctctccacgaaagtagtgaagaaagaaa

SEQ ID NO: 1243647 - DNA, 4001 bp, Homo sapiens
tataggagtcagggaggactggagaggtagcggggagcgcactctgggaatgctgtctgctgccagatggggatgctgagggtagctgctgggcctcaggcacctctcttcctccaatgtgcagccccaagctgagctcagggcagcagcactgactgagggaaatgtgtgacagtggcaggagagcccaggagtccctggtggggctgggcccccctctggcttgatgggagcctgggtgccatgccagggtagcaggctggagctagaggcctcacggccataggatggagcagggtgatgagggcttacctgtggcctcccggagtgccagggtctcgtagccatccatccactggtaggcggggaagtggtagatacggccgttgggggcacagatctgcacatagttgcagtaccaagggtccttggggaagaaggcgtaccgctctttgtgcaggcggatgatgatgagctcacccaggtcctgagggcactgcacggtgtactggcccacctaggcaggatgcaagcctggctgagtgggcaggacttcaccccggctcccaggccgcccacccctctggcccctcacctaggccctgctcatgctgcgcaatgctcacctccctggactgacggagggacaggatattgacctgatcattgagcttccttctgacttctccagcttgggggtctcctactggattcctctacccagggctatgtaggactccagcccctccttctctccatccccagctcctgtcttctcccactcccctctccaggcacctgaggttgcaggaacccttcagacccctggggacttgggtaccactctacagttttcgagtggggagaggcccagccagccccttctcccattcatcaatgaagatgcagatattcagaatggccacatagatagagtgacctattaaggtcgcctagcagcaggtggctgggtctgactgaaaatcaggtctgaggacccgcaaagcgtgccttccactggacaggctggtctgatgccattttaagtcacagagaatccagtgcaaatgtgagacagttaggaggcagctgaattaggaagagtgactgagaatggaagagagagggatgcgggagagggggtaagacagaaaggggaggagagcaaaggggaaggaaagcaggtggaaaggattgagaaaagagagatgcaggataggcagagacagggagagagggctgaggaagagggagagagaagaaaaggatggggagggagatgaggaatgcctgaaagggttagagatgaaggagcaggatggagaaggatggcccagagatctgggacatgggcgaggggctggaagccagctctggacaaggcgtgtagagccactggggagcccactgccttcggagctgtgcctcagctctccagcctctcctcgccaagctcagctcacctggctccccctgcgcaccttcacccctcccggggccacaaagacacacagacacacacagacacacacagacacacacacacacacacacagacacacacacacacacacacacacacacactcttaccgccccagttgcaaagtctctcccaaagtggttcagcagctgcttatggctctctccttgtgtccccacaatggtcagtgagatggagtcccgtgttcccgacaagaggtcggtgcctgtggccaccctgactttgtaggtggccatggctgctcttcaggaggcaagaggggcactcagtcccagacaccgtggaggggccacacgaaggcccaaggcaggcaagagaagccaggcacagagtggagtggacagggctggcctccgaggtgcagtggtgaggtggcgaggtggggtgactaggcctgccagccaaattctggaaaagctgctgcccttggtggccggggtgggtgccgggcaggcccaggcggagcccagctggtggtgagtgagcaggtgtctgggctccaagccttctgggagctggtggggaggaagagcaggcagggcactgggcctgcctctgaaagggcggatagaagatgccgtggatgaaggcgccttcagggtgggggagccagtccagcctgagccagggccctagggaagttgcgggagggggcagggtgtggtccccagatctttatcagactaataagctccttcctcctgccagtccccattggctacagtgccaggcacccctactaagcagggccatgggcagtgagtgacttgcattggttctgaggccactggtgggcgggggaggggagggggaggggcactaagtggcagcgcagctggccagcctccaggccattcctctctgggaaatgggacaggtagtggccacagtgagaaagctggcctgtccttctgccccagggcccagagtctgtgactggaagggtgggaggtgttgaagctagggctcggggaccacatgggtgcccaaaggcctgaagatgctgcggggaggaacgatcagggtaggagaaggggatctgttgcttcctgtggggccaggatccactggtgagggattggagttggatataaaatcagaagcccaaaaaaaaaaaaaaaaaaactaaattagaagacagagtgaaatctggggcataagaattaagttaaatagctgggcgtggtggctcacgcctgtaatcccagcactttagaaagccaaggcaggtgggtcacctgagctcaagagttcgagaccagcctggccaacatggtgaaaccttgtctctactaaaaatacaaaaattagccaggcgtggtggcatgcgcctgtagtcccagctacttgggaggctgaggcaggagaatcgcttgaactcaggaggcggaagttgcagtgagttgagatcgtgccaccgcactccagcctgggcaacagagcaagactccgtctccaaaaaaaaaagacaaaagaattaagttaaataatggattaatatgatcaatattttgtggtataatcataaaatagaattctacccaggaataaaaagaatgaactgcaatgcggatgagtctcacaaagatgatactgagcaaaaagagccagacattaaaggggatacgttctgttatccattgataggaacttccagaaccagcaaaactgagcaattctcagacaacctctactggtgagtatccctggcagagggaggccatataggctgctggaggtgttcttatcttgatctgaggggcgtctagggtacttcattcatttcattatgtgttatcctttaatttcataaagtacataccctcacttccctcccaaaaaagaatgaagctaggaagagggctggaggcagggctgagctccagtggaactgtgtttgttgggaaccaggtcgttcctccctcagatatgtagtgagcacggtgcacggcgttctaggcactgcagaggcagagaagaaatgaaacatacatggagcttacggaatagctgggaaagaagtgaaagaaacagtaaacaagaatttgttcactataattttggatactaagtgctctgaagaaaataagcgtgggaggttgggattgggaactagttgctgatagaatcacagaagtcagagccgcaggatagggagaaggtgttaggagtaaggtgaagagcattatgagagagtcagagatagactctccaaagataggatttgggacccagggagagtgaggaggcaggcacgttcctattccctttttctggacctgtcctctttcctttcacctccgaggagcagcttctgtcaaccaggaagcatagccctgctttcctccctgatggcacgcttccatcaccatcgaaggaaggtcattcaatgcccaggccaagttagggtcagagggggctgggattgtgagatgaagagaaggttccagtaggttccagactggatgtggaatggggtcgaaactgcaattcaggtt

SEQ ID NO: 1243648 - DNA, 4001 bp, Homo sapiens
gcctggcgggaggggcacccggctgagccctgctccctccagcgcccacgcccttcctcggagcctctgagaggaggagacgtatcggggtgcggggactgagccagagagagagggaccgcgccgagcaggtggccccaggactcggttctgaggggacggggacggcaggtgggaaggtgcgctcctgccttcactttctcctccctgtggtcactgactgtgccaagcgctgggctgagcgctgccgcgccctggacgagcgcgctgtggagcccggacgcgctggtggcaattcccgctgtgcgaccccccaccccaccccgcccgaggctgaggacctgcaggggccccaccggcctggggacaaccttcccggagacctggaggcggagagggctcagccagggagagtgacagaaagggaaggcaggggaaaggcgcgcagaaagagagcggcggggaagggagggcgagcagcatcttggagctggagctcagagcccaggtgtggggggtcagcaggtccggaggctctcgaaggtggcgccaggggctttggatttggtcccgagaacaagcgggagccgttcgaatgtgttaagcagggggagtgaattagggagaaatcattccggcttcagaagggcttggaaggtctgcagcagaggtggcgaggccgctggaggtttgaaatggcttttaaaatagagaaaccgggaggaccgacgaccgctccggcgaccgcagtttccaggcaccagagctgtgtggaatgaggggcgctcaggagcatccccttaattccaaggagatcgagtagcgggaacatttattgagcctttactgtgtgtcaccaactgcccaccatagggaggaaaaaagggaggagggagcgcgcctttccaccttccgtgccccgtcccctcaccatggagtcgcggggccacctgctccgtgcgcattttctctcttcctggctccctttgccccgctttctcggaagctcggagcaagggcgtggagtgcggggagcagggctccgcaggttcaagaggacgcgggcggtcgggggcgggacggatattgggcagggacgcgggagatgctcagggtctagaactgactgcgccggattcttgtttagagggaggtgaagagaggaaggaggcgcgggtgacaccgggggaggcaggaggagagggctgggaggtggggagaggggaggacctcatccgggcatgttgctttgacgttccctgagacagacatccggatttggggatctgggagagagctagagcagtgatgggaatttgggctttcgcggaagaaaaaaagttaacaggaccgggtagaacacccggtagatgtgacatgagatatgacgggaggtgggtcgggaaatcgagagcgttctcctgtcttgactccccatcccttccctctcaccacccactccaccccaggtgataaagcctgaaaggtagagatccaacagcgctagcggttgaaacggtttttaaaatagagaaagcgagaggaccgacggcggctccagtgactgctgagtttccagacaagggagctttgtgcaatgaggggcgcacaggagcatgccctcaattccaaggagatcgggtagcggcaacatttattgagcgcttactgtgtgccaccgactgccctaaagccccccacccccgtggcctccgcgcgctttgagcccaatgcgcgggcccttggcaaagagaatcggccagaggccaacgggggcgcatgtcctccccggtatttgactgactcggagccaggggcgcagcccaccccgcccggctctggggagctcaccttgccccgtgcgggccacagtcgcttcccgagcgccgcctccccgtgctggccgaccagccacagctgcacctggttgttggaaccggcatagagcgaggccccagtggacacgcggatgcggtagagacccatcttgctcaaagatgtttcgctccttctggtggagaagggtggacgagctaaataacccagcctgagaccccgccctctcggaggtcgcttggggtcggaatgtgggtggcaggtctccaatcaactccgcctaccgctggggcccccagctccaaggagcagagcttcaaggggcagaattcagccccagtccaaaaggcggtgtcctggcgagagcagggagtggaaaccactatcttgacgggagggagaaaaagaaaaggatttggaccgaaaacacgcaggaagagggaatcaacgcctggtacagcaggcaggcgaggtgggggtaggagttatgcacgtgtgtaccacggactttgggccaagcctgggtggctgggaagccaacctccatctaaacgcacgcgtgcacacacacacacacgcaaggacacgcgcgcgcacacacaagcctcacaagttggattgcaggagagggtgaagtgggcgaggagacccagtttgcagtggcatttgaggaaggtacattcaggccacggaattcattcgaccagctttgcacacttgccttctctgtgccagccactgggactcattccttttgagcataaaagccgctgcctccctgttgcctgcagaataaaagtccaaatgtttctggcattcaatgcccttgctaacctgacctgctctcctcacctctcatcccactgcaccctggcatctcctgtgctggagccatgtgttccccggaaccccccctccccccgccgcccctgctgttctctcaaagaactcacttctgggttagtctggtcatgcttctaaaccctaattcgtctccagtttctttttgggctggagccatgtgttccccagaaccccacctgctgttctctcaaaagaacttgctcctggattagtctattcatctattcatgcttctaaaccctagttcacctccggtttctcaggaaagtcttacccggtactttcaccccccaccaccccaccagagtgaattagctttccttttttttttttttttgagatatagagtctcactctgtcaccctggaatgcagggtggagtgcaatggcacgatctcggctcacggcaacctctgcctcccgggctcaagcaattctctgcctcagccttccgagtagctgggattacaggcgcctgccaccatgcctggataatttttgtatttttagtagagacggggtttctccatgttggccacgctggtcttgaactcctgaccttgtgatccacccacctcagtctcccaaagtgctggaattacaggtgtgagccacggcgcccggcccagctttcctttctaacacttttctccttgcgcacacttctactgttgcacagttaatactgcagtgtgagcatttgtatgtgtgtatcccccactaatgtgagcccgtcctaggcagggactacacacccagcaggactctcacttttgtttcccctggagacggcacagtgtcagggtttgtgggtgtcaataagtgtttgctgaaacacactgagctgaaaaattcattataaatgaatgcttcccttgggggagacaaagggaaacaaattatcaggcaatgtaaacaaaaggggaatactaacataaacttcatggcatggattacaatcagcctggtaacacaaatgaagtccacgaaaatatgtctgtgatgcatattttctggtttgcttgttttttgtttttggtgtttttttttttaatgagatggagtcttgctctgttgcccgggctagagtacagtggtgtgatctcggctcactgcaacctccacctgccgggttcaagcgattctcctgcctcagcctccagagtagctgggattacaggcacccaccaacatgcccggctactttttgtattttcagtcgagatggggtttcaccatgttggccaggctggtcttgaactcctgacctcaagtgatccacctgcctcggcctccccaag

SEQ ID NO: 1243649 - DNA, 4001 bp, Homo sapiens
tgatcccacagaccaggagcaaaagcctgcagcccaggctttagatagcagatgagttggccggatcaagatcttttgaaaatctgtttctgaatgcagttcctggctttgtgccaagggaatcctcactagcggccccaactcctctgttatctccaagtcccagttttcccctgtgatctccaatgctgagcccagagcacagagagagcccccatctcaccccttgctagccctggagggtgagtttcctggggcttgaagggcgtgtttctggctctactcagatttctgggaggacacaacaagccgatgcatgaaaaagtcccagggcaaggaagacaccagcaaaggtaaggcatttaaagcagtttctttctctttcttttctttctttctttctttctttctttctttctttctttctttctttctttctctctctttctttctctctttccttccttttccttccttcctttttttttttctttttttgagatggagttttgctctgtcccccatgctggagtgcaatggcgtgatcggctcactgcaacctccaccacccgggttcaagctattcttctgcctcagcctcccatgtagctgagaatacaggtgcccgccaccctacccagctgatttttgtatttttagtagagatggggtttcgccctgttggccaggctggtctcgaactcccgacctccagtgatccgcctccctcagcctcccaaagtgctgagattacaggtgtgagccaccacggcacctggccctagagcagtgtttttcaaacatcagtggccaccagagtcatctggaaggcttgtcaaaacaaaaattcccactctacaccctcagtgtcgtagtaggttggaggtggcctgagaatttgcatttctaatacgttcctgtagacgctgctgatcccaggagcagctttgataggagaggtggaggcaggggcttttaatctctgtcatgaccaggacactcaagctgcccctcatcgtttgggcacaccctcccccatcagtaaccccctcctcactggtacatctcctgccgggcctgaagctcctcctggcgctgttgctggagcacagggtggtggtctgcccaggacaccttggctgtgggagaaggggagtaggttggggtggggagagaaactcaccatcactaccaccagccacacagtctccacgattgccaccctctaccaggtcccctcctcccataagtacagtttctcctacaccaggctgctacctcccgctccccaaggctccgccattccctctcctctgcccgctactctgtggccacaccagctcacctctccatttcacctgcccttctccccaacccccagtcccctaccccttcctgtgctccccctgcagccccagcccggcccgcccctcacctgtaccctcctgcagcaccagggtccccgccccctccagccactggtagcaggggaagaggaggtggccgccccgcggcggtgtcagctggaaccagcggcagaaccaggcatccggggccaggggccccagcaggggcagcactgggggcgccttgtgcacgcgcagcagcagcactcggcctacgtcctccgggagcgtcacctggaagtcctcctcctgaggggaggttaagtatgcgtcaggccggaccctcctgctcgcccccttcacctccaccccatccactcccacgcactcacagcgcccgcagtgaactccttgccgagattgtccaggggcagtggggggctctctccccgggtccccacgatgctgacagacactttgtcccatgtgccagccccgaaggcttctccggtggacaccctgaccctgaactcggccatgctgccagcctaagtccagctctctacggcgcacagggctgcagagcggggctcccccctgggacacgcctggttattgcccctggttattgccactgactccaagcccagtggactcctctaaaaagcacgtccgtttcagggcggggaggggcggggcggagaggctggaacacgcaactaaagtgggggtgggcgggggattggcagcgctgggaacaggagggactaagaataccctgaggtttggggaacggggcctttcagtggtggtgccaggccagagagcctagagttgggacccagttggggtgggggtagatttgtgcccaccacgtctgtttgttttccttcttagccttagaagtctatgcaaaaatatcaccccatttcccacaactcttcttgggcctgcgttcattatttttaaaatttatttatttatttatttttgagacagaggcttgctctgtcgccaggctggagtgcagcagcatgatctcggctcactggaacctcctcctcctgggttcaagtgattctcctacctcagcctccccagtagctgagacaacaggcgagtgccaccatgcccagctaatttttgtattttagtagagacggggttccaccatgtaggccaggatgatcttgatctcttgacctcatgatccgcctgcctcggcctcccaaagtgctgggattacaggcgtgagccaccgcgcccagcctacattcattattttatttcattcaataattaatgttcagaactacctctgtgccaggtgctatgctcactgctattgataaaggcccaggcaagacctagtgcttgctctcatggagattaaaaatcaagtgtgaggccaggcacagttgctggccaacatggtgaaaccccatctctactaaaaatacaaaaaaattagccaagcgtggtggcgggcgcctgtagtcccagctactcaggaggctgaggcaggagaatagcttgaacccggaaggcggaggtttcagtgaggtgaagttgtgccattgcactccagcatgggcgacagagcaaatctcggtctaaaaaaaaaaaatcaagtgtgagagaaaataagtaaaccaacacataatttcagatgataataagtgcaatgaaggaaatgaaacagactaatgtgaaggagtgagaagcagaggtgggaagggaggcgttcagagcctcagaggaggtgaaaggatctgtctggggaacagagttttgtgcagaggaaactgttcctgaagaggccctgtggttaggaaaagcttggcttgttggaggagggaaaggcaagagtgcagtgagggagggatttgggggagagatgccaaggggaagttatggatttgggctttgggggaataacataacagatttggggttttcggtctggagatgctaagtttgagatggccattagacatccaagtggagaacccacgtctgggcatagagctcaggactgcaggtgtgcatctttgagtcacaagcacacaggtacatctataccacaggctggtggagatcactaggcagagaatatcctataagtagagaagagaagaggcacaagctgtgccctaaggtcctctgatatttggaagtcatgcaaaggagtggaagcagcaaagttcagtcaatgaggtaggaggagaacgatgccggcagacactttgtcctcttgtgcctgtcacagtgtttcatgaaagccaactgaagtgagagtgacttatcatgtatattccatatataccatggaatactatacagccatgaaaaagaatgagatcatggtcaggcatggtgtctcacacctgtaatctcagaactttgggaggctgaggcaggcagatcacgaggtcaggagttcgagaccagcctgaccaacatggtgaaaccccatctctactaaaaatacaaaaattagctgggtgtggtggtgactgcctgtaattccggctactcaggaggctgaggcaggagaatcatttgaacccgggaggcagaggttgcaattccagctactcaggaggctgaggcaggagaatcacttgaacccgggaggcggaggttgcagtgagc

SEQ ID NO: 1243650 - DNA, 4001 bp, Homo sapiens
tgtgtacacgcagcagcaagagctcacccagctccgctgtgcaacgcaccttgtacttctgtacctgaggggaccaagacagcaagcaggtgagaggcggggaactgccaaggcggtccttgcgccttgcaagatgcatctacacctaagcctattcgggcatacaaacctgagctgctcccagcccataccgggcttttgtatgaattagaaaaagcttccccgggccgggagaggtggctcacgcctgtaatcctaacactttgggaggccgaggcgggtggatcacctgaggtcaggagtttgagaccagcctgcccgatgaaaccgcttctctactaaaaatacaaaaaattagtcgggcgtcgtggcaggcgcctgtaatcccagctacttgggaggctgaggcaggagaatcgcttaaacccgggaggtggaggttgcagtgacctgagatcacaccactgccctccagcctgggcaacaagagcaaaactccatctcaaaaagaaaagaaaaaggtgcccgagcacagtgggcactgcatttcactagcttcctaggccggctgggaactcttgtggaggccacctggggctggcagaggcaggcagatcccctcgataagaggaaacccaggctcagagaggggaagcgacttgcccaaagcccacggtcaattatgggaggagtttaggagccaggggaagtccctctactccctgtccaacgctccttcctctccacagtcctgcctggatggagttcatcatctccaggaaagacagggacctcaatagggaaggtgaggaggtcagggccggtatcctgagttcagcaggatctcaagagtccaggaggaatactcctcccgcctgcggcccctgcccctctgaggtcgcgcttccctgtctcctttgtactcaccgatccaggggcgaagtccctgcccattcgatctagccgctgcttggggctttcaccacacgtgcccaccagtgtgacagagatgttgtccagtgtgccggccctcaggtagggaccagtggtcacacacaggcggtacactgccatgatgggaaggaggaagggatgccccggcaacgctggccgcagcagcagccggcctggaggagaagagcggcacgccggacagggctgggtttctgggcggagggctaggggctgcggggctgggtagggctgaggatgggcccagctctctctgggatgttcctgggctttctctctccgaagctccctgctggcggctcgggcttcctctctccgcccacagtcttgcactctaatacttgtttgcttgcctctgacacagccggtccctctggctggctcacccagatggatatcaggagcctgggttccactgcggagggagggatcagatgctgagatggagaaaaggaggtaacgcctgtataattgggacactgccctccgcctggtcagcggcccggactgatgccctggagtgcttgtccgcccactccccaatgtcccccaagatctgttcctccccattcccaggcagagatgagcacagggcacctgcattcctacgtgtgaatcatccgtgtgaatcactaaacagtggagagttgcacttggtcataaatcacacgtgactgcagccacacgcaggtgagtcgcacacgcattccagcacatgtcaaatggtcaggaacagctccctgtcaccccatacaccgatccccccacgcatggccctctttgtccccagcctttggcacgcccgacctcattctctgctctggagtagggcaggtcaggaaagcgaaatacagcgccggcaaacagggtctgaatgccccgcgtggcattctttccgctccaggaccgccctgggcctgcaggatcctgggcgggagcccaggtgtccgggatctgggccactagggactggggaggaacctctcagagaagcccatagcccgcagcggccccgcgcggccggttccggcgccgcactgttccagcctctactatggtacagtccctgcgtcgcagcctcggcgggggctctaagaacgggaggcagaaaaagctcaatcagcagcaggcgagcttcacccgctgcttccaaatctgtgccaaaatattctatgctgcacagataaaatcctctgtcggttctacaagcctggcttttcctatagagaaccctcttataagcaaaaagtaaagctctcgtgaagagcccggatagctcagtcggtagagcatcagacttttaatctgagggtccagggttcaagtccctgttcgggcggcatgtctttgcttttgggtaccgcacttcgcataaaatggtaacaaaaatagttactagtttttaaagctaggtgatacagaaacttgatttccacaaaatacagcaaacgacggtggagggtaataaacatactttaaaacagtacaaacgcgagccgtattatcgaatttacattttctggtagccacattacaaagaataaaaagcaagcgaaattaatttcacggatctattttacttaccctaatataccaaaatcttattttaacatataatcaacattctaaaaatattaatgaaattttaagtctttttgtttgtacaaagccttccttcaaaagaagatgtgtatttagaagctggcaatacatctgaattcatatatttcaagtgctcgataacggtgtctaccatatccaacagcagactttgttttgttttcgttttaagtgacgggtgtggaagacacgcaaaatagaatgtccagtaatgtacacaatcttgaaagacaccacgagggaggttccatggtgtaatggttagcactctggactctgaatccagcgatccgagttcaaatctcggtggaaccttgaagcttttcttttaatatcagcatgttgaatattgttaattgattttcacagaggggatactcctatgacccaagataatacgacaaaaaaaaaaagtaaactaggacactaccaattatttgtgcttttcctaccggataattgagtcctataacacagtgttaagagaacgtacaataaattatttaaatatgttggaagttgagctaacatttgaaaacatgttaaaatagagatgttatgaagaaacgaaataatagagatgttatgaagaaacgaaatattgcttcagcagttaccatcaggtcttagcttctgggatggatgcaggcctatgatctctctggaagaccaaacacggaagatgatggtgaaaccattaccaggggaattcgtaaaattactttctgcatgtaaataggtgtaacctcacagaactgttaacagaactgtagcaggtgcgtaatccaccagaaaaactccagcctggcagcggtgggattcgaacccacgcctccgaagagactggagcctaaatccagcgccttagaccgctcggccacgctacctgcacgaaaacttactgtccccgttgtcctcctaagagactagaagtaaggaatggggcaaatcttaagagtgccaaattgattcgtctccttttccacatcttttagactggaaatgaagaaccatcgagactgtggaccgcatagcagcagatggcagaacagataaacgagaagagacaaaaacacacagaaatttacaacaaaactagtttatttgggtgggactatatctgggagtggggagcgcctgagccggaaacaccccccaagcgggcagccggagctctgcactcgctcgctcagccattttcggttgctctccctccctgttttttcgacccatgtgcgccctctctctcacctggctaacatgctttgcgcccgctacctctacctggcttggcctctgagatccaaaccgcgccctcctggcatgtcccgcccaagtcccttagccccgctccccaaccctgccccattcccactctagtacccgtaagctacaagacgccgccgttc

SEQ ID NO: 1243651 - DNA, 4001 bp, Homo sapiens
cctgcctatatgagtgtatgtgtctatgtgagtctccagaagagtcaataccgtctgcaaaaccctcgcatttcagggcttgagaggctcccttttttcagaaaacatctacttgggagcccagagtttctgacctcaatcttattccctatactctggggctctgtgagaccccactcctaatcccaaaggacaccttctgcagtacagtgtagtcctcgtctctggcccacctgttcctggcctcagctccacggtgcagtagccttcaatccactgatagcaggggaagtgggatacactaccatccggttcggtgacacagatgcggctacagtaccaagagtccttgcggaagaaagcgtagcgctccttgtgtacacgcagcagcaagagctcacccagctccgctgtgcaacgcaccttgtacttctgtacctgaggggaccaagacagcaagcaggtgagaggcggggaactgccaaggcggtccttgcgccttgcaagatgcatctacacctaagcctattcgggcatacaaacctgagctgctcccagcccataccgggcttttgtatgaattagaaaaagcttccccgggccgggagaggtggctcacgcctgtaatcctaacactttgggaggccgaggcgggtggatcacctgaggtcaggagtttgagaccagcctgcccgatgaaaccgcttctctactaaaaatacaaaaaattagtcgggcgtcgtggcaggcgcctgtaatcccagctacttgggaggctgaggcaggagaatcgcttaaacccgggaggtggaggttgcagtgacctgagatcacaccactgccctccagcctgggcaacaagagcaaaactccatctcaaaaagaaaagaaaaaggtgcccgagcacagtgggcactgcatttcactagcttcctaggccggctgggaactcttgtggaggccacctggggctggcagaggcaggcagatcccctcgataagaggaaacccaggctcagagaggggaagcgacttgcccaaagcccacggtcaattatgggaggagtttaggagccaggggaagtccctctactccctgtccaacgctccttcctctccacagtcctgcctggatggagttcatcatctccaggaaagacagggacctcaatagggaaggtgaggaggtcagggccggtatcctgagttcagcaggatctcaagagtccaggaggaatactcctcccgcctgcggcccctgcccctctgaggtcgcgcttccctgtctcctttgtactcaccgatccaggggcgaagtccctgcccattcgatctagccgctgcttggggctttcaccacacgtgcccaccagtgtgacagagatgttgtccagtgtgccggccctcaggtagggaccagtggtcacacacaggcggtacactgccatgatgggaaggaggaagggatgccccggcaacgctggccgcagcagcagccggcctggaggagaagagcggcacgccggacagggctgggtttctgggcggagggctaggggctgcggggctgggtagggctgaggatgggcccagctctctctgggatgttcctgggctttctctctccgaagctccctgctggcggctcgggcttcctctctccgcccacagtcttgcactctaatacttgtttgcttgcctctgacacagccggtccctctggctggctcacccagatggatatcaggagcctgggttccactgcggagggagggatcagatgctgagatggagaaaaggaggtaacgcctgtataattgggacactgccctccgcctggtcagcggcccggactgatgccctggagtgcttgtccgcccactccccaatgtcccccaagatctgttcctccccattcccaggcagagatgagcacagggcacctgcattcctacgtgtgaatcatccgtgtgaatcactaaacagtggagagttgcacttggtcataaatcacacgtgactgcagccacacgcaggtgagtcgcacacgcattccagcacatgtcaaatggtcaggaacagctccctgtcaccccatacaccgatccccccacgcatggccctctttgtccccagcctttggcacgcccgacctcattctctgctctggagtagggcaggtcaggaaagcgaaatacagcgccggcaaacagggtctgaatgccccgcgtggcattctttccgctccaggaccgccctgggcctgcaggatcctgggcgggagcccaggtgtccgggatctgggccactagggactggggaggaacctctcagagaagcccatagcccgcagcggccccgcgcggccggttccggcgccgcactgttccagcctctactatggtacagtccctgcgtcgcagcctcggcgggggctctaagaacgggaggcagaaaaagctcaatcagcagcaggcgagcttcacccgctgcttccaaatctgtgccaaaatattctatgctgcacagataaaatcctctgtcggttctacaagcctggcttttcctatagagaaccctcttataagcaaaaagtaaagctctcgtgaagagcccggatagctcagtcggtagagcatcagacttttaatctgagggtccagggttcaagtccctgttcgggcggcatgtctttgcttttgggtaccgcacttcgcataaaatggtaacaaaaatagttactagtttttaaagctaggtgatacagaaacttgatttccacaaaatacagcaaacgacggtggagggtaataaacatactttaaaacagtacaaacgcgagccgtattatcgaatttacattttctggtagccacattacaaagaataaaaagcaagcgaaattaatttcacggatctattttacttaccctaatataccaaaatcttattttaacatataatcaacattctaaaaatattaatgaaattttaagtctttttgtttgtacaaagccttccttcaaaagaagatgtgtatttagaagctggcaatacatctgaattcatatatttcaagtgctcgataacggtgtctaccatatccaacagcagactttgttttgttttcgttttaagtgacgggtgtggaagacacgcaaaatagaatgtccagtaatgtacacaatcttgaaagacaccacgagggaggttccatggtgtaatggttagcactctggactctgaatccagcgatccgagttcaaatctcggtggaaccttgaagcttttcttttaatatcagcatgttgaatattgttaattgattttcacagaggggatactcctatgacccaagataatacgacaaaaaaaaaaagtaaactaggacactaccaattatttgtgcttttcctaccggataattgagtcctataacacagtgttaagagaacgtacaataaattatttaaatatgttggaagttgagctaacatttgaaaacatgttaaaatagagatgttatgaagaaacgaaataatagagatgttatgaagaaacgaaatattgcttcagcagttaccatcaggtcttagcttctgggatggatgcaggcctatgatctctctggaagaccaaacacggaagatgatggtgaaaccattaccaggggaattcgtaaaattactttctgcatgtaaataggtgtaacctcacagaactgttaacagaactgtagcaggtgcgtaatccaccagaaaaactccagcctggcagcggtgggattcgaacccacgcctccgaagagactggagcctaaatccagcgccttagaccgctcggccacgctacctgcacgaaaacttactgtccccgttgtcctcctaagagactagaagtaaggaatggggcaaatcttaagagtgccaaattgattcgtctccttttccacatcttttagactggaaatgaagaaccatcgagactgtggaccgcatagc

SEQ ID NO: 1243652 - DNA, 4001 bp, Homo sapiens
agcaacgggcacaaaattaagccactatcctcttcaacaaaggaaaatgtacaacacacccaagggctgttccaagaaacggtaaaggccaaaatcaagagcaagggaagcagtccgatatcagaccagcttgaagggcctgtagattcgggagccctgaccccagcccctcccccaaaggcagattctggctcacctttccctctcctcctactcaagcctgcggcaaagtctgaagtcaagcgctgtcatggaaactgccctgacctcaggcaggctgggagttggagagggaacccagagtgtggggatactccggccgcaggcacacagcgggaactggagttcaccaaaagcggtttccagtggatgctagaaaccaccttaaaaaaagtgttgagacactgtgagtgctcactggccctactctgtcctcccaaggcaaatggctgggctgtgggcaactgaaccctgcccagccatctccaaaactgattcccaaaaagtcatttcttaaccagaaaacaagttgaaatgccattgggattcaatttttctttttttaaaaaagaaaagcttcaaccaaagatggatttgagagtcatgtcactgacgggacacggcggtggggagtgataaaaccacagcgtacaaggtctttataagacagtactcaaggcaaacagagccagaaaaacagactccctgtgcttcacaagatacataaagaagattctttttctcacattaacccactaagacaggcacaaaatttaaaaagcaactgggctgggtctaacagccaaaaaccactcacatttggtcagtctttgtccctgttagaaactggaagccctggcaggggattttcactcacagaacccatcttcagactaacagcagcagttcctcaggctcagctaggctcgcacctgcctgcgcactgaccccggctttactagcactgggtctgtcctgcagcccttcagagctgggagggctcccttcgctaaggcgggaaggggactcagggccacatccccaaaatcacgatccgtcctgtgcagggcgaacggctcaccgagaagccctcgtctcttacctgaatatcggcgtctgagactccaaaatccagattggacaccagcagtttcccacctgtctccacgccggcaccaccgccgaagccactgtcgaaaagatcgtgctgccacttgtcgggaagttgttttggctgaaaaaaaaaccgcaacaagagcagatctgtgagtctcagtccagggctttcctgaccctcacggctactccggacccttcctcttcccggcctgagaggatccggccgaaacggggccgccagcgctccctccggcgctgcagctgccccagcccgaggccgcacggtcccaccgcggccgcacaacttcagttcccttagactaacttcccgccgcctgtgccgcgcccagcgtcccctcctctcctgccacgaggccccaacgtccggaacaaacaaagagctgggaagggtctcagcctccgggaccggaccccgaaagaacgacctcgctcccgcccaccaccccctccgcgcccacacgcaccctccggacctccgggcggccgctccaccagccttatccacccgccggcccgggtctccgccgcgagcggccccggccccagccccggctggccccctcccactctccggcgcggccggcctccgcactcaccctgctgtagggcgccggtcggttcctgccgcctccgccggccgcgccgcgggcgatggccggccggttccggatgggcccgccgcctcgattcactcgcgcggcggcctgcgccccaccgccgcggccgccctgggagccggcccggccgcggccccggcccccgccccggccgcctcgctggctccggttcagtttaatgatgtcgtccagagacatgtccattttgtcggccatggcgggcgcggaatcgggcatcggctcgagcccgcgcgtcagcacgccggcacgtcacttccggcgccgcgtgaggccttccggtgccacggcctcggagcggctgctgattggccgctggcggacggctgcgcgcgcgggacggggtgaggcggggaggcgcgtgcgcactggcgtgcgagactcggcgggcgctgttgagggagtcgggccgcgactgtggtcgtttttataccttcccgcgcggacgccggcgctgccaacggaagggcgggtagggcggtgcgtgattaggttggcgaaggtgcgagggcgcagggggtggggcggcggccgttggaggcggagcctacgcgcccctccctccccgcacgctccgcccgatcggccagggctgggggcgctgggggcgctacgggcgcggcgggtgcctgggagctgctgggagtccttgtttccgctcccgcccaggactgtgcgctcggctcgcggtggggtccggcgggcgcggcttcggcgggcggcagccgctgcagacgagctgcgggttggttttttggtctccacctgcagcccccccaagtctgcactgtcacattttgccagtcatatcctttacaagttttcttgcgggccgggcgcgggcctcacgcctgtaatcccagcactttgggaggccgaggcaagaggttcgcttcagcccaggagtttgagaccagccggggcaacatcgtgagacccccatctctaaaaaaaaaaatgagctgggcatggtggtgcacttctgtactaccagctacttgggaggccgaggtgggaggattgcttgagcccaggaggtcgaggctgcagtgagccgtggtggcaccactgcactccagcctgggcgacagagccagaccctgtctccaaaaaaaaattatttttgcaacttattaatgaaaaccagtgtgccatttcattgattttttttttttttttttgaggcagtctcattctgtcgcccaggctggagtgcagtggggcgatctcggctcactgcaacctctgcctcctgggttcaagcgagtctccagcggcagcctcccgagtagctgggactacaggcacgtgccaccatacctggctaatgtttgtatttttaatagagacagggtttcgccatgttggccagggtggtcttgaactcctgacctcagatgatccgcccgccttggcctcccaaagtgctgggattacaggcatgagccaccacacccagcccatttcatggattttaagttgttttgagatacttgcttttgtttttgttttttgagtcagggtctccctccgtcacccagagtggagtgcagtggtgtgatcttggctcactgcagcctcaaactcctgggctcgagctatcctcccacgtcagcctctcaggcagctggtgcacgccaccacagctggcttttttttttttttttgagacagtcccactatgttgcccaggctggagtgcagtggtgcgatctcggctcactgcaatctctgcctcccaggtccaagtgattcctgtggctcagcttcccgaatagagctgggagctggcgtgatctcagctcgctgcaacctccgcctcccaggttcaagtgattctcttgcctcaccctcccgagtagctgggattacagttgcccaccaccacacccggctaattttttgtatttttagtagagacagggtttcagtatgttggccaggctggtcttgaactcctgaccttgtgatctgcctgcctcagcctcccaaagtgctgggattacaggcgtgagccactacgcctggcctctaatttttgtttttttggtagagatggggtttcaccatgttggccaggttggtctcgaactcctgacctcaagtgatccaccctcctcggcctcccaaagtgctgggattacaagcatgagccaccacctgcggctaatttttttgtattttttgtagagacggagtttcgtcatgttggccaggcccatttga

SEQ ID NO: 1243653 - DNA, 4001 bp, Homo sapiens
aagacaatcatgaaatccattcctccatctcatatggaacctgctcccattacaaaaactagtggtggccaggtgtggtggctcatgcctgtaatttcagcactttgggataggaggattgcttgaggccaggagtttgagaacagctcaggcaacatggtgagaccctgtctctacaaaaaatttaaaaattccctgggcatagttgtgcacatctgtggtcctagctaccagggaggctgagacaggagaatcacttgagcccaggagcttgaggctgcagtgagccatgactgtgccactgcactccagcctgggcaagagtccaaaacaaaaaaaaaaaacctcacggtgaccacaggagcaggacctcacacccaacttccttcttttggggaataatattggcctggcacagtggctcacgcttataatcccagcactttgggaggccaaggcagaaggattacttgagcctaggagtctgaaatcagcttcgacatcatggcaaaaccccatatctacaaaaaaattagccggatgtggtgatgtgcacttgtagtcccagctacttggcaggctaagatgggaggatcatctgagcccaggaggtcgaggctgcagtgggccgtgatcgtgccactgcagtccagcctgggcaatagagactctgtctcaaaaaataataatatgaattaactcatcagtgccacatgaaaaatactcatcgtttctaatgtgactcaaagatcttcaacatcaaataaaaacaaaactaatgtaagccctatcatttctgcaatttaactgcaggctgagaaactacagcttagccactgaagtttatggcctcaaagtcatgtcacattagggaagacatcagatgactaatcaaaagccagcctcacaatgacaggtttcttccattcacatcgtgttcctatatagagctttcatccttcctcttgaatgggtccgatgttccaccacgaggctttttgaattaaggaaaaagttgaacatctctgtctggatcatctttgtcatattttctaattatttagattttgccagtttaatgatagacgattgatgggaaaacttaagctaatgtctgttctgattgaacctataaattctggggttgaagaggctgactaaaattccagaccaaatgtctctgtactcaaagctctgatataagcataggctcatcctcactcctacacaactgggctgaaatctgacttctacaggacaaaatataaaacaagatgtaccttcctgtagtctacctaccttgattaggaaggaaggctcccatggaagcttttaacttacaaggacggacatgtctgggcctggctggaagaaagttgtggagtgtgacttcatcttaatattaaaaaggcagtgtgaaaggtcaggaggcctcctcttgcctcccaagcctaatctagggaagctgcgggagaagatgggcagggggcgcagaattcggtcactgcagtgggctggaggcctaggatgctttggtcccaaaaccagaacatcacgggcaaacgggaaggagctggccaccctggctggttgcctatagcaactcgcactgtgggctctggtccatgcagacacaacccagtctccagctgggagtggagtgggggttccccagggactctcgcttcgcctcttcttccccaggagcctcgggaaaggcctccctggctccctagaggcaccgaccccgcggaccccgcggcttccgccacgtccgcccctcctacatcctcatcccgctccaccgaccgcgaccggcccccgcctctacgacccggctaccctgcctaggggccccggcccagctctgacagcacccgcgaaccgccctgacccgacaggcctcgataccacccacccgcggcagccctcacgcgcatgcgcaccgcgtcccttcgcactgcgccacgccacgcccactggcgccacgccccttacgccacgcgccgcgccgctgcgtcgcgcacgccctgtgggccccgcccaactcacgacccacccatgccacgcccctgagcgtgcggccgcctgggcaggcgcagagctggagttcagcggccgcgacccgcctcttccagaatagagggtagcgaggggactacaagccccagctgtccacccccgcagtcgccgattcctcgcttgcgctcgcggcggctccgcggcccggttctcgagagccacagatgcgcccgcgtcgctggggtctcccgtgtgggaacgtcctcggcaggccgcgggtttgagaggcatcgccggcgtgacgaatgcaaccagcgtggccccaaatgagtcggcggccgccgcaggttgacgtagagccgcagcgctccccggggccgtcaccctcagcactttcccttctttatttgttgggggccgcgggggctggaacccagaagcgcaagtgtggggcgcgtcctcgtggcgtccctggcgctccgaggccgaaacccggatgctgaggggaggccgtgagctcggaaaggcaccgcggggccggcattagggctgagctagctctgtaccctctggtgggactttcggtctctctgggcctcgccattctctttctttttcttgcttttttttttttttttttttttttggagacggagtcttgctctgttgcccaggctggagtgcagtgggacagtctgggctcagtgcaacctttgcctcctgggttcaagcgattttcccgcctcagcctccccagtagctggaactacaggtgcccgctatcacgtccggctaatttttgttatttttagtagagatggggtttcaccatgttggccaggctggtctcgaactcctgacctcaagtgatccgcccgccttggcctcccaaagtgctgggattacaggcgtgggccaccgcgcccggcttttttttttttaatacgggttttcaccctgttacccaggctggtctcgaactcctgcgctcaggtgatccacccccccgcaccccggtctcccacagtgctggaattacaggcgtgagccacggcgcccggcctgttattttgaagtcaagctattttaccatcctctggattttcgtcatcctaattctccttcccagtctcaaggaaagacaggcacattttcttgatgacttcagcatttgtaaccccttgttggctctccttagaggacattaactctgaacctttcaacttcgaggatctctttagcccttccttatttgttcactctcctggatcatgaattctccaaatttgtcctttgaacccagtgcccatatccaccctcacctgaacccattcttgaataaaatgcattcctaccatgactgttctcaaagtttgaagttgagaataccgatgcgccactcctgcttcaatgcttgagaagtcgtgggctttcttccatgtgccttttgactgggcgcctatctcccgacagcctgaggtggtgtagcataggggcgaaggtggtctgtgcttgaatcccaaaaccctcactagcgtgggacctgtgtcaactacttgacctcttttgtaaaacggagacaattacagcacatctttttttattattattacttgacacgaagtctcgctctgtcatccagactggagtgcagtggtgcgatctcggctcactgcaacttatgcttcctgggttcaagcgattctcgtgcctcagtctacagagtagctgggactacaggcacacaccaccacgcccggctaatttttttttttttttttttttttgtatttttagtagagacagggtttcgtcatgttagccaatttttgtatttttagtagagacggggtttcaccatgttggccaggctggtcttgaactcctgacctcaggtgatccacctacttcggcctcccaaagtgcagggattacaggcgtgagccaccgcgccccacctacagcacatcttaacagaa

SEQ ID NO: 1243654 - DNA, 4001 bp, Homo sapiens
agaaagggcacactcttctctccaagggaagggactcagctccttacggacaaggagatcacatttgggagcacaggacagtcaggagtttggttttacctcacgttgaggatatcttcaaagatctcaaatgggcctggccaacatgacgaaactccgtctctacaaaaaatacaaaaaaattagccgcaggtggtggctcatgcttgtaatcccagcactttgggaggccgaggagggtggatcacttgaggtcaggagttcgagaccaacctggccaacatggtgaaaccccatctctaccaaaaaaacaaaaattagaggccaggcgtagtggctcacgcctgtaatcccagcactttgggaggctgaggcaggcagatcacaaggtcaggagttcaagaccagcctggccaacatactgaaaccctgtctctactaaaaatacaaaaaattagccgggtgtggtggtgggcaactgtaatcccagctactcgggagggtgaggcaagagaatcacttgaacctgggaggcggaggttgcagcgagctgagatcacgccagctcccagctctattcgggaagctgagccacaggaatcacttggacctgggaggcagagattgcagtgagccgagatcgcaccactgcactccagcctgggcaacatagtgggactgtctcaaaaaaaaaaaaaaaagccagctgtggtggcgtgcaccagctgcctgagaggctgacgtgggaggatagctcgagcccaggagtttgaggctgcagtgagccaagatcacaccactgcactccactctgggtgacggagggagaccctgactcaaaaaacaaaaacaaaagcaagtatctcaaaacaacttaaaatccatgaaatgggctgggtgtggtggctcatgcctgtaatcccagcactttgggaggccaaggcgggcggatcatctgaggtcaggagttcaagaccaccctggccaacatggcgaaaccctgtctctattaaaaatacaaacattagccaggtatggtggcacgtgcctgtagtcccagctactcgggaggctgccgctggagactcgcttgaacccaggaggcagaggttgcagtgagccgagatcgccccactgcactccagcctgggcgacagaatgagactgcctcaaaaaaaaaaaaaaaaaatcaatgaaatggcacactggttttcattaataagttgcaaaaataatttttttttggagacagggtctggctctgtcgcccaggctggagtgcagtggtgccaccacggctcactgcagcctcgacctcctgggctcaagcaatcctcccacctcggcctcccaagtagctggtagtacagaagtgcaccaccatgcccagctcatttttttttttagagatgggggtctcacgatgttgccccggctggtctcaaactcctgggctgaagcgaacctcttgcctcggcctcccaaagtgctgggattacaggcgtgaggcccgcgcccggcccgcaagaaaacttgtaaaggatatgactggcaaaatgtgacagtgcagacttgggggggctgcaggtggagaccaaaaaaccaacccgcagctcgtctgcagcggctgccgcccgccgaagccgcgcccgccggaccccaccgcgagccgagcgcacagtcctgggcgggagcggaaacaaggactcccagcagctcccaggcacccgccgcgcccgtagcgcccccagcgcccccagccctggccgatcgggcggagcgtgcggggagggaggggcgcgtaggctccgcctccaacggccgccgccccaccccctgcgccctcgcaccttcgccaacctaatcacgcaccgccctacccgcccttccgttggcagcgccggcgtccgcgcgggaaggtataaaaacgaccacagtcgcggcccgactccctcaacagcgcccgccgagtctcgcacgccagtgcgcacgcgcctccccgcctcaccccgtcccgcgcgcgcagccgtccgccagcggccaatcagcagccgctccgaggccgtggcaccggaaggcctcacgcggcgccggaagtgacgtgccggcgtgctgacgcgcgggctcgagccgatgcccgattccgcgcccgccatggccgacaaaatggacatgtctctggacgacatcattaaactgaaccggagccagcgaggcggccggggcgggggccggggccgcggccgggccggctcccagggcggccgcggcggtggggcgcaggccgccgcgcgagtgaatcgaggcggcgggcccatccggaaccggccggccatcgcccgcggcgcggccggcggaggcggcaggaaccgaccggcgccctacagcagggtgagtgcggaggccggccgcgccggagagtgggagggggccagccggggctggggccggggccgctcgcggcggagacccgggccggcgggtggataaggctggtggagcggccgcccggaggtccggagggtgcgtgtgggcgcggagggggtggtgggcgggagcgaggtcgttctttcggggtccggtcccggaggctgagacccttcccagctctttgtttgttccggacgttggggcctcgtggcaggagaggaggggacgctgggcgcggcacaggcggcgggaagttagtctaagggaactgaagttgtgcggccgcggtgggaccgtgcggcctcgggctggggcagctgcagcgccggagggagcgctggcggccccgtttcggccggatcctctcaggccgggaagaggaagggtccggagtagccgtgagggtcaggaaagccctggactgagactcacagatctgctcttgttgcggtttttttttcagccaaaacaacttcccgacaagtggcagcacgatcttttcgacagtggcttcggcggtggtgccggcgtggagacaggtgggaaactgctggtgtccaatctggattttggagtctcagacgccgatattcaggtaagagacgagggcttctcggtgagccgttcgccctgcacaggacggatcgtgattttggggatgtggccctgagtccccttcccgccttagcgaagggagccctcccagctctgaagggctgcaggacagacccagtgctagtaaagccggggtcagtgcgcaggcaggtgcgagcctagctgagcctgaggaactgctgctgttagtctgaagatgggttctgtgagtgaaaatcccctgccagggcttccagtttctaacagggacaaagactgaccaaatgtgagtggtttttggctgttagacccagcccagttgctttttaaattttgtgcctgtcttagtgggttaatgtgagaaaaagaatcttctttatgtatcttgtgaagcacagggagtctgtttttctggctctgtttgccttgagtactgtcttataaagaccttgtacgctgtggttttatcactccccaccgccgtgtcccgtcagtgacatgactctcaaatccatctttggttgaagcttttcttttttaaaaaaagaaaaattgaatcccaatggcatttcaacttgttttctggttaagaaatgactttttgggaatcagttttggagatggctgggcagggttcagttgcccacagcccagccatttgccttgggaggacagagtagggccagtgagcactcacagtgtctcaacactttttttaaggtggtttctagcatccactggaaaccgcttttggtgaactccagttcccgctgtgtgcctgcggccggagtatccccacactctgggttccctctccaactcccagcctgcctgaggtcagggcagtttccatgacagcgcttgacttcagactttgccgcaggcttgagtaggaggagagggaaaggtgagccagaatctgcctttgggggaggggctggggtcagggctcccgaatctacaggcccttcaagctg

SEQ ID NO: 1243655 - DNA, 4001 bp, Homo sapiens
ggagctacgggagaacagcaagccccagcagcaatccgctttgtggctcacacctgtgatcccagcactctgggaggccaactcgggaggatcgcctgagctcaggagtttgagaccagcctgtgtaacacagtgagactgagtctctaccaaaaaaaaaaaaaaaaaaaaaggaaaaaaaagaactatctgtgaggtttctttagccatctagagaaagggcacactcttctctccaagggaagggactcagctccttacggacaaggagatcacatttgggagcacaggacagtcaggagtttggttttacctcacgttgaggatatcttcaaagatctcaaatgggcctggccaacatgacgaaactccgtctctacaaaaaatacaaaaaaattagccgcaggtggtggctcatgcttgtaatcccagcactttgggaggccgaggagggtggatcacttgaggtcaggagttcgagaccaacctggccaacatggtgaaaccccatctctaccaaaaaaacaaaaattagaggccaggcgtagtggctcacgcctgtaatcccagcactttgggaggctgaggcaggcagatcacaaggtcaggagttcaagaccagcctggccaacatactgaaaccctgtctctactaaaaatacaaaaaattagccgggtgtggtggtgggcaactgtaatcccagctactcgggagggtgaggcaagagaatcacttgaacctgggaggcggaggttgcagcgagctgagatcacgccagctcccagctctattcgggaagctgagccacaggaatcacttggacctgggaggcagagattgcagtgagccgagatcgcaccactgcactccagcctgggcaacatagtgggactgtctcaaaaaaaaaaaaaaaagccagctgtggtggcgtgcaccagctgcctgagaggctgacgtgggaggatagctcgagcccaggagtttgaggctgcagtgagccaagatcacaccactgcactccactctgggtgacggagggagaccctgactcaaaaaacaaaaacaaaagcaagtatctcaaaacaacttaaaatccatgaaatgggctgggtgtggtggctcatgcctgtaatcccagcactttgggaggccaaggcgggcggatcatctgaggtcaggagttcaagaccaccctggccaacatggcgaaaccctgtctctattaaaaatacaaacattagccaggtatggtggcacgtgcctgtagtcccagctactcgggaggctgccgctggagactcgcttgaacccaggaggcagaggttgcagtgagccgagatcgccccactgcactccagcctgggcgacagaatgagactgcctcaaaaaaaaaaaaaaaaaatcaatgaaatggcacactggttttcattaataagttgcaaaaataatttttttttggagacagggtctggctctgtcgcccaggctggagtgcagtggtgccaccacggctcactgcagcctcgacctcctgggctcaagcaatcctcccacctcggcctcccaagtagctggtagtacagaagtgcaccaccatgcccagctcatttttttttttagagatgggggtctcacgatgttgccccggctggtctcaaactcctgggctgaagcgaacctcttgcctcggcctcccaaagtgctgggattacaggcgtgaggcccgcgcccggcccgcaagaaaacttgtaaaggatatgactggcaaaatgtgacagtgcagacttgggggggctgcaggtggagaccaaaaaaccaacccgcagctcgtctgcagcggctgccgcccgccgaagccgcgcccgccggaccccaccgcgagccgagcgcacagtcctgggcgggagcggaaacaaggactcccagcagctcccaggcacccgccgcgcccgtagcgcccccagcgcccccagccctggccgatcgggcggagcgtgcggggagggaggggcgcgtaggctccgcctccaacggccgccgccccaccccctgcgccctcgcaccttcgccaacctaatcacgcaccgccctacccgcccttccgttggcagcgccggcgtccgcgcgggaaggtataaaaacgaccacagtcgcggcccgactccctcaacagcgcccgccgagtctcgcacgccagtgcgcacgcgcctccccgcctcaccccgtcccgcgcgcgcagccgtccgccagcggccaatcagcagccgctccgaggccgtggcaccggaaggcctcacgcggcgccggaagtgacgtgccggcgtgctgacgcgcgggctcgagccgatgcccgattccgcgcccgccatggccgacaaaatggacatgtctctggacgacatcattaaactgaaccggagccagcgaggcggccggggcgggggccggggccgcggccgggccggctcccagggcggccgcggcggtggggcgcaggccgccgcgcgagtgaatcgaggcggcgggcccatccggaaccggccggccatcgcccgcggcgcggccggcggaggcggcaggaaccgaccggcgccctacagcagggtgagtgcggaggccggccgcgccggagagtgggagggggccagccggggctggggccggggccgctcgcggcggagacccgggccggcgggtggataaggctggtggagcggccgcccggaggtccggagggtgcgtgtgggcgcggagggggtggtgggcgggagcgaggtcgttctttcggggtccggtcccggaggctgagacccttcccagctctttgtttgttccggacgttggggcctcgtggcaggagaggaggggacgctgggcgcggcacaggcggcgggaagttagtctaagggaactgaagttgtgcggccgcggtgggaccgtgcggcctcgggctggggcagctgcagcgccggagggagcgctggcggccccgtttcggccggatcctctcaggccgggaagaggaagggtccggagtagccgtgagggtcaggaaagccctggactgagactcacagatctgctcttgttgcggtttttttttcagccaaaacaacttcccgacaagtggcagcacgatcttttcgacagtggcttcggcggtggtgccggcgtggagacaggtgggaaactgctggtgtccaatctggattttggagtctcagacgccgatattcaggtaagagacgagggcttctcggtgagccgttcgccctgcacaggacggatcgtgattttggggatgtggccctgagtccccttcccgccttagcgaagggagccctcccagctctgaagggctgcaggacagacccagtgctagtaaagccggggtcagtgcgcaggcaggtgcgagcctagctgagcctgaggaactgctgctgttagtctgaagatgggttctgtgagtgaaaatcccctgccagggcttccagtttctaacagggacaaagactgaccaaatgtgagtggtttttggctgttagacccagcccagttgctttttaaattttgtgcctgtcttagtgggttaatgtgagaaaaagaatcttctttatgtatcttgtgaagcacagggagtctgtttttctggctctgtttgccttgagtactgtcttataaagaccttgtacgctgtggttttatcactccccaccgccgtgtcccgtcagtgacatgactctcaaatccatctttggttgaagcttttcttttttaaaaaaagaaaaattgaatcccaatggcatttcaacttgttttctggttaagaaatgactttttgggaatcagttttggagatggctgggcagggttcagttgcccacagcccagccatttgccttgggaggacagagtagggccagtgagcactcacagtgtctcaacactttttttaaggtggtttctagcatccactggaaaccgcttttggtgaactcca

SEQ ID NO: 1243656 - DNA, 4001 bp, Homo sapiens
agcactttgggaggccaaggcgggcggatcatctgaggtcaggagttcaagaccaccctggccaacatggcgaaaccctgtctctattaaaaatacaaacattagccaggtatggtggcacgtgcctgtagtcccagctactcgggaggctgccgctggagactcgcttgaacccaggaggcagaggttgcagtgagccgagatcgccccactgcactccagcctgggcgacagaatgagactgcctcaaaaaaaaaaaaaaaaaatcaatgaaatggcacactggttttcattaataagttgcaaaaataatttttttttggagacagggtctggctctgtcgcccaggctggagtgcagtggtgccaccacggctcactgcagcctcgacctcctgggctcaagcaatcctcccacctcggcctcccaagtagctggtagtacagaagtgcaccaccatgcccagctcatttttttttttagagatgggggtctcacgatgttgccccggctggtctcaaactcctgggctgaagcgaacctcttgcctcggcctcccaaagtgctgggattacaggcgtgaggcccgcgcccggcccgcaagaaaacttgtaaaggatatgactggcaaaatgtgacagtgcagacttgggggggctgcaggtggagaccaaaaaaccaacccgcagctcgtctgcagcggctgccgcccgccgaagccgcgcccgccggaccccaccgcgagccgagcgcacagtcctgggcgggagcggaaacaaggactcccagcagctcccaggcacccgccgcgcccgtagcgcccccagcgcccccagccctggccgatcgggcggagcgtgcggggagggaggggcgcgtaggctccgcctccaacggccgccgccccaccccctgcgccctcgcaccttcgccaacctaatcacgcaccgccctacccgcccttccgttggcagcgccggcgtccgcgcgggaaggtataaaaacgaccacagtcgcggcccgactccctcaacagcgcccgccgagtctcgcacgccagtgcgcacgcgcctccccgcctcaccccgtcccgcgcgcgcagccgtccgccagcggccaatcagcagccgctccgaggccgtggcaccggaaggcctcacgcggcgccggaagtgacgtgccggcgtgctgacgcgcgggctcgagccgatgcccgattccgcgcccgccatggccgacaaaatggacatgtctctggacgacatcattaaactgaaccggagccagcgaggcggccggggcgggggccggggccgcggccgggccggctcccagggcggccgcggcggtggggcgcaggccgccgcgcgagtgaatcgaggcggcgggcccatccggaaccggccggccatcgcccgcggcgcggccggcggaggcggcaggaaccgaccggcgccctacagcagggtgagtgcggaggccggccgcgccggagagtgggagggggccagccggggctggggccggggccgctcgcggcggagacccgggccggcgggtggataaggctggtggagcggccgcccggaggtccggagggtgcgtgtgggcgcggagggggtggtgggcgggagcgaggtcgttctttcggggtccggtcccggaggctgagacccttcccagctctttgtttgttccggacgttggggcctcgtggcaggagaggaggggacgctgggcgcggcacaggcggcgggaagttagtctaagggaactgaagttgtgcggccgcggtgggaccgtgcggcctcgggctggggcagctgcagcgccggagggagcgctggcggccccgtttcggccggatcctctcaggccgggaagaggaagggtccggagtagccgtgagggtcaggaaagccctggactgagactcacagatctgctcttgttgcggtttttttttcagccaaaacaacttcccgacaagtggcagcacgatcttttcgacagtggcttcggcggtggtgccggcgtggagacaggtgggaaactgctggtgtccaatctggattttggagtctcagacgccgatattcaggtaagagacgagggcttctcggtgagccgttcgccctgcacaggacggatcgtgattttggggatgtggccctgagtccccttcccgccttagcgaagggagccctcccagctctgaagggctgcaggacagacccagtgctagtaaagccggggtcagtgcgcaggcaggtgcgagcctagctgagcctgaggaactgctgctgttagtctgaagatgggttctgtgagtgaaaatcccctgccagggcttccagtttctaacagggacaaagactgaccaaatgtgagtggtttttggctgttagacccagcccagttgctttttaaattttgtgcctgtcttagtgggttaatgtgagaaaaagaatcttctttatgtatcttgtgaagcacagggagtctgtttttctggctctgtttgccttgagtactgtcttataaagaccttgtacgctgtggttttatcactccccaccgccgtgtcccgtcagtgacatgactctcaaatccatctttggttgaagcttttcttttttaaaaaaagaaaaattgaatcccaatggcatttcaacttgttttctggttaagaaatgactttttgggaatcagttttggagatggctgggcagggttcagttgcccacagcccagccatttgccttgggaggacagagtagggccagtgagcactcacagtgtctcaacactttttttaaggtggtttctagcatccactggaaaccgcttttggtgaactccagttcccgctgtgtgcctgcggccggagtatccccacactctgggttccctctccaactcccagcctgcctgaggtcagggcagtttccatgacagcgcttgacttcagactttgccgcaggcttgagtaggaggagagggaaaggtgagccagaatctgcctttgggggaggggctggggtcagggctcccgaatctacaggcccttcaagctggtctgatatcggactgcttcccttgctcttgattttggcctttaccgtttcttggaacagcccttgggtgtgttgtacattttcctttgttgaagaggatagtggcttaattttgtgcccgttgctagtgggctttgcagcttcctctacctgcatcgtggtacacgtgtcaggtccccacaatggcaggagccctcagacccaggtgctcttggaagttgctgtccctcctgccccgcccttccctcatttcccgttaaccactgtcctgcctcccagagaaccacccccaaagcaactcacgcttccagggcctgtccctgggccaccagaaggaacgcagttttgttgcttttctgacaactgctctctgcaactcccaggaactctttgctgaatttggaacgctgaagaaggcggctgtgcactatgatcgctctggtcgcagcttaggaacagcagacgtgcactttgagcggaaggcagatgccctgaaggccatgaagcagtacaacggcgtccctctggatggtgagtctgggggtggacccacgctgactgtggggcttgtggagtttggggctggcacctgtccaggtaggaatatggggtacccctgtggctgaggacactttgcatttgcccctttgtctctctcttccatctgccacctctcatgctgccccacacatctggaccaacctcttgtgaacccccatccagcaagctacatccctcccctccttcagctccttccggaagattcacttctgtgaagccttctcagaaccgccatagtacacctctgagtgcggggctgtagtcgtaaagacaaaggtaccggttcttcttcgtcaggtcacccacacctctccacccacgagcaccccgatacctcagcgagcagcccacctagtctggac

SEQ ID NO: 1243657 - DNA, 4001 bp, Homo sapiens
tgttgattgtcgaataaatgaaagactatattggaatgaagagacagagcgtggctggcttaggaccagctgcttggcacattccaagggcagagattcagacctctcagcagtgagaagccttgtctcatggaagaaaggtagcttgcttgcctatatcagaacaaatgacagtactgctttgtgtcatcttcaaaagtacctaatacaggagaggtgacacaaaactgggagagataagtctcatgactctgaataaatgtcagagttacaagggacctgaggagtcctctaaggtccagcattttccagcttccagtctctgagccactttttgctctacttcctcctctgtctgccatgttcctttttgcagcagctgttcttgaccagacgggcctccctctcccaaaccctcctatcccccagggttgaggggggcatgaaggctttagataactacttttgttgggaaaacactgttctcgtttaaactctgtcacttcatggatgaagaaactgagtgttagagaactgaaatagtatggtcgaagttctgccactaattagtgtcagacctgagcctagagcctaagtcttctgaccacaagactagtcctagctctacacttcatggaacaaatggtaatcataccccacactgttcattcaattcaattctacaaccatgaatggagccccccaaatgtacctggcccctaactggttagaatcaggggcaaaatattgaaaactgtatagttcctgtccccaaagggtttactgaaagtttgaatacatagtaaaaggaataagtttttttttttttttttggtgttggcatattggttaataggttaatgcagtagccagtttaaactcagcaagtacttcaagataccttctcagaggttccataagcagttatgcttaggcctcactctggatgtgattttataaggaaggaaggaaaaagaaagaaaggaaggaaaagagagaaaaggaaaggaaaactgaacggtgctctggcctcctcctttcatgccttacttgcacttatctctggttttttcaaaggtcttaagcttcaggttcattcctgaaaagctttttggtaaggtcctcacctactctgaactcctgaggggaagtgaagtagctgaataagttcctcctattagtatcccctaccaggacctcagccaggacttcaataataaccttctgaattattgtagaaacctgtgattagtattaaccaagtcaataacaggcatttcctccatcaaccaaaggcacatttgaggtcttctggaccaatctgggtcagtaacagggattccgataccaccgacacaacccacagggttagtatgtgtcaatcagttctgtcctgcctagccctggctcagctcttcagagatgacctcttacaaaaaaaaaatccacttccaactttagaaaaaattttacttctccatcatcatgacaataaagtccataaaaagtgagagagagagaaggagagaatccatgtgggagacagtgagagcgtgtgaacagtcagaaatcatgagcaagagttggcattaacatggagacaagtaatccctggtttccttgctttatataaataaaatgataaggataaaagagaaaacagaccataaagtaaaaacttgtctctagaagcctctctcctttaatctccccattctcccacctcccaaaagacaaagacacacattacagacccaaactacttcagatcaacatttgcctgtttacagaaatgaaaccagctttccctctgcctgaccatggatgctcaccagctaacgcccgaattcactcgcccactcaactcacattttcctgcctgttgaatgcaaaacaatggcctccaaacaccaattaccgatatttagaactattgttttcctaccctggttagagacgcctccatgagagacacaggactgagctcttgagttgaaagaggacctggggggtggagggaaacccctttgcgaatgtccacacggtcccgttgccaagggaaccctggctttatccagggagactgagcatggctgcctctcccacggcttggctccaggagtgtccagattacagtgcagggtcaagaggagaggcaggggaagtgccacacaggcttggtgacaaagaaatcgttttcaaagaatgaaagaaatggtgaaaaatatcttaggaggtgcccggtggggagggaataagttgattgataatgctgcgatcagatttgagttggtctttgtgcccctgaaaggggtgggattcgaaagtatatctgaaaggagacagggtgggaaggaaagagagagtgagactgagagaggaaaggttgaaaggggtgggttttagcctccttctgcggatgctgaatactaatcaggtaaacaattatttcattaagatgctcagttgaagctttggaatggattattttggctactggattggttggaggagctgtctggctgtttcctagaagtctggtgggaactggaggggagatgataatataatcttgatagtcaagcaagtttttatttggcctgcactttaagggctgaggctggcctttcttttcagagtgaaatctcttgggaagtgtgccaaaggaggcacattatgtgcatgcttattttgaaaacccatttgtcaaaggaggagtatgttgagcagtggtttggagagtttgattggaccctgattcctcacctagtgcctggcacagtgtagatgttcaataaaacatttgccacctgaatggttgctgaaggaaaacttgtttccagcaacttgcctgtccagcaaggatgagtactttgaagcagttgaggctcagcagatgtggcttacctattgacccacagatgaatgggaacaaaatagaggacttgagcccagagccccattacccttgatcatgaatgtctaattgcttttttaaaaatagagaattcaagggaactctctatctaaatgttgctgctactatacaataggaaaaaaaaagacaagtaaatgaaaagaagtaataataggtatctctgcaggtgatctgggcttaacatggagtgaggatattcgtactgagttacagtgaggcactcagaaaaattaaacacacacacacacacacacacacacacacacacacacacatatatatatatatatatttccctgcaagatggtgagcttcttatattactcatcttccaaggcttagctctggcatcagttaccccaggaactttccattactatccccaacctcagcttccatagtactttttacagtttttcctcagaatgcttatcaaatggatttagttgttgctgcatgtgtacataatcacaggaatggccctctaccagaatggaatctccttgatggaaggcaccatgcttcattccttttctttaaaaaaaactctttaatacttagtaaaacgcttgttacataggaagtgcatgatacatatactcaagaattgaacagcaatgagtcaatttgtgagtgttttgttgagtgtcagctgcattaagctcaagggaagattcaagtcaaggtgaaggtatagtatctgcccgcttcaaaaagtttaaaatctatgtaagatgaaggtgacttggtctttaatgttacttaggcttactgcagtaagtgtagctgagagtaacggaagtaatgcttttatttaatggataaaaaccagctctctcagtggtgctgttggtcagattgtggctatgaaaccccagaaactcagagttgcaaaaaggcccagttaggcttgcatggtacgtgcttatttcttcttttcaatacccttggctttgtcagcccatctactctaaagaggccccatttaagggcgtgtttcctagtagtagacaggctggaaatagccccaacccagcactttctccactctaccatgctgctt

SEQ ID NO: 1243658 - DNA, 4001 bp, Homo sapiens
cctttctacccgcctcactcctgtgagcaacagctgtctgctgtgtacaacattccgtgatttactcaaaaagcaacttcagggaatcccttgggtttttgctccttttcttactcctctgccttcaggcaatattcacctaaagtttccccctccagggatatggtagaaaaagtaaagacaaaaactgggtgcctgccgggcgcgatggctcatacctgcaaccccagcacttagagaggccaaagcggatggattgcttgagcccaagagttgggagaccagcctgggtgacatagtgtgacctagtctctctcttttttaagacaggatcttactctgtcgcccaggctggtgcagttcactgcaacctccgcctcccggattcaaatgatcctcccacctccctagtattactgcgaggaccacaggcacccgccatcactccattcactccaggctggagtgcagtagcacgatctcagctcactgtaacctccgttttccgggttcaagcgattcttgtgcctcatcctcccgagtacctggaattacagacacgtgccaccacacctggctaactttcgtattttttgtagatacgaggtttcgccatgttgcccaggctgctcttgaactcctggcctcaagcgatcctcccacctcggcctcccaaagtgctgaaattactagcgcgagccaccacacggggccaagaccttgtctacacacacacacacccctttttaattagccgggtgtggtggcgagcgcccctggtcccagctactcaggaggctgaggcagaaggatcgcttgagcccaggagactgaagctacagtgagccgtgaccgcgccactgtactccagccggtgggacagagcgagaccctatctcaaaacacacacacacaccccccaaaaccaactgggtgtcagtcacagctatctctgtaactttgcctaaattcctttatcaataaaggcaaatacacacgccaggcctccttcacgaggttatctgaagtctaatgcaaatgagaaaagccgaccaactgtcaggtgctgcccaaatctaagatccatcaagtgatgggttcagtcaaagctcaaaaccaacaggaaaggtcgtggccaagcacactgcagtcactcaataaacaaaggtcaaataaggaatactgttctccaataatggggtgaagaggagaaccaggctgcccagatccaacaatgtccctgcacgattcctgacaggtaactccccgtctctgggccttctttccccctacgtgtacaataaggctttgacaatgaaggcttctaattactgctacattaagacaggcagactctgagagaccagagtgccttaagctgcaatgtcatgaaaagtgcacgagaccagagggtaggcactggacggggaggcaaaggcacagaggtctggtttgagcagccctcttgtgagcagtgtgaccttggccaactcccttcccgcaaaccccttcctcccgtcttcatctgtacgcctggcctgaaggctggggttgcagcagagccggagccgccagtgcgcccgcctgaagcgtgggccagctcgctgctgcctcgcccccaccccaccccacctcaccccaacccagcccgaggagacccacgctcttccgcaagcgagggatggaccccttccggatgcagaacgtgccaggacagcagtttcgatttcctaaggagaaggcttacttcccccggcgtcccggcaccgccggcaatcaagagcctcccgtgctgccctcggggccccgcggctgcacgcagcaccggcgcgggacctgccagcccggctccgcagccggccgcagtcccgcggggtcggcatcgcgggagggacgttgtcataggaaccgcgctccggaccccggcccgagaagctccggagaggctagacaggaaggctcgcgagacccgcggagcccccatgcaaccacgcccggccttcccctcccacggcagcttcgcacggccagcagcgcccccacagctccgtgtcttcccgcgcggctccacaaaaaaaccctaccttccgccatgtctggcccggcactgcctgcaacctcgcgagaagtgcgcggctcaaccggggcggtgcggaacggaatcaccaagtctcgcgagaatcgcgggaggcgcggcaaaaggcggagccgagggtaggaaagtgggtgaatgaaagcggagggggttgctggactctgggggaagcggagagccgggtttctttttaccgggtatttttgaggctcgagatttattaagcactgactgagccctgtcatattccacgtccttggcagggcaccgaaaaggatgacacaacgaatgcagactactctggagaagcttggcaatgagagggtcgagagagggggtttgttggtccttaggtttgtaaagaaaggagaggctgggagaaaggagtcagtggagaggtccctggggaggtaggatgctctgcatgcgatgcagaactcaggaaaacggattaaatttagactagaggcaggtcacctgttattccactaaaacggtaggaaacaagaacatgcgtgcagatatataggggggaagaaaatcagggagatcgtttgatgacatcgattttatgggtgaagttatgagacaaggaaggagaccaagaagagcaaagaaactttggaagaggacgctgaagttggaaggcctggtttcatgtgcctcatgtatgtgttgatggatcacttttttctagaactcagccaccaggctgcagtagcagatattttgaattatagcatttatccagggcttgggattgcattgcccaaaataaattgagggtgctatgagacgacagcccaggccatcaaacgtgggatacagactggctagggactgatggaggagccacgaaactgcaggtctctgataattgaaggccagtgcagtgcaggcaatgttgtgagagcttggtggttaaagtggcaaacaggttcatagtgaagtagcactaggagatgagaaaagtccaggacaggccgggcgtggtggctcacgcctgtaatcccagcactttgggaggccgaggagggtgaatcacctgaagtctagagctcaagaccagcctggccaacatggtgaaaccccgtctctactaaaaatacagaaattagccgggcgtggtggtgcatgcctgtaatcccagctactcgggaggctggggcagtagaatcgcttgaacccgggaggcagaggttgcagtgagccaagattgtgccactgcactccagcctgggcaacagagtgagactctgtctcaaaaaaaaaaaaaaaaagtccaggacagagccacggaatagagtggctgaagtggaagtgagaaggcaggaaaattagatgttgggatttagaggtaggaaaggaaaggagcatcaggagctaaaatctttggtgaatgtggggaggactatacgattagttaagacaattgcaaaatggagggctaaacagtaacatagctgaatagcatgagacctttcttgttttttgttttttttttttttcagagatggagtctctgttggccaggttggtcttgaactcctagtctcaagcagtcctcccaccccaacctcgcaaagtactgaaattacaagcatgagccaccatgcccggcccagcatgagacctttcaaaaaagacttttactcaagggagaatcaaaagaatgcatcaatagttcaggattgcagggaaagtggtggccttggaggacagccaggagtaagagacaaaaggttggaaggaaggatctgaattagctatacctggtggtgcaggcttttagttgtcgctacttgggaggctgaggctgaggctggagaattgcttgagtccaggagtttgggactgcagtgagctctatcctgccgctgcactgcagcctgggtgacagagcaag

SEQ ID NO: 1243659 - DNA, 4001 bp, Homo sapiens
tattcacctaaagtttccccctccagggatatggtagaaaaagtaaagacaaaaactgggtgcctgccgggcgcgatggctcatacctgcaaccccagcacttagagaggccaaagcggatggattgcttgagcccaagagttgggagaccagcctgggtgacatagtgtgacctagtctctctcttttttaagacaggatcttactctgtcgcccaggctggtgcagttcactgcaacctccgcctcccggattcaaatgatcctcccacctccctagtattactgcgaggaccacaggcacccgccatcactccattcactccaggctggagtgcagtagcacgatctcagctcactgtaacctccgttttccgggttcaagcgattcttgtgcctcatcctcccgagtacctggaattacagacacgtgccaccacacctggctaactttcgtattttttgtagatacgaggtttcgccatgttgcccaggctgctcttgaactcctggcctcaagcgatcctcccacctcggcctcccaaagtgctgaaattactagcgcgagccaccacacggggccaagaccttgtctacacacacacacacccctttttaattagccgggtgtggtggcgagcgcccctggtcccagctactcaggaggctgaggcagaaggatcgcttgagcccaggagactgaagctacagtgagccgtgaccgcgccactgtactccagccggtgggacagagcgagaccctatctcaaaacacacacacacaccccccaaaaccaactgggtgtcagtcacagctatctctgtaactttgcctaaattcctttatcaataaaggcaaatacacacgccaggcctccttcacgaggttatctgaagtctaatgcaaatgagaaaagccgaccaactgtcaggtgctgcccaaatctaagatccatcaagtgatgggttcagtcaaagctcaaaaccaacaggaaaggtcgtggccaagcacactgcagtcactcaataaacaaaggtcaaataaggaatactgttctccaataatggggtgaagaggagaaccaggctgcccagatccaacaatgtccctgcacgattcctgacaggtaactccccgtctctgggccttctttccccctacgtgtacaataaggctttgacaatgaaggcttctaattactgctacattaagacaggcagactctgagagaccagagtgccttaagctgcaatgtcatgaaaagtgcacgagaccagagggtaggcactggacggggaggcaaaggcacagaggtctggtttgagcagccctcttgtgagcagtgtgaccttggccaactcccttcccgcaaaccccttcctcccgtcttcatctgtacgcctggcctgaaggctggggttgcagcagagccggagccgccagtgcgcccgcctgaagcgtgggccagctcgctgctgcctcgcccccaccccaccccacctcaccccaacccagcccgaggagacccacgctcttccgcaagcgagggatggaccccttccggatgcagaacgtgccaggacagcagtttcgatttcctaaggagaaggcttacttcccccggcgtcccggcaccgccggcaatcaagagcctcccgtgctgccctcggggccccgcggctgcacgcagcaccggcgcgggacctgccagcccggctccgcagccggccgcagtcccgcggggtcggcatcgcgggagggacgttgtcataggaaccgcgctccggaccccggcccgagaagctccggagaggctagacaggaaggctcgcgagacccgcggagcccccatgcaaccacgcccggccttcccctcccacggcagcttcgcacggccagcagcgcccccacagctccgtgtcttcccgcgcggctccacaaaaaaaccctaccttccgccatgtctggcccggcactgcctgcaacctcgcgagaagtgcgcggctcaaccggggcggtgcggaacggaatcaccaagtctcgcgagaatcgcgggaggcgcggcaaaaggcggagccgagggtaggaaagtgggtgaatgaaagcggagggggttgctggactctgggggaagcggagagccgggtttctttttaccgggtatttttgaggctcgagatttattaagcactgactgagccctgtcatattccacgtccttggcagggcaccgaaaaggatgacacaacgaatgcagactactctggagaagcttggcaatgagagggtcgagagagggggtttgttggtccttaggtttgtaaagaaaggagaggctgggagaaaggagtcagtggagaggtccctggggaggtaggatgctctgcatgcgatgcagaactcaggaaaacggattaaatttagactagaggcaggtcacctgttattccactaaaacggtaggaaacaagaacatgcgtgcagatatataggggggaagaaaatcagggagatcgtttgatgacatcgattttatgggtgaagttatgagacaaggaaggagaccaagaagagcaaagaaactttggaagaggacgctgaagttggaaggcctggtttcatgtgcctcatgtatgtgttgatggatcacttttttctagaactcagccaccaggctgcagtagcagatattttgaattatagcatttatccagggcttgggattgcattgcccaaaataaattgagggtgctatgagacgacagcccaggccatcaaacgtgggatacagactggctagggactgatggaggagccacgaaactgcaggtctctgataattgaaggccagtgcagtgcaggcaatgttgtgagagcttggtggttaaagtggcaaacaggttcatagtgaagtagcactaggagatgagaaaagtccaggacaggccgggcgtggtggctcacgcctgtaatcccagcactttgggaggccgaggagggtgaatcacctgaagtctagagctcaagaccagcctggccaacatggtgaaaccccgtctctactaaaaatacagaaattagccgggcgtggtggtgcatgcctgtaatcccagctactcgggaggctggggcagtagaatcgcttgaacccgggaggcagaggttgcagtgagccaagattgtgccactgcactccagcctgggcaacagagtgagactctgtctcaaaaaaaaaaaaaaaaagtccaggacagagccacggaatagagtggctgaagtggaagtgagaaggcaggaaaattagatgttgggatttagaggtaggaaaggaaaggagcatcaggagctaaaatctttggtgaatgtggggaggactatacgattagttaagacaattgcaaaatggagggctaaacagtaacatagctgaatagcatgagacctttcttgttttttgttttttttttttttcagagatggagtctctgttggccaggttggtcttgaactcctagtctcaagcagtcctcccaccccaacctcgcaaagtactgaaattacaagcatgagccaccatgcccggcccagcatgagacctttcaaaaaagacttttactcaagggagaatcaaaagaatgcatcaatagttcaggattgcagggaaagtggtggccttggaggacagccaggagtaagagacaaaaggttggaaggaaggatctgaattagctatacctggtggtgcaggcttttagttgtcgctacttgggaggctgaggctgaggctggagaattgcttgagtccaggagtttgggactgcagtgagctctatcctgccgctgcactgcagcctgggtgacagagcaagactctgtctctaaaattaaataagaaaaagaaaagaaatttaaaaagaagaatctgagaacagaataagagtgtcagaaacgaaaaggaggatttaaagttggagaagctttaggtgctgttaaggataagc

SEQ ID NO: 1243660 - DNA, 4001 bp, Homo sapiens
tggagaagtcttttctcccagggcattctgcctctctccagtctctgcagtaaaaggaccacccaccctcaggcaagggagtgggactgaggcattctggagattcagccttctgcctagtgatccttggacccctgggaagttcttcccacatgaggcttgtcttcttttgctttcagggaaggaaagcagagaagagccagcagaggctggctggccatgtcttagcgctttgcacatcaccctggaatttcctgttcacacttgcttcaccagaacagagactccttgagggcaggggttgatgccctgtttgttcatctgtttcctgggggcactgtgacccactctctttaacaggcttctcgtggctgcagagcactgcctttatgatagataaacaaagacagggtctgaggagttcagtctgaggagaaactcggagagtgctggcataggcacaggtaacaggaagtggccacccagaccggcccagaggcctgcgggcacaggtcactcgcatatttacagggactgccatgcagagctggatgccatgcaggcctgggggctggctcagcgtgggacttcagagacacatcctgacccccagcctgctcagtccgatggcctgccctccacctccatgcttcccttggcgattgcacagctcctcagactgaacttctcatgactcaataagcagccctcagaaggtaaattcccacagcgggcaactgcgctaaccacccccagcccatggccccaaggtctcagacccagtccaaaactggggttctcagcctgcagcaagccatgggacccgggcccagctctggctcttgcagcccaccctggaggcggggggtcatctctgccatgagtgcctacctgtggcctgggtgccaagggcagaagtggcaatctgtgacctgtgcctgcctttgttctgaagcatggccagaagacatcctgaagcatggccagaagacatccccccttcccctgttttctggagaccactgcccagcccaaagctggtgacccacgtggccttactgaccagcagaaaccagggagcccacctggtgcgcagaacctcaagtccttccagcagccagggcccctcagcttcctctgcgcctagaaaccaggccccagcaccagagggcaggagagcgcttttcagcacctggacaaggcccttggggcctcccaagagggtctttctccactccctgttcctgagctggggctgggctctgagagatccaaggatctgcccagtttgagagctaaaagagaaagcgctcaccgttggggagagggcgctgggtggggctggggtgcctgggagtgtgacacagcctcttccccattcttgacctatggccccctccccacgcaagcctttcccacctccgcaccctcactcgggaggtgtcgccgctcaactggctggggcggactctcccaccacatggaacaccgacacagcccgcagcccctccctgcagccctcactgccccggcggaggaggggcacagaggcctctactctcatctaggtgagtccgaaacacgtgtggtcccgcccgtcccggccggaggggatcaccctttcccggtcaacaagcacaaaagccgcggccgcaaacaaagacgcgccgcaaactcgccagggaggcgggacagcccgcgccgcaccccctccccaggccggacgggcgtgcccggccgcggggtccccgcggcgccccgaaggcgctcctacctggcccgcgcggacctccttctccagctcgcggtggcggttgtgccacacgaggtagtgcagcggatacttgccctcgggccccttcctggcggaggcgttggcggggatcatcgcccgctcctcatgccggggccgcggcgcccggccggggaggagggacggcgccggagccggggcccggggccgcggggcggggggccggcgctgcctgctcgcggggctgcggctcgggcatgtgcgagcggcggcgggcgggggcggcgcgcccggcgcggtgcgggcggcgcgggcgacgggcgtcctcgcgaggcggcggcggcgggcggcgcggagaggcccccacccgccctgggagggagcgggcactcggcggcgctgcgcggactcgcgctcgcctcccacacccccgcacacaaagacgccgctcggcggagggagcaggcgcccgcagcgggcgcgggggcgcacgggacgcgggccccggggacgccgccgcagggacgcgcgcccgcagcccccgggtccccacagctgcatagcccggccctcagcccgagcggccggcgcgggatacggggatgtggggatgatggggagagaggaaggggaccaggcgccccgggtagagcttgtcagctcagccccgcggcatcatggggtttgtagtccgcctcgtgaaactgggggtggcaggtggccgaagagggtctgcactgtccccggatctcgtgggagagtgggcggggagtcaggcctggcccagacgcgggcggggccctgacgccaggtgggctgggacgcacctcccccgctggcattttgccttttgctggggaagtgggggggcacgggcctaggtcgagcgtttgggagacggggtggaggtgtggtcttcagaattgagcttgggtcccaggggccatgaagaaggatccggattcccagaagagagcgtctgattgggaactcctgagaaaggtgtggggcatcagtaccaagggtcattggagcagccaggggtctggcccctggaacatttctgaggagtcttccctgccctgttagaaaattaaactccatcttccacacatgtcattggaaacagaatgtccagtaacgcgggaaagatggtccctttccccccgcacactgtccccagcaagaaccagagtgaggttggacagaaaaagcagcaggtggcagctccgttcctccacccagctggcccttcaggaagggaagtgactgattccagagactgtctccttcctgaatgaccccagggtgaagaggtacttccagaatggtccctgcagagggtgtggtaaaagttgaattggcctctcaagcgccaattgcaaggcctggaaggaccaagaggcttggaccagtccctggagggaggggactgtgatgtcagagagaccagagttcgaatagctccaactgcctgaccttaaaagagcaaactgcttaatttttccgactttctcggtccactccccttcaaaatgagaatctagatactacctcctggggtgagctaaggataatgactgccctggaaacagcgcctccctcccccaaccaggcgggccgagacaggtggcgggaccaggcacggtgccttcttgagcccacctcagaacaaggcaggaataagggattccacaccggccctacttaaaacaacaatccaagaagtgtttgtgtgggaggtgccagcaaaagcttgcaaactctctcaggtttctttgtgtggtcttccctccttcctcctccacaccctgtggtgccaggccccagcgggaagagatgagggaggagcgggctgcctcgcccctttctcccgcctgggaggagccagctggcgtctccgggggcccgggaccgctgcccgcctgcaccaccaggggtcagcagagtgtcgtggctgcagccagtgcaggggagggggctggcgcggttgaggggcatctaggagtggccgggagcatgcctgtgcatttccttattaaattgtttttcgaaccttgtgtgtgattccactgtagcagtcctgcttcctggggtggtgacatctccacgggggaatccagaaacccttttatctccagtcccaggcccagaagtttggctgtgacggggctgggggaaacaaagtttggacgatgtgtccgcgccagggccactcccaggtagtctctgagccaaccaggagatg

SEQ ID NO: 1243661 - DNA, 4001 bp, Homo sapiens
tggcctcccaaagtgctgagattacaggcgtcagccaccgcgccaggtccaggtaggtagacttttgaggcagtctggaaaccatggttctggtgctatcatattaatagttatgtggcctagggcaagttattctctgtggttgagcctctctccattgtccctttcagttccaaaatggatgattccacttaaaaaaacaaaatgtaaactcacttttttttttttttgaggtagagtcttgctctgtcgcccaggctggagtgcagtggtgcaatcttggcttactgcaacctccgcctcccaggttcaagtgattctcctgcctcagcctcccaagtagctgagactacaggcatgcaccaccacgcccagctaatttttgtatttttagtagagacggggtttcatcatgttggccaggatggtcttgatctcctgacctcgtgatccgcccacctcagcctcccaaagtgctactcactttaactctaagctagcaaaatagtctggctaagcattacctgaatcaaaattttaaattttaaatgcagagagcggaataatgccacattcagtaactttctgttttgaccaccagcaacatcttaagatgagactccttatttaattgggaagaattcaatctgcaggcagacatctaaagtcttgggtgacattctgtatttgaaattgtaataagaaaactggccaggaacggtaggctcacatctgtaatcccagcacttttggaggctgaggcgggtggatcacttgaggccaggagtttgagaccaacctggccccatctctaccaaaaataccaaaaaaaaaaaaaaaaaaaattagccgggtgtgggggcgcgtgcctgtattcccagctatttgggaggctgtggcaggaggatcacctgagccggggaggtagaagttgcagtgagccgagactatgccactgcactccaccctgggcgacagggcaagaccctgtctcaaaaaaaaaaaaaaaaaaaaaaaaaaaaagaaagaaaataatcgataggataaacaaatgagttttccctcaaacaggcaactacaggcagcagcagcaaatcggttgcagtgaaacaacagagaagcagaatggtgatgcaaatgtgtttttttttcctggtcttggctaaggaaatcgtgctagtttataaaattcatatttgctcagttgcttatgcttttagctctgcaagatgcgttctccagaagcacctacggcaaattaactcaacactcgaattggggtgagctccaacgcatagtcgctgagaatcactgcctccagcaccgctctgaccaagtgagccgggagcgcgggggaagggggtagggcaccagagtcccagtgggcgctgccccgagtggaccacgtgggccgggatttgggcaggacgcgctcccgaccgcacgaggcatgggggccagggctggcctcaagagagcacaatctcggaggcccgaggtggcaggcctcgccgtagccaggcgtcccgcgctgggcccaggtcgcgactgactgccccacgccttccgaccggctgccctgaccctaggcctcccccgctccccacttaccagccgttgacctcattttgggagttcacatccaccccgctctccaccagtttctgcacctcccgaatgtcccctaaggccgcggcctcccgcagcctctcctgctgctccttctgctctaggagggcgttcatcttcccacagccccaggcccccgcccaggcccgcctgccccgccccgcccggggcctgtcagcgccgccgccgtcgccgcggcccgctcccggccatggggagggagcgcggaactcgcccgccctgctcgcgccgctgcccgcgcccgccccgggacttccgctccctcccgcgggccgcccctgctgctcccggcccgcaggcccaggcctcctcccgggccgcgcctcccgaaggccggctccgggggaccctgttcagtgtgacaacgctgacccagatattttccgttccgacccggggctccggcgcccgggctggctgtttatgtaactactgcacaatattatatgccatgattcattgactatttttagacttccccaccccgcagtttcaagggaggaggacaagacacatgaaaagagaaaaaagcatagctgagggccagaaaagccttatcctctggtgcaggctgtttaccaggcatccaaaataattggtgggttctttttattgggatttggggtttttttgttattttcccccagtttggttggctccttttccttatctgagccaattcgtgcccagcaggatggggaaatgggctgaaaacgatcctactataatacgcccattattacagagatagattagactcttcttctttttgacagtgcttggggacaattcagttagaatatttatttcaattgttgttgttttacatctcattttagacaggatttcttctaacctggctttcaggaaaaatatttatattgtgctcacagtttatgaactgtaattactgcttacagattgtaattagttactcttcatgaaggccatataaggagaaaagaaaggaaaaacaccaaagaggctttggaggtgtcctggtcctgattccaagtgctctgggaagagctgtggtgtacatgtaaacagcattttgcttcacttcttgcccgatctatctaatgaggctcagagcctcagttggcactgttttatacccagtgggagaaaaaggaaatattgttttgttgagcccaggtgccctgaagagatcctccgatgtggcacaggatggaactttacagatggggtcaagattaaggaaatagccctggggaggaagggaggaaggcctgaacaaggagagatgaaataggaagggataaatttaggcatggagttttcatttccgtctcttggggctgctgggatctgcacagcaagcatttttcttgctacagtttaagaaaaaccaatgtctgtttgtttagtatgatacagtaattcacacagtacacagtgcacaccaggtggtgctgaatataaactgactacacacttaaattgacccccatggcaaattgtaaccctgcttgagcttacattttcatttgttcccccaatttaaattttaattctcacatccagcatgatactctatctgaaactgatgtgtatggcactggatttgagtccttcaacacaatttcagtgacatgggagtaggtagtggcttgttgtttttgtttgcttgtttttgagacagagtctcactctgttgcccaggctggtgttcggtggggcgatctctgagctccttgcaacctctaagtccaggttcaggcaattctcctgcctcagcctcccgagcagctgggattacaggcctgtgccaccatgctcggctaatttttgtatttttagtagacatggggtttcaccatgttggccagtctggtctccagctcctgacctcatgtgatctgccagcctcagcctcccaaagtgctggaattacaagcatgagccaccgcgcctggcctgtttttgtttttttgttgttgttgttttttgtttttaatgcagttaaaaaaaattgttcgtgactgcaccccaaagtctatgagttcttttttttttttttttttttttgagatggaggagtttcgctctcattgcccaggctggagtgcaacagcgcgatctcggctcaccacaatctccacctcccaggttcaagcgattctcctgcctcagcctcctgagtagctgggattacaggcatgttccaccatgcctggctaattttttgtatttttagtagagacggagtttctccatgttgctcaggctggtctcaaactcccgacctcaggtgatccgcccgcctcagcttcccaaagtgctggaattacaggcatgagccaccgcgcccggcccccaaagtctat

SEQ ID NO: 1243662 - DNA, 4001 bp, Homo sapiens
tgaccctcagaattaggaagaagcaaagtgctccaactccagccccattgggccagttcacccacccagtgtcacttgaggctaaggcaatcatgcccagccattacatttaaactagtttcacaatcatagcaagtcagaggggctgggcgggggaactcttttcaccttttaccagatacccagtagcccagtaccagactcactgcactgaatatgctcaaacagtccctgccctgttgccactagagctgtggtgttggaacaccctgctcttgccacttgttatttcagcttgacctgggagattcccttcccttccctccaccccacctgaccccgcccccaagtctccatcctcatcccctcagcactcacctgccacatccaggtccagcttgaagtggaaggcatgtgtgtgcaccgttcccagcactctttcccccacacggttcccaaagaggaggccctcctctccccctttcaggaaagctgtgttgatataacccgtggcatggacccgcccttcaagtgccccatttgggtacaacacaaagtcccaaatgtagtcatagttgcccacagatgacacagacctgaccacaagggctgagctggccaaaccaccatagaaatgattttgaaggtaattgtggtgccttcgaaggggcagtccctgggcttcctcaaatacacacacagcccctggaagcagctggactgcccctttgcccactaatatatggatgtccaccatcgtggcttgataggggcagtccactccccgcaccaagcctcggctgttacggccgagtccaaagctgctatccaaatagcgagtcagcatcgtcttgggtgaatcggcaccatagatagatacacactcctggacactgacttcataggctattcgctcaccctggaaccgaacatcaaaaatcctcaggccgctgaacaccccatggccaaaggtaaatgaccagagggaggataccaccaggtttccttgcacactgtactgggaaccctggggcgagaactgaagagggggaagaggacctggagagttccgagacctcagggatgaagctccatttggtggaggtagagggactctaaccacttccaaccggccagacttaaactcccgttccaactggcccaagtctgcatagtagtgcccaaggtagaagacctgctggacagtccagtgggcagggtccagggccctgtggtccagtagtagctccagccccacggggtgaaggaaaagaccaacccctgagatgttatggtagagggccatccaggtagctcggtcccctgagcgcaagccccgaggggtggcatgcacagctgccagggtagagccattgtagttgaaggtggacgacaggaagatgggtgccttgggtagctccacctctttcagatgcctccacatctgtgtaaactcagctctcagcaccgggcgacggtgatagggcaggggcccgccgtgacgctccacagtcacatcccgcatgtacgaggggtgaggcagcggccccaccaccagctcactcacattgggttggggttgtccaccaaagaggacgatggccagtgcctcccgggcaggtggggggctccccctgtccaggtgggccagggctgcagccttggggggcagctgcagctccactgagaagatgcagttgtccgagggctgagcctgggctgcgtccaccagccctggccccagccgctgggtcagaaagcgcatcacagctgtcaactcctctcggctcaggtctgcaaacagctggctctggccagggtgtggccagggctgggccctatgggatacagaggggcagtggggaggctggctggaaccacctgggctggtcagcaaaacataggccagggcaaagatggtaatgagggacagtgccaggaacgccaggactatcttgagatgcatggtggatgctgagagctgaaatcagaattctaacagctgctccttccagttactgacatcaagtcggggtttatattcgctaggatggataggaagggagaaaactccaccccatgggttgggcaggaaatttctgaccttgatttatgtaattctgttccaattttctgtcctgtggtttggcccagggcactgcttccacatgcatagcctcttccttgcccctgaactcccactggtagcagtcagtaccaactactgatttccatcatttagaccagatgaaagggaatctgggttaacgatgctaacctccagtttccacctggaatgggtctcaggaagagtacaaacctcagatgcccaattaagttctgcagcctgcatgcaagcactaagctgtccattttcctacctcctggcaggaactgcatcccaacagctccaggattcactgccatgttcagcagtaagcactgaattctacttgttgcctaatgccaagcccttgatttgtagtcaggccatttccaaccagtggagtggctgagggcctgggcttagtaatcaggtttgtccaccaatcccagttccctcagctgtgtaaccttagcggaaatacttatcctgagtctcagtgtcctcatctgtaacaaatagatacaactatcctatagattcctgaagattaaatgtgatcatgcacattaggtacttaacagcctggcacaggggaggcactcacaaaccgctagcttttggtagtcatctctgaaacagaacagagcagctgctcctccattgttcaagaccttaaactctttttacagagacaacgaggggatcattggaaaccagaaggctacttgcaaggtggaagatgaggaaactttatttcagagggagatagattcctaggcagccctccaagtaatttgaaaaccaaaactaggagtctcctcaagaaactgaagacattattcaggaagaattagtataaggtaaagaaaatgactgggtaggacgcgccttgaaccagttcattccttacacatggaacgatagcagcctctactggcagttcatgggtatcactcgggaaggaaggaactaggatcttctgaaagtagggagagaaggcagcttaggtctgggaagagctaactttcccataattcagactgaacacaaatgaagcacccaaccttgctcagtaggcagaagcctcagtctttccactatactggggaaaagattcagctcaactggcataaggacacacaacagggtggctaggtgtccatggaggtgggtgtccaagcgtgcacacatatgagcatgagtacatccctagccaccagagcattgcaccagggtctgcggctttagaaagaggtcaaagtacctgtatttttaataatttcttgacatggtaaaagaattttacattacgatccatgggtgatagggtgaggaggaggggcagtggaacagtccaacaaacgaaacgggaaactgagaaacacatggagggaagggggaagggttttagctggaagggatctggagggtgggtgggagcactgcccaactaaaatgcaattggtttgttactgagtactattcgtgggaagacagcatcctgactccctctctacagaatattgggagtaaaaatgatgcatccccggtggaaatattattgggggttggaagacagagacaggaaaaataagtcagaaacagacactaagagtcactggcaggctgactgcaggtatcaactctccagccgtggtagaataaaagagctaggggctgaaggggattaacacaaaagctgttaacaattaagtgatatctctggaagattcgagagacaggaggcaactcttctatagttttgacttgcccagcacatttccacatacacaaatgtgtatatgcacgtgtgtgcatgcacatacacatacacaccaatgattgctttccccggaagcccgacactataaataaagagaaatagttcccaaaa

SEQ ID NO: 1243663 - DNA, 4001 bp, Homo sapiens
agctcggccatttcccaagatctttggatgaggtcacgtagaggaaggctgcagctttgcacccagccagtgagctaagatccaaataaaactcagcagccaactctctcccatccagcaaaaggggaagtacaaaaatccacgtcttcctttctgggataatctacataaaacccaaagctaatggaaacaacttttcagcccttcttccagaagccttctccccaccaaaatgtcttacctgctacatccagatccaccttgaagtgggcgctgtgggtgtggaccgtgcccagggtgtgctctgacacttggttcccgtacttcccagtagcaccaaagaggaatgccgagctgatgtagcccgtggcatagaatcgtatttctatggccccactggggtggaagaccgtatcccacacatagtcatagttgagcaaggtggacatagatctgacgaccagcaccgtttccgcaagacccccaaagtagtgcgagtagagatctgagtggtgtcgccgcagggggaggccctggttctgttcaaacacacaaaaggcatcacgtattgtcttgggggcctgggactccaaaaggaagtgccagtccacgtaggtggccaagtaggggcagtccaccccacgggtcaggggcgtggtgtacttgcccatgccaaagcctccatccacatagcgggtcgtcattgctgctggggaatttccaccatagatggccaaggcctcttggaggcttatctcataaactagtctttctccttggaagcgaacgtcaaagatccttgggccactgaatgctccgaggccaaaggagaaagtccacagtgaggaggccactcgacttccctggacactgaagcgggggccttggggatagaactgtagagggggagctggacccgggggcacaggggacttcagggaccaggacccacctgtgccattgtctgggatcagcaccacattcaccaggccggcctcaaactgggcctccagctgggccaggctgtcgtagtagcggccttgatagaacaccttctggatagtccagcgggcagggtcaagggccttgtggttcactagcagctccaagcccacgtggtgcaggaagaacccagcgcccgagatgttgtagtagaggccaaaccaggtggcccggtcccctgattgcagaccacggggagccgtggtcattgtcaccaggttccgtccccggtgcttgtagaagcaacagtggtggagaagcccagaagcctggggcagctctctgttgaagatcatctggtctatgtccaggtactcttggaacagcacggggcgtcggtgatagggcagggggcctccatgacgctccacagtcacgtcccgcatgtaggaggggtgaggcagtggccccaccaccagctcactcacgttgggctggggttgcctgccaaagaagacgatggccagtgcctcccgggcaggtggggggctccccctgtccaagtgagccagggctgcagccttgggaggcagctgcaactccactgagaagacacagttgtccgagggccgggcctgggctgcatccaccagccctggccccagccgctgggtcagaaagcgcatcacagccgtcagctcctctcggctcaggtctgcaaacagctggctctggccagggtgtgtccaaggctgggcactgggagatacagaggggcaatggggaagctggctgggttcacccccatctccacccctgcccaccagcaggacacaaaccaaggcaaagatggtgatgacggccagaatgaggagcacgaggattgtcttctggttcattttcccacgaagagggacagctgattcaaccaaaggagagcaatgtattctcacgccagcaagacgggggctctgttggctcctggacggggtggggggctcccggactctggctgaggttcccggtagtcagatgcctgggactaagggtgggaaggacacaggaaggctagggcaagggggcggggtggccggggttggaggcgggtctgaacagctgtgatttccacagaccttacatggttttgtcttccagcctccaaatcactctactttctgggtcagggttggagttggggagagttggggctagggggaaggggaaggaaaatttcaagataatgcagcactgggaaggagcaggatctgtgcagagcagcctctcctgacctcagcccagcttcttccccagtcccccacttagtcagggccagatattttcctgtaacttcaaactatcgttttccttccaaagacccccaccccctgcccctttagctttccaaatgacattccttggccaggtctatcccccttgccctctggcccccagcgctaatttccctggccagactccttagtattctccagaggactctagatacttaacaggtcaaacaataaattcaagtaaaattcctctaatactttttattataaattacatacaacatctgttttacaaaattctatctactcttccttttgaatgcacatgcataaagagatgtctgatgtaatgtgaccacctatttctgagtagtaggatttgtgatatttttctttgaatatttaaaaatcatttttataatttaacactttagagatgaacaggaagtaagaattaaccaaagggactgatgggggtttcgtgtgagaggaacattgagggggtgggaatctggggagcaggtgtgataaaaacacggagaatagaaagtagaaacagggaaaagtacatgtgcctaaccacgccgcccgccacaccctcaggactagaagccgtggtaagagaaagggggtaagtccgggacacaggctgccaggtcggggaggcaggccacaggattgatgctgcagagcccagcatcctggcccttctcaaagtagacactgccaggggagaagatggaggggtcctcatcaaagaagttatagggtcggagcaagaagccaactctgttccccagagtcactgtgtttgggatgtcctcggcatggggaatgtgcaggaagctggctgtgacccaagccaccagatcctgcaagaagaaggaggagctggaggactatggaagcgtgacccaaagaaccacccttcagtcacaatcccagcctccagtctcagcctggcttccactctccccagcctcatgcccatacaacacgtggagcaatccatgtaagcagctgtgcggggagaggggggagccagtgtcccagagctaatctcaccccaggagggatgacctgtgttggtcatcagaaaactccatggcctctgaatctgcgaactggaaatcagccattccctctaacctttggccagaggctgggcagccaagatgccatgcccacaggtgtccctttcctatgtccctagggcaaccaacctctcctaagagggtttcattgttgatgaagtcagcaaaggtaactgtgggtgtccagatgtcattctggtgatagatgctactgctctgtgactcctcctcctttctctgggtcaccacaagctggtatctggccaggaatcataagaaggtggttttgggaaatgtcaagtgcctttactggcccaggagtcccttagatccgattctgtgtgagaccatttcccaccgtgtatctaacttgggtttgaggggaggtacagggatgaatggtagccgtgggaagggagtttgtctccaaggactggggcaggggaggggctgtcctttccttccacccaggccagggccctcctcacctcccccagctgagggccctctccatgtcactctccaggggtatgtgtatgccaagggggctgtggatctggattcggtacccgcgctggtgaccccacgcattagtctggttgctagccaggtagaggtagcggggtagggggcttcccaaggaaaaagctgtcaggtcctcctttcccaggacctg

SEQ ID NO: 1243664 - DNA, 4001 bp, Homo sapiens
ctcccatccaaaacagaagagagttctcactcctgggctttagcctccaaggggaaaatgtgcccatcatggtttctttggataactagaaaaacctttggccaggcattgtggctcatgcctgtaatcacagcactttgggagaccaaggagggtggatcatgaggtcaggagttcgagaccagcctggccaacatggtgaaaccctatctctactaaaaatacaaaaattagccatgtgtggtggcgtgcacctgtaatcccagctactggggaggctgaggcaggagaatcgcttgaaactgggaggcggaggatgcagtgagattgctccactgcactccggcctgggcaacagagcaaaactccatctcaaaaaaaaaaaaaaaaaaggaaaagaaaagccttcctgagagagctctcccctcacctacagtgtgagctgagtgtccgccaacactcctttcccactctcactgcccccctcctctctgactgcccgccactcacctctcccagctgaagcctctcgccatggagctgttttggggcagcggctctccagcaaagctgagcatctggatgcggtagccccgggggtgaccccacttgttgctgtggttgctggccaggtacaggtagcgaggggtggcgcttcccacgaggaaggcggcctgctcctccatctccagcagcttccgggtcacctgcagcctctgcagctggtgctcagggctccagggcacagccatggggacaaagaccatatcctcggcccagacccagttctccagtcctgctcagggtgggataggggagggcctgtcaggcaactgccctggcccctctggactctgcccccatctggcttcagagtgggggccaaagagcagcccagaactgagtgtgcccctccttctcttccctctccccaggatacctccaatcctttagccaaagctgttgacctgtaaattaaaatacttcatcagggagttcattccatttcactcattcattctttcaacattcattagcagagaggactgtactcgtccctggggatagagatgaatgatcatccttaccctcttgctttccacgcagacagacaaaccactgactggcctgtcctgtgagaggagcatggcctaggcaacttccggatcacaggaatacagttgcaggcaggaaaagggggcccttccgggcaacttttcagcctggccttaaaggacattaccagaaaagatgatatggaaggacattctaagcagagacaaagcataagcaaacaggaggatgcctgactgtaacatgtgaagtgcgtgtccagggacatggagaatttgggtgtagctgtgcagagcacagcaaggcagggtggagctgcaccgtgaaggaaagagttttgagggggttctgcagacaggatcccacaggtgatgacgaaagtgagagctgagtaaagggcaggctggtgtggatgggaggccctctgggtgcagagtggctcttggctctgagagcaacaagagcaaaaacagcagagagagggctggcacctgcacggcatgacagtctgacctgccgagatactgcaggtgcaaaacagaaacaaaacaaaataaaacaaaaccaaaaaaaaacacctggtgactgactcaatgtggggaaagacagtgaaaagacaaagatgaagactccaagccatcatgtagccttggctctctctgtgaccagactccaggatctatccagaatgctccacgggatccatgtgacccctcacacttaggtgaattgtgcccagagaaagaaggaaaatcagggaggagggtccatctccaaaggaaatgtacaacctggaatgactgacctgcacatgccagggacgtggtagaatgcaaagagatcctccaaaacaccaccaccacaggccagacacagaactgagctgacaaacagaaggctgctcccagcagcagagcccatataagtacaagggagagaagagggcaatggggacactgttagcccaaatcctgcctcctccctgagctcggccatttcccaagatctttggatgaggtcacgtagaggaaggctgcagctttgcacccagccagtgagctaagatccaaataaaactcagcagccaactctctcccatccagcaaaaggggaagtacaaaaatccacgtcttcctttctgggataatctacataaaacccaaagctaatggaaacaacttttcagcccttcttccagaagccttctccccaccaaaatgtcttacctgctacatccagatccaccttgaagtgggcgctgtgggtgtggaccgtgcccagggtgtgctctgacacttggttcccgtacttcccagtagcaccaaagaggaatgccgagctgatgtagcccgtggcatagaatcgtatttctatggccccactggggtggaagaccgtatcccacacatagtcatagttgagcaaggtggacatagatctgacgaccagcaccgtttccgcaagacccccaaagtagtgcgagtagagatctgagtggtgtcgccgcagggggaggccctggttctgttcaaacacacaaaaggcatcacgtattgtcttgggggcctgggactccaaaaggaagtgccagtccacgtaggtggccaagtaggggcagtccaccccacgggtcaggggcgtggtgtacttgcccatgccaaagcctccatccacatagcgggtcgtcattgctgctggggaatttccaccatagatggccaaggcctcttggaggcttatctcataaactagtctttctccttggaagcgaacgtcaaagatccttgggccactgaatgctccgaggccaaaggagaaagtccacagtgaggaggccactcgacttccctggacactgaagcgggggccttggggatagaactgtagagggggagctggacccgggggcacaggggacttcagggaccaggacccacctgtgccattgtctgggatcagcaccacattcaccaggccggcctcaaactgggcctccagctgggccaggctgtcgtagtagcggccttgatagaacaccttctggatagtccagcgggcagggtcaagggccttgtggttcactagcagctccaagcccacgtggtgcaggaagaacccagcgcccgagatgttgtagtagaggccaaaccaggtggcccggtcccctgattgcagaccacggggagccgtggtcattgtcaccaggttccgtccccggtgcttgtagaagcaacagtggtggagaagcccagaagcctggggcagctctctgttgaagatcatctggtctatgtccaggtactcttggaacagcacggggcgtcggtgatagggcagggggcctccatgacgctccacagtcacgtcccgcatgtaggaggggtgaggcagtggccccaccaccagctcactcacgttgggctggggttgcctgccaaagaagacgatggccagtgcctcccgggcaggtggggggctccccctgtccaagtgagccagggctgcagccttgggaggcagctgcaactccactgagaagacacagttgtccgagggccgggcctgggctgcatccaccagccctggccccagccgctgggtcagaaagcgcatcacagccgtcagctcctctcggctcaggtctgcaaacagctggctctggccagggtgtgtccaaggctgggcactgggagatacagaggggcaatggggaagctggctgggttcacccccatctccacccctgcccaccagcaggacacaaaccaaggcaaagatggtgatgacggccagaatgaggagcacgaggattgtcttctggttcattttcccacgaagagggacagctgattcaaccaaaggagagcaatgtattctcacgccagcaagacgggggctctgttggctcctggacggggtggggggct

SEQ ID NO: 1243665 - DNA, 4001 bp, Homo sapiens
tgagaggtgccaaattcatttctaatcaaatattcagtaataatgcaaagacaatagcatcatcaggtattaccttgctcataagaaattatgagacacaaaagctaaaatcacctgtgatttctatttaaacataacagactacaaagtagcttcttaatattataacgaagcaaaggagttcaaaagttttacatctaattcttaaccaaaataacattaaactctggaaaacctaaggctagaaggaaagaaaggacaagagaaaggagaacgtgccctatttaatatattccttgctcagcttcgttcaaacctgtgcctaaaaagttagtatttcaaaatatggatcttttaaggaaagaaagaatgaaagaactggacttccttgagtttcttcatacacagtcagaatattagatttatattgattttaccacccagcttttagtgaggatgtttgcattatacatcatcctttctgcttccttgaaagtttcaacggctaagatactgcaaacagttctcaccttaccagcacgcttagtcatcactggaatgtcttaacacgttttcttatagagctgcacctccttcatctgctgctttctattactactttgtaagtgtaccctgaggctaagcaattgaagtatacaaggaaggtaactaatcatttaaattgattctcattgagaccaccttctttcttagtcattctgcctttctaagcttaatgcatttactttcttttaaaccacaatggttatgataagtctttggcagttttcaaaacattttttcttctcaaaagtcaagtttggctgggcgcgctggctcacgcctgtaatcacaaaactttaggaggccgaagcgggaggatcgcttgggcccaggagttcgagaccagactgggctacacagtaagaccctgtcactaaaaatacaaaaataaaataaaataaaagtcaaaagtttaatgaagcatccgcgtgagttcaataaaggcctgtccccccccaccccacccctccaatagaagactactcttgaaaacaagcagcatgaacaaatgatttggattcaaatgataaggaaataacaggacgttccagtttctttactttcagcttaatctacagcctttcccaaaccagaccattactgcagagcccagaaaaagaaaaaaaaaaaaaagatgctgggttaagatttgcccccatttgcttccccctctcttacatcgggtcaattctggaggttactctttccttcctccaagagtaaggaatgcctcttctttccccaggtggtcaagattctagcgatatgctcctccattacggagcagggaagaggttgtctcttaccctcaagttacccgagagacgacgttcgcccatcaatgagcaaacctttgagggaatcccttttccctttggcttgctggacacgtctcagcctctcagtgaacgacgccgagcggggaagaaagacggttccccccacggcctccaggctctatcagccacacccctggcctctggtccccctaaaccctcaattccgaaacacatcttcccctcctgcccccaactacctgctgccacacccgaggattccctcaccgcaccacaggcatcatggtagagaccctttctccaaccttttccctctcaatggtcacacccgacggttccctgcatcatcaacggtcacgctcttaggatttcctcgcctccgccggtctccgacccagcctggtgttacccttctctccgtccccgaccccgtcaattagggacacaccctaaaggcaaccgccctgaactcaccggaggcggaggcgaaggcgagggcgggggtggcggcgggagccggagagcacagcccaggtggtggtgtaatggtttcctgcccgtcacgattcttttctaggtctaagccactgcgcaaaacccactttgccagggacaaagatggtgggcaggaaactctgacgtcagagaacgtcgccgcgtgacgtcatcggggtgcgcggtagacctagaaagcctgtgatctcttgtcgccttccagacccaaagatttcctttggtcccggcaagctagcccatctgggcctcagaggatgttaagtggctactccaaagggatatattttaaaaagctgacaatggatttgtttcctcgcacagaaattctctgaaaaacgtaaacatagagatgatgaaatatcctgttcctttctgaaaaaacaaaacccctcagctcattttccttccaggctcaagggcggacaatggtgatatagcccaggcctatatacgggcagtggggctagaggatagtgctgcacgtaaaagaggttgaggaggcattggatgtgagtttgaatccctaccctgaatgtgactgagacagttaatgtctcatcaaccttcttatctgtgaaatgaagacaatgatagtatctctctcgggcatgtgaagtttaaaccagataaattaggtaaagtgcctagtatataataggtgtgcttacacaaaagtaagtttctttcggacactaagagctagattccaggacctggaactggagaacaagattgatgatgttaaatgaactagctgtccctaaggttaatttcagggtgtaaggaaggatggagagcaaagtgatgatttttctcacattttgcctatgaactctgtgagtcaaaaagtgtttcagtattttaaaacttcattcttaaaaaagtgatcagaagtacattaaaattttgtataacatactcatgtattattatttcctctgttattaaaataggggaataggggaaattagaaagccaggtataaggtgagagaatgcaaacagttatggtaaatcagatagctgcataatgttatagaatattttatgacagaaaattcataaagtgttaagcaaaaaaaggacaccaaacaatacagtatacagtatgactatatatgtatagaaaaaaaaggctaggataggccaggcgtggtggcttacacctgcaatcccagccctttaggaggctgaggtgggtggatcacctgatgtcgggagtttgagaccagcctggccaatgtggtgaaaccctgtctctactgaaaaaacaaaaattagctgggggtggtggcacacgcctataatcccggctactcaggcggctgaggcaggagaatggcttgatcccaggaggtagaggttgcaatgagcccagatctcgccactgcactccagcctgagtaacaaagccagactcatctcaaaagaaaaaaaaaaaaaaaaagcttggatattcagcagaacgttaaaagtggttattgcaggatagtgagagttttatttttcttcctaatatttttctgtatttttcaaagtgttctacaatgaacatgtatttatttctatgttgggatgtgccttttaaatcatattgttgaaaaatatgatacagaaaaatgctttgaaataagaaaaaaaaaaagatacaaaactctaaatccagaggagtatatatacctattagtggttccctctgggtgctgattacaaatgttatcttctttatatttgttttattttccattcctttctctgaaaaatgcatatattttaaggaaaaatgaaccaatactattttcaaaatatagcatcaatccgaaagcttttccaacttcattctcttccacttttgggtgaaagtatggaccaatctcccttcttttcaccttttgggaccatcacgggctcataatctaatgggagaccactcaggaaactgttgacatgatccagccacacgatgatggtggtttaaacaaataactgttgatatttattatgattttatgtcagttactctgctaagtacatttttacatccgcaccacctgataaccaagtaggtactattacttcctctattttaagagatacagagaagttaaaaggtagaattaagatg

SEQ ID NO: 1243666 - DNA, 4001 bp, Homo sapiens
tagcatgatatcatagaaccatgttctaagaaataaataaaagcaaccatttacagtaaagccatagtgagattgatatattttacgttatattattattttaatttgacctcttttcttgtatttcattataatataatatatacataatgtagatgaaatttgtattcatttcagtaactattaagtccgctttcattttcaggtgaagtccaaagatatgatgattccccaaattttgtttttccaaatgtctctttggcatcagttgacatttcaaagcctctccactgttcttttaacttctgtagtgtttctttctccttttgccacaccagatctcatttttaaacctaccctagtttcaggctatgatcttctcctcttctatcaatagcacctattacccttactctctttgcacagagagaactccccaagaccttctcatttctctccaacctggctttctgcagcatctactggccctctgcactctgagcatgacgaggtagcttattcctccaaaatacccagaatccaaatgagggaagagaatgtgagagaaggtactgacttacgtgtacatttcagagtgttgatgggccacagtcctgtgagagggcagataaactttctcatccctcctcgggacacatagcccggcttgcaggaatacgtaatctcttctcctggctcatagaatgtttttaacgggaccactgtggaaaatggtaaatcatctggcttgggacaggctgaaagagggcacaaagcagatggttaacaaatctctatttgcattttaaagttcagctaagcccacaaatgaaaaatgtgtgtactgttaccaattataagcataccaagttgcatgccaaatacctcatatacactatctcatctaatcccctcaacaaccatttgaaggaggtattataattatccccattttacaggtcagtatgctgaggcttaaattggctacgtatcttacagaggagctttacacatggcaatattaaagaatcagtatcaatccagtccctccagcatccactctaaagagaatttagttatcagctgggcgcagttgctcacacctgtaatcccagcactttgggaggctgaggcgggtggatcacgaggtcaggagatagagaccaacctggctaacacggtgaaaccccgtctctactaaaaatacaaaaaattagccgggtgtggtggcgggcgcctgtggtcccagctactcgggaagctgaagcaggagaatggagtgaacccaggaggcggagcttgcagtgagccgagatcgcaccactgcacttcagcctggcgacagagcgagactctgtctcaaaaaaaaaaaaaaagaatttaattattcttcttcttattattattattgttgactgagttttgctcttgttgcccagactggagtgcaatggggggacctcggctcactgcaacctctgcctcccaggttcaagcaattctcctgcctcagcctcccgagtggctgggattacaggcgcctgccatcacgcccggctaatttttgtgtttttagtaaagacagggtttcactatgttgcccaggctgggctcgaattcctgacctcaactgattcgcccacctcggccatgatgcccagctaatttttgtatttttcataaagacggggtttcaccatgttggccagactggtctcgaactcctgacctcaggtgatccacctgccttggcctcccaaagtgctgagattacagatgtgagcaagcacgcccggcctacttatcattattgatccctgacatatacgaaggggttggatatattaattattttttcaaaagcaaaaagtacttactccgtcctgcaatagcaacatggcagagaaaactcgagaacaagatgagcactggagaaatcattgtggatgagtcacactggcactaccaaagtggttttcgtctgctaaaaagacagagccaaatatgaaagcgcttaaacattaaccattttctggtgtacttttatctttgtaaatagaagataaagtatcatgatttgaatggaactctgagacccacattctttaatcatttactttccacttatgtggctctgttatgaaatctttgggagatggtttctgtcttcataacgtttttgttaatggcacaaaacagttcattattgcttttgacagaaacttgttgtttccggggttgcctggacttctcattctccatcttttgttttgtgtatgttgtagatggaacaccaaaagatcgaagctcctgtttcactcacagccttggcatataaactttggacaaacacctactctctgttctcagtctccacctctctaaaatgatgttccagttttcagatgtataattacaaagaatgtcttccaggaggcacttacaactttaattccctacaaactgagctcaacatcctctcttgcaagctcctatagctccagttaggaccttagagctatccttgaattctctatcttctcttacgtcagatcaatacaaagtcctcctcatccattcttaatatgtcttggatctgtctagacaggtttctagatctgtttcaggaatttgaaaattgatttgaaattaacaacttgggactcgaagaagaaaaaaaaacttgagtaggataagataatgggccagtgctgatgttgttgcttgagagggttcggaaggggggttgtctttgattccctagttctcttctacatcatttgctctaaaaaaaaaaaaaaggatatataaatggacaatagccaggccatatgtgaaaacagaactctgacccacacatctgtagcaacaggtctagaaagccaaacctacaacctctatagcagttggcccaacttaaggccaaccagagaaatccaaacatatttctctaaccaatcacatggacacctcacttctagttagtttccttccatcctccccataccaacaatccgttggagcacacctgaagcctttccttttttctattataaagctttcccactcctctgtctgactttgactttgagtctctgccaaacacaactgttaatggctgcctcccttcctatagcaagctctgaataaataacctccgcttgctctcatttgggtgatcttggtttatatccagaggtctaaaattccctgagacacatcagcttgagaaatctccatctgtcaggcagatgattcttaaattacgatcctaatgaacattgtgttccatgataagaagagtgtgctgccactaatgtgaaataacagtggtccttccctatttgtccttctaaggggaaggagattcttgttctctggataattcccaggttccgctttattgtggagaatctccttgatgaatgaagaagaaagaaaactaatgaagtcaggaggagccaagtcgttctgtatagtaagatctgaagtagaaggggaaaaggagagagaaaccaaagaggtcgggcatcagttaaagaaaatttgagaaaaggttaaaattgagacgagaatattttcagcaacagctacaaactgagtgcctgatattgagagaggacaaggagaagggtttttaatgatgtttcctggtggctgggctcccttgcattaggaaacttggggtaggggtgtcgaaatagtttatattctattttaggtggttgttacttggctacatgcaattttcaaaagccatcaagccaaatatttaagatctgtgtgtttacttgattatacttcaattggaaaactatgcactcctttcctccttcttccctccctcccttcttccttccctccctcccttctccttccttccctcccttctcccctccctttttccctcccttcctccctccctcctttcttcccttccttccttccttcctccctcccttcctctctttctcctttcctcccttcctctcttcctccct

SEQ ID NO: 1243667 - DNA, 4001 bp, Homo sapiens
gattacattcccaatgatttcctctgagagattacatatgaggtacaagattacacatgatttaataaaatggacagagagcacacacaaagctgcagtttcccaggctgagaaagacaaatctaatttgtccttcctggggaggaatgtatcttaaatgaacaaaatttccttagaatacacaaaagtaaatcaatgtatcaaagggattaggaaaaaagggagctttttctcgaaatccaaaataataatacgcatgacctaaatgaatcttctccaaatatttaggggggaaaccccactttaattgttagaattggtgcaaagcagctggatttagtagaacgcagcccatcaactgctaattctgaaaaaaaaaaaaaaaaaaaaaaaaaaatctaggggtggagaaagcaggcaatcttcccaataaaacaactgccacaaaacactgtacatacgtaagaacataaacatctgttaaaatatcagtttacactgttccagccaacttacagatcaagaggaagtatttaaggtctaaaaaataaattacattctacttttagtcacattttgcatgggtggctactggacactaggagttatcgacgcggattcaagacaaggaagactgaataataaatccagtgttcacattcaaatgtgggggagagaaaagggcaggctctgagtccataaagttctccacactctgaaaacactgcaaaaatagtccacatctaaggacacttacccttgaaactccttggagagtggcttgggagacttgctgttcagatttttgagggggagtgatttaagaatgctgcaagattgcaactttcaaacacaggaacataatctaaagtgtttttttctttcagtaaagatctctccctgtcctcttcaaacagttgatcagcactcccattttcacaaaatccctaattcaagtatagagcccctcctctcccacaaaaaaatcaaagctttaaagaatatgcaaataaaacacacagattatttccaataatccctaactccttcccaattgggaaaagaaaggagaaacgaaggaacacgaagcaaaaacaccaaaacactcggggaaggaaggcggcgagatgagaaagtaggaatgggtggggggaggagcacggaaaaaagtccagctgatgctgacacttaattggaaggagaggatggaaaatatcctgaagatacgggctagaaggaaaggactaggtgggacaggggcgcgatagagtaagtccacgcaaaaggcctacccaagagggccactgtgtagaagggaacaccaacagggagcaagactccccaagattacttcaaggccccaaagcttaagagacagggcatagggagatggggtgcttctccactggcaatgcagacaccgcaccagacgtttcgggaggcaagtctgccggaaggggtgaggggttaactgcgggggttcgcagacgtggaagggggtgcggcccccggggttgctggaggagagcagagaggaggcccacggcgcataccttgtagtaaacatcaaactggatgttctcgggcaaggagcggatgtctcggcgggagcggatgtagttgtccacgacagcggagatggcggtgttatagagagtctctgggatccactctagttccacggccgccatcttccttccctcctcctccgcctcctccgcctcctcctcccgaaggcccccacctccctccgtagcgaacccctctgcggccccggaggattcggaggggcggtggcagccacgcgggcgcacggcagaaggcacggccgccctgcctcctccgggggcaaactgagggacggcggcagcggacgcaggcccgagtaaaaagtgggacagaaaacagcggccagccaggccaaaagcgtcacaatcccggttcgagaggaacccgggttccgtcccagcgctgatctctgcaggggcggggctgcgtgtgcggcgtcatgacgtaagcgcacgccggcgcgccggaggggaggaatgcggcaggcggaaaacttaggaagagctggatgcctcccacggagagcgtcccttccaagcggccccggagtggagtggagtggagtggataggggtagacttttcacacggggacaaattattacaggatatctgcgccccctgttccgagtcactcggggccatcggttacttcagcaggttctctgcatcacggacccttttgaggctcaggtaaaagtttggatcctctccccacaaacgagcaaaattatctgtacattgaaaattatgcattgagaaaattcacattactctagaaacccttagactgcagttcctaacccaagttaagaacccgcggtccaggaactaggggtaacgatagaagagagacttgtttttctttgtataaccatttgcaccgttgtaactttttgaccatgtttctttatccaaatgaaatttccgaaaaaagaaaactcctgccccagaacttcgtaggaaaactagcttgattatggaattacaaataatagtaagagaaaaaaggctaagtggtggccgtgataggacttaatggtatttcaattcccagagttacagtggcggcttcaagggattgttgaataattgggagtacttgtttcagcttctttccttcctcagcctgaacatctgctgtttatgtaacttaatttcctaagtctgcgatttcaagaatttgatgcaacatctttctgttctaggaatttaccatggaaattattggccataattgttggtgacactatcaaactcatagtcactctataacgatgtaagtccagaaaacagccataataataatgtcctgattgatatttagagctaaaagaagtggaaagagttatttcaatttacccttcacctggtacttcagtgttaagtggttaaataattccacaaaaaataaacactcttaatcttcttcagtctatataaattcttactctatactgtgaacctaggaaagctgtggatggcctcaagatcagattgccagtttagcaagtaaaaaactacaaggctgggcgcggtggctcacacctgtaatctcagcacttgggaggccgaggcgggtggatcacgaggtcaggagatcgagaccatcctggctaacacggtgaaaccccgtctttactaaaaatacaaaaaattagcccgtggtggcgggcgcctgtagtcccagctactcgggaggctgaggcaggagaatggcgtgaacccgggaggcggagcttgcagtgagccaggatcgcgccactgcactccagcctgggcaacagagcgagactccgtctcaaaaaaaagaaaaaaaaaattacaagtgcccagtcacatcttaatgtcagataaacaacaaatggttttgaaatgtaagtatgttctgtgcaatagttttgctcatgccttcggagccactcaagtgtatcagttcattcagcaaatccttcatcacttcttagacactggcgcttttgaagatcaggatccctgccccacataaaagaataattattatctctgcaaatattgcaggggacatatttatactaaaaacttatttgtgaccagcctgggcaacatagcaagaccccatctctacaaaaaaaaaatagccacatgtggtggtgtgcacctgtagtcctagctactcaggaggctgaggcaggaggattacttgagcccagaatgttgagtgagccatgatcatgccactgcactccagcctgggtggcagaatgagaccctgtctcagaaaacaacaacaacaaaaaactttgttgttcatctgaaactcacatttaactggacacctgtattttatccagcaatcctacctaaagggatccatgaatcccctaacattgaatgcacatgttcttggacattttggctaaatcaggacccgtattaagctcctgtaaacag

SEQ ID NO: 1243668 - DNA, 4001 bp, Homo sapiens
ccactcccatccatgccaagaatgctgcacttcttccccgtgagccagggtcagcccgaggagaggggcacaagcacagggcctcttccccccacccagtccttctctgcttgggctgggatccacacaagcctgacctattcccgtagtcagacaccttcctaacagctttcctccccaagcttcatcttgtgccctgactaccctcaagtgtcctgggttcttgcctgggcactgtcactacataggctcagaccctctctgtgaaatgggacaccaacacctaccctgcccactcccattcttcctgtttattattattgaggcctttgaatccagcactgaatgtagaggatttactgctcccatggttcccaagaagaggtcaggtcctcagatgcaggatcttggaattcccagccaccttggggtggacccaaccacactgtgggcaagtggaagaagccgctggggccgggggcctttgggctgcctttggaggcgaaatgactggttatataatcgagattcaaatcgcatgccaaggagcacatggcagtgagagctgtcactttggggaatggggtctgttgccctggcagaggggagaaccacatgggatcaaaagccactcacccccagctaggccgcagggttggggtggagacagagaggggtgcaggggatagagatgaagtatgtgttgctggtgggggattgaatccaagggactcatgcttggattcatgacctccacccccaccccccgtccatcctgaatttcaagttcataattaggaaacacactttggctgaagggagtcggggagagatgcagattgagggagaactgaacacacatccagcaaccaaggaacacaccagtctccaaaagagttgcaagcaccagatcccaccttcaacactgccgggaaagctggggaggagggtccccaagtctttcagccctgtctaaagaggaacaggcctcagccctggccttgacctcaacctggaccccggggaatttcttttccgagctcagggaaactgttggcctgacagtgttcaacccttcaacttaggagcagggaggcctgctggggggctcctgcagggcgggcagccaggctcagaggtaagggaatggccctgatggggggatggggctgggaggcccctgctggcccctccccagcctcagcagctggcagatgaaagaacccaggcagagcagcccagcgctgagtaatgcccctggcaccccgcgctctgacccacccacagccggtcggagagggcagaggggagggcagcctcgccggcagagcccggggtcctgggcctgtgtctagaacttccccaggatccaggagggcggcggaaccgcgcctggcaacccgtcccgcagtccgacccggcagggggcgagtgtggcgcggggagggggtgtccggacgccttagtggaggacgtcccgctccgggaaccccctcccccaccccctctccctccagctgtgccggggcctcgccaacggaaaacgaaaactcgggcagaggaaacggcggcaggcgccccgcctgaaaaacccgaacaaaagccgcgggcctcccgcccccgctgcccagccgctgggggcctggcaccgccacctgggtctgtgccccctgtcctgacagccccgtgcccgtcccgaccccttgcctgcttccgtccttcccacccctctaccccggacagctcttgctcgggccccctcccgggcctgccaccagctgaatctccccgcagcggtgcccgcggtgcccgcgcccaccgtgcgccccaggctgtgcagggcgagcggggtcgcagcgaccctggcttggcagcccgctccccagcagctaccggccccgcccacttccctggcccagcaccctcacctgtgggggccggggctccgggcggggcgggatcccgaccaggcagaaggcgactccattcatcgggtggcagcggcggctctgcggccggggcacggctgggggcgccggcagggacccgggaggggcggggccgggggcggggccgagcgcggtgtgggggggccccccccggggtccgccccctcgcccctcccccttcccaccacccaccccgcgctcccttctgggtgccccggcggcctcgctcaagggccacagacctgcaaccgggctgaggcagaggcgagcgctgcctgagagctggacgtcagagcccagcctggcgaagagaggcggtctccaggagacgcttgcccggcctctaagggaccggcccagatagagggccatccaggcccaggaaagaggacaagggcaccgaacccagaactagcacggggatagggagggagggagagggaagcaaagagaaacagccagccagagatggtcagaaacagagatccagagacccagaaagcatgagaaaggcagagacaagatagagacagcgcagagagaggcagagaaagtcagaaacaaagatgaggagacccaggatcagaaaggggggaagacagaaaaaggcttagaggcccccttccctttagagacccctagacattgagacacaagggaagatttagtgcagggggtggggagacggggtgcccctcagtgtagggtaagcccctcccagccagagtctcagcccaggatcccagagaggagggggagtcgagcatagaagagaggctggcaggtgccccagcccttcggacccccacccagccagtcctggggctcaggccatggggccagcccacagtcctgctctgcagtgaacagcagtgacagcagaggctcccaatcaccagcaccccacagccacccttcctggcttcactctgagctgggcctaaagagatgccctggtcctgagccagcttctttccttgtcccccagaaggaccccctccagcccatcccctgacagtccagggagggacagtccttctgtctttcttttccttttttttttttcggcagggtctcactctgtcacccatgctggagtacagtggcacaatctaggctcactgaaacctctgcccccaggttcaagtgatcctcccacctcagcctccccaggtagctgggactacaggcccatgccacaccgcccacctaacttttgtactttggtagagatgaggtttcaccaggatggccaggctggtctcaaactcctgacctcaagtgatattcgcctgcctcagcctcccaaagtgctgggattataggcgtgagccaccatgcctggccttgtccttcattattagaaaatagctagaaaattctttctactatctaactcccattcttcctgcttcttacttcctccagcttatgcttacctctttcccatgactttttcagtttaaggggcttccatattccttttcccagattatgtagaaaagaaggcggaggataaaataggacttggagagaggaggcagtgaaagcgggaaggccagctctgcctgctggagtcaccaccttccttgggcaaggagacccctgagagccgagcagccccaagacctccacccctttaaccttgatcagggttgggaactcaggtcttagaggggttggggtgccccagacaacaattaggccatccctactcctgtgaacctgaggaatgagatactgactggggtttagctcatatgctttatttaatgtattttaaatcccctggcagtcaagagaaagggattctgtttcataataatggaggggcagttaaatgactcctctcccttcctcatccctttttatcaaggtcatgtgcagccagaattagcctccacttctggaaagtccttcctgctgtctaactgtaatctgtcatactgcctggattttttttttttttttttttttgagatggagtttcactctttttgcccaggctggagtgcaatggtgccatcttggctcactgcaacctctgcttcc

SEQ ID NO: 1243669 - DNA, 4001 bp, Homo sapiens
aggactacccagacagcctgggtggaccccctgctgctgtcaagcgcttcgaagccttacctcgtttaaggctcacaaccctaatccttaagtattgtgcttacaccagaggacgctgggcctgggggaacgtcctcgcgtgtaagttaagtggctgtcagcagctggcaggtgacccagcagaatccagttcccctttccctagtctcaaaacctgagctctgcattgtaacgagtcgggcggagggaacacccagcagcgggcctacggaggcgtgtctccttcgtctgggcatcccggactcagtcctggcacatagtgggcatcagtgttcatggtaatgacatcaggtacagcgaaagaaatcagaggctcccgaggatcagaggtcatctgtccaacccctccctttgggctaaagaacaaaccgagaccctaagagaggaaaagaactgcccctagatcatcacacggccggtggcagatggcagaacggttctgagcatctttttttcccctcgggctgcccctctctgaaaagttcctaaagttcaaaatgtcagggtcgcctagagtgttctgaggatgtaagacctgtttttaaaacgtgctctattttcgatttcccagatgaacacaactggactctgaagagggggaaaaaaacaacctcacttaaccggacgtctttctgaaacaaacccatcaagagttctttaaaaaaaggaactgaaatgctggaagcaccctcaaagggaagcagacgcctgactttcacatccaccctctcatctgaccccagactcctgggagacgggcaagtcggttgggccggggcaggcccgcaatcccccgttccgtgcccagatgcgcttcggaatacagaacagctgggacttggaaagataatatggggcacacacctgcagtaggttatataacctcccagcagggcttggggcagcagccgaccatcgagctcatttgcatttctgcagcgaaacatgaatattcacacaagtgcgataaataaagaccatcagcagcctcacatcagttcaagcgcaattttgccaccaattggattacgaaaagcctctgggcttccagggagctttggagcttgggaattgctgatgagggactgcgggcgtgcacccctcacgtttcgcggttggggagagggagctcatccgaagtcttcggacagaggtgggcgtcgtgcccgacgctgagcggagcgggtctccttgcgccccggctccgtgcgggcgcggtccctagcgcgccacccgcctccgcgccccagcgcccggggaggtacctgctctgcgctctcctccggcggcgggacgtgcaagtcctggatgacctcgtagacgttctctgagtcgctgcgcgccagaggccgcgggcacacccaggagcccgccacgctgcaggccttgaagctgccgctgcttcctaggaggccggcgggaggcgagacggcggcgcaggccaggtcgttcagggactgcgcgggccgcacgggcgccgcgggccgcaggtacaggcaggctggcaggccgggcgccaggctgctgcgctgggtcgcggcgccgcgttgcgcagggccgcacagggagctggctcggcctccggactcctcgggggcgccgtcggggcccgcggtcgccgccgcgctcacaaaccggtagtcgtaggcgagcggctcaggggccgcggggctcgggtggggacctggcggcgcggcggcggcagggttgcccagcgcgggcagctcgcgcacgtactgcgcaggcaggtagaaggggcggccgccgggctcacgccgcacgtgccaccagtgctcggtgctgcgccgcagcagccggtagcgctcattcggccggatggccacgcggcgcccgtccttgccggtgtactcgaaggggtgctccaccagcacgtacacgtcccccaccacgtccgccgccatcgcagccgcggcgttttcctgcgggcaacaagaaggagggccgcggaggtcaagaccaccgagcctggaatagccccgcactcggggacagacttgggttcgagtcccgatcctgcactcgccgttcgccttcgggcctcagttttcccatctctaaaatgggaacttgcataaaatcacatgtaaggcttccattcttacactcagtgctggaattaggacagcccttcgttctgtggggttgattctaagatttgacccttgcttcagtcctgcggtggggagattgtgggtagtcttggtccaaatcgactgcgagggaagccttggctttaaaacgaggggtgattgcccgctctaaggtcgacaccacgcttgcttaatagttgactgcgccttagttttccgtcagtcaagtaggaagaacaccccatttactgccgctccccggctctgtcccgcctggaagcctcccgcccgcagagaatcagcagagggtctcgtagcactgcctccctccagcagcttgcgccccgaccccctggtcagagttggaatgtgggctctgtagggggccgagcgaacagctctacctgggggctgtcgctgccccccttagtccgagggccttgctgtagaggcctccgctgccaatgcaggggaaccggttctctcggtttctctttccttccccagctgcatcaccgcagacgtgagcccgagcccggcccgcccagcccggcccgcaccgccccctgctctccagctctcacgccgccccccgagaaaggccctgcccctgtggcctgtccacctgccctgtgacccctacagtgtccccacgagtggctcctggagaatgcactctgagacagtgactataagtgcggagtcccagagcagggccacccaaagctctccggagtggtggtcataagccccgctcccgcccgggcttcggggtgtcagggatgggggagagcctaactaaatctgtctgcgcccctccaccaaagccatgagtcggttttctccggaagtgcatggcccctccaaactcccacactgaccacacctcttcctgccccctaaggtggcccggacccggggccaggagaccgccgcttgccgaggcagaggagcaggttccaacgggggccccagcagggctcctccgccactttgtcaagcgttcctcgacgaggaaagggtgtaaactgagtcactaagcacgctgggccccggaggcggggtcatcgagctgcccggtgctgaaccaacaaaccccaagcaggacactcccccggcgccccctccccttggaccccgcagcgcactcacgtcggctgggcgggcctcagggagcccatgggctgggtgggcggagccggcggtggctgcaggttaggcccctaccatcgccctgggcggggtttccaggggcgaggccggagaggctgcgcggaacaggagctggcaagcagagcgaagagggacagggacgctcaggagtgctgtcaccgatacccaaagcagccgtgtctgggtggggcgaggaggagcctgaatgcctctgctggggaccttggggggcattgggacgaggcccagagcagaaggccggcacctggagccgggactgctgcgtctgaaggggcactggcaggtcgcgagcggagcccaaggaggatgggaccgcccccgctccgccttccccctctattccccgcccccccaccccccaccccccgggatttgctgtccgggagtgcctgcgtccctcctgtgcgcggctctgggaatgccgggctggggctggttgtctcgtgcgggcgttcctgttcccggggaggtcatttgcaccctgaatcacccactgcgagcccttccaaccggattgcaaatccgcccgctccgggcccacctcttccctcaccagggcctttcccggagcagcccggccgggcctggaaaaactccgagcgggattcccagcgcagggacgcccaccggagctcg

SEQ ID NO: 1243670 - DNA, 4001 bp, Homo sapiens
gaggcctccgctgccaatgcaggggaaccggttctctcggtttctctttccttccccagctgcatcaccgcagacgtgagcccgagcccggcccgcccagcccggcccgcaccgccccctgctctccagctctcacgccgccccccgagaaaggccctgcccctgtggcctgtccacctgccctgtgacccctacagtgtccccacgagtggctcctggagaatgcactctgagacagtgactataagtgcggagtcccagagcagggccacccaaagctctccggagtggtggtcataagccccgctcccgcccgggcttcggggtgtcagggatgggggagagcctaactaaatctgtctgcgcccctccaccaaagccatgagtcggttttctccggaagtgcatggcccctccaaactcccacactgaccacacctcttcctgccccctaaggtggcccggacccggggccaggagaccgccgcttgccgaggcagaggagcaggttccaacgggggccccagcagggctcctccgccactttgtcaagcgttcctcgacgaggaaagggtgtaaactgagtcactaagcacgctgggccccggaggcggggtcatcgagctgcccggtgctgaaccaacaaaccccaagcaggacactcccccggcgccccctccccttggaccccgcagcgcactcacgtcggctgggcgggcctcagggagcccatgggctgggtgggcggagccggcggtggctgcaggttaggcccctaccatcgccctgggcggggtttccaggggcgaggccggagaggctgcgcggaacaggagctggcaagcagagcgaagagggacagggacgctcaggagtgctgtcaccgatacccaaagcagccgtgtctgggtggggcgaggaggagcctgaatgcctctgctggggaccttggggggcattgggacgaggcccagagcagaaggccggcacctggagccgggactgctgcgtctgaaggggcactggcaggtcgcgagcggagcccaaggaggatgggaccgcccccgctccgccttccccctctattccccgcccccccaccccccaccccccgggatttgctgtccgggagtgcctgcgtccctcctgtgcgcggctctgggaatgccgggctggggctggttgtctcgtgcgggcgttcctgttcccggggaggtcatttgcaccctgaatcacccactgcgagcccttccaaccggattgcaaatccgcccgctccgggcccacctcttccctcaccagggcctttcccggagcagcccggccgggcctggaaaaactccgagcgggattcccagcgcagggacgcccaccggagctcgatgtctcgggctggataagaaggggaccggacctcggttccttccccgaccctggggaaacgcagagaaggggagggattggggaagccgggaggatccctggagcgcgacagcgcaccagtcgccaggaggtcccctgcgtccactgcccaggcgactcaagctacaggggcgtcaacgcctgggtcggcgctgggggcctgggcctgcttccctccagcccccagatggagggcagcccttcgcctaccttctcctccccgtgggatgcggcccgcgcagctcccgccccagcgcggagacaaggggagcaggcgcgcggagctcccgggtgcggacccgccacctgccgcacccttcccttcccaaccctgccctttccccacccccaccccacttcccacccccaacccccgctcggcgccccactcccgaccctgcctgcccgggcacctcggggcgtccgctcgccggcttcgcctccacttgccccggcaggcgcgcgtgggctcggcgtcccgcgctccctcctcgactgtgcggctcccgcgctgccgggtttcctgttcaacaatataaccagggaggcaccggcggagagcgccgggcagaacttcctcccggactggggctgggctgcggttgcgagagacaatccccggtgtcctggcttcctgtcccctctgggccgggccagcgcctgaggagcgaagacgccaccccctcccctgcctttcccgggatcctgggccgcacctggctgtctccagggagaaagaggctgcggggctgagatggtgggactggggagggcgggagcctcccccgcaggttcgcctggccagattgccctcccaccatcccccaccccctcttgatccttgtggggaaggagggccaccctccaatccgtccacagggtaagctcagaacaacctccaggagtccagccccagggccctccgccttgggggtcttctgttggagaattttctgcctctctggacaagcagcctcgccctgatctgagcctgcactcactccagacattacaagccacagccccagcacaccccctgccctcaggggccccaaggaacagttgtgcctgtggacctggctgtgtgtgccaagagctggctgattcaggccagtgttctgggaggaagaagggcccgcatcccaggccatggcctctcttgacaccacctcctggggacccagggttgggtgggaagctgaatctggccacccagattcagaggaactcccttacctctatatctttgtaagatatagtaagtaaggaactcccttacctctatatctttgtaagatatagtaagtaaggaactcccttacctctatatctttgcctctgctaggcattgcccacctgtgagtccacacttcctctgagaatctgtgtgtctgagccttggtggcaccttgggaccctccagggtgggcacacagcagaactcagcactggtctttggtgcccgacatgcttagaaaatagtggctggtgccgggcacggtggctcacgcctataatcccagcactttgggaggccgaggcgggcggatcatgaggtcaggagattgagaaaccctggctaacacggtgaaaccccggctaacacggtgaaaccccgtctctactaaaaatataaaacattagccgggcgtggtggcgggagcctgtagtcccagctactccggaggctgaggcaggagaatggtgtgaacctgggaggcggagactgccgtgagccatgatcgtgccactgcacttcagcctgggcgacagagcaagactccgtctcaaaaaacaacaaccaaaaaagaaaaaaagaaaatcgtggctggaggaatcttctctccctccctaccttttaggtccctctccacctgcagcacagccaggcagtggctggcagtggtgatggtctttgcgtggggtcaggcaggtatgatgccccactctgctgcttggcggctggtaggccttgggagttctgccttatctctgcagctcagatttctttcctgtcaatgggatagtaacacccacttcactggattattgggaagattaaatgaggtccactaagcagtgcttaccacatgcccagcgcacacaatatatcagctattttttttaagacagagtctcactctgtctcccaggccgaagtgcagcggcacgatcttggctcactgcaacctccgcctccgggttcaagtggttctcctgcctcagcttcctgagtagctgggattacaggcacccgccatcatgcccagttaatttttgtatttttgtagagacggggtttcaccatgttggccaggctggtcttgaacttctgacctcagatgatccaacctcctcggcctcccaaaatgctgggattacaggtgtgagccaccatgccggggtacatcagctattatgactacttacattatatgataagctcttgggggttggattggaatctccaaaccacctgtcctccttcagagagaagaggaaaaggggaagtctcagctactcaggaggctgaggcaggagaattgcttgaacccgggaagtggaggttgcagtgagcc

SEQ ID NO: 1243671 - DNA, 4001 bp, Homo sapiens
gatctgctgttcaatttctcctggacagtaagctacctgagggcaggaaccatcctttatttttcattgctccctagcccccagtacagcggctgacattcactgactaggtgaatatggtaaatgaaaaagcagaaggcacaatcgtcattacactgtgatgtctctacgggaactgcccaagagatacgcataagaaggcagaataaatgggaagaaaccaacatgctcacagtcattcgattgagatttcctcctattattcaaatatttgtaatggagttaagctatttttatagggagggaatagtaatttacacatttaactgggccaaggaggagaaaggaagggggaggctgggatgattctgcaggcaggcccttctgctacctctgcttcctctctctggcccagtccctagacagacatggaggcctgggcaggggcccctgcccccctcctttcatgcctcacaggggacccccagccaggagagggcaaggaggcagggtgggcacccacagcagcctcagctggacagaagggtcctgcaggcctcacccggctcaggcaacagttctggaagttccctcaacaccagaatccttctgcaatctggaaacagagcttcccaaattttagcaagagcacctctgtgcctgtgccccagagccctagtcctggcagccctgtttccccttcaatatgaaccaacagccactgacctctcactccccggcacagatccagctcccaatctccctaacattcaggcatggagactcgaccacatccctgatcatcagctacgccctggtcacgatcatggactttcccattccccagggcctggcactgaccacccatccaggctggcattcagtactgatgcccacccctccctgtactggacgcagtcagctctaggaagggcagagaaaacaggtctatgggagctaagctatgaggatgcaaaggcctaagaatgatataatggattttggggacttgggagtgggggaagggtgggaggggggtgagggataaaagactacacattgggtacagtgcacaccagtcgggtgacgggtgcaccaaaatctcagaaatagccactaaagaacttattcacgtaaccaaacaccacctgctccgcaaaaccattgaaataaacattacaaaaaacaggtctagagtgaggtcaactgctgaggcctgggaagaaagtgagggggcaggtgggcttgtcctggggcccatcgcaggcccctgggcgctgaagggagccaaggactaagaggtgagagccaggcacaggctccagcgagacctgaagagatcatggggcctgcaggagagccagggggtgcggggggtgggcagggagatctctgggtggacagcaatgtggggtgagggtgggagggagatccaagaagctgctgtctcctaagtcaggtcctaggcaggcagaggggctcctgggacagcctggggctgcaggtgagtcaccgggagggaactgggtcaggtgtaaagaaaccagcagggccaccccagggtggctgccccacctgggggttgggggtggggggtgccggaggagggagtacgagcaaggggctagctagagtcccttcaacttggcctcagcttcctgctgttaccaacaccccttgccaaagtccccctagctggccccgaagggggacaggagggtctgtcccaaggccagttcctttctctcagtcacagtggcctcgggctgcccttggagtttgtcctaggaagtgggtgctgggcctggatccagaggggaggggcccccagatgggttttaggattcgggaaagggaggggagagattggggaaactgctgtggccaccccctagtcccccaggggcgaggactcactcagttcccagtggaggagaaggaatgagggccccgggctccttccagtcggggctgcctgctcatgtgcggcgcctccggggctgcttgtataagaaggtgcagcagcccggctggaacttccctcccagcggccaatgccccagcagcaggggcgggctccaggccagctccacctgcctgggccttcccacctctgggcggggatggtgaccgcaccctgaaatcccagagtcaggaccaagggaagagtctcagaggcccctttattgcactggctttggcctggcttcccagagctccctgagtggcctctttgtgggagaggaggagtcatccctgcttacctcccccgtctccctctatcccctctcagaagggtttgcttctgccctctcctgggcagcaaaagaacaggagatgtccctcctgggacatcaactcttccacaacagggctgggcacgcaggacgctcagaagaaggagcatgtgcctgccttcagcttgtactgttcttgttgaggggaacagggtggccaaccctaaaggccaccaggctgaaactgaacctgctggccagggtggggcttggggtcagggggcctggaactgtcctgaacacagccacttcctggccgtgtgagcttcgtcgtgtcactaaacctctctgaacctctgtttgtactcagggcaaatggaggtgcctacgcctgccttccaagctgctgggagcttaaccctgggttacaagcctttcagcaagagcccacaggactgttagcccctttgggactgcatcttaccacactttgtccccagtgtccagcacagtgaccagcccaccccaagtgctcaatatgcgcgattagagtgcatggggagtgacaaggctgtaaaacaccatccatggcaggagctcctctgttctgggggtccctggccctgtctggtagcctgccctaagccctgagctgctgcctgacagaagggcatccccacacactccccagtgcccccgtgccatgccatccccacatcctgccccctctgttctgcacccactttcttctgagatcccttctcagcaacaaccttctccccatctttagcctccccatctcctgcccacccacctgagcctggggacggttccatccatgaccctacaccccctctggccacactgtgtctctctccttctgcccgttgtccacacactcaattcgcaccctcacttcactactgaccactgccctctgccttcagcagccccctgaccagctgagcgtctagtggtcacttagggtaagtgttatacggcctttctctcacatgaccttcctgtgcgtccttcttctggacacttcttggcctctgagccagcactctcatgcttctcttccctttggcacctaaatccaggtgggccccatcttttttccactctgctcctccccaagtcatccccccgtcaggaagcagcaccactgtctgcccacgagtgccagctgggaatctagaactcaacctgatttccctcccacctccctcggcccccagaccctgcccatccatctcccaaacctctgtttccacacatgcccacgagaccaccaagagcttcagccattcttgaagccctggccacagggatttttttctcaatcccattcctgtctctgctaaaagcctcacagcggctgcaggataatgtgcacattcctggcaagggcccacgaggccctgcccgggtgggcacccactctcaaccctatgctccactctgagccccggccccatgtcttctcttgctggcctcctatccaagagggtgagtcccccaggatcgtggctgtgcctcagtcctctccagatccgaaggctcaccagggcttggcaggtattcagctagttgatgcctaatgaaggagtgaatgggcctggaggatcatggtggggaaactctgcctgggacaactaagagcagggatggggttcccttgcgggggcagggccaactccctaccctggactttgttgggggtggagcaccagggagacccacagctgcctcttgaataaa

SEQ ID NO: 1243672 - DNA, 4001 bp, Homo sapiens
aagaccaagagaaaccagcaacccaagtctagtgtcaggggcctcctggtcacttggctggtctgaggtgatggccaatgcccgcctgcagggtgacgaagaagccaagacattaaagacgggtcggcttgactgtcatctgctaaacaacgaataccaggaaacactatctcggcatccaacacatcaaaaggcagtccacgtgaggctatatctgtggcaataccatgccagaaatctgggctaatctgactctgctattcataaattccccctcatgttaaagcacatgtgtttgggaaggaaaaatgaatccaagtcaattttagacattgttacttggaaaccatctggagtccctggaagcataagaagccaccgcatcccctgccctcaaatgcccactgtaactagggcagtatgctcagacgggagttcagatgtcccctattccccagggatgtccccacccccatcctaccagatgccagttcaggctccacttcccacccaagaaaggtattcggtttctccgtaaacctagtggagagccctcgaggtgttgagcttgcatttgaactgcacccaaggctggattctttgctttctgattgctttagaacagcacacctgaattcctttgccacagcagcaacggaaatccctccccaggagtaggggttccaggaaaaatcccttctacctaacgctcctgtgttcaaagaatgtctagtcttgggagcgacccaccaggatttttatgtaaccttaatagatgttggcaccctgcagagccgctcctggagtccagatgtagcccattttcaccgtgatggcagcaggcggggtcttgcagcttcccggggcctgactcttctgactgtggggcctctgtccccctcccctacctggctgcgattctctgcttatctcatcttcccgaggacttgggcctcctttttgcagcctccctccctccactgaaatcagtcctaacatcaagcaggcagcaacgccattccaccagcaccttccttcctctcccacccctcaccctttccccccaccaaacgccttaagaaacccggccaggaaagtgatccagaatctcgtacagtcatagtccctgaaaacaaacacggcgggaggggcaggccgaccaggcccagcactttccctggacccgggagcagccctgaactcggcgcaggggaggggagggaagagatctccggagaccgactgcggttcggctgcctccagcacaatcagagcaaacacctgtttccaggaagacaggcggccagagggagaagggagtcccggggaaaggcagggaggacgaagcgaaggggcagccggggacgcaggtaaaggatgcgtcacactttgcgcttggcaaccggagcccggagcagaaggcggcgagtgagaagagctccggggtctgggaagttagggaggaggggtcgcgcctgcgagcggcgcctggagggagctggtgcaggggaaaggactgaggcaaggaggactggaggctgggcgggctccatcacctgcgcgcccctgcggatgcagcctcgcgggcgcgcaccgacagcggtgcccgcgggtgacctacctgcccaccgtctggttggccagctggcgcatgcgattgaactgcttcttcatcgtggccccgctgccgcgctagcccgggagctggggaaggacggagcagcccggagcccgccgcagggttacatggctcccgcgcggagcctcccgggcgacggcggcggcactgcggagcctccgggcgccgtctggcccgcgcgcagctccctcccgagggcgccgccgcctactcctcccgccgcgccgcctcctgccgcatccccctcacgcgcgccgcgcaatgcccggggcagagcaatgcctggggccgtcctcggcaccggcccgctccgcccgggctgcctgctcccagtcccagtccggcgcggggacccgggagtctccgcaggctggctggccggctggcccggcggtccccgtgcgcctgtgcggagaacgccgtgcatgccgggacttgtagtttcgcgccccgtgcccacctttcctctgtccaaagtttgcaaggacagtggagtgcggaggtgggagaaggcagcgtcaccagcagctttgcactttagcgttcgagtaagggaaacgttttcctgttttaaaaatggcaaagtgggaccaagaatacaacagcaaataaagaaagtgagcatctgtctctcattgtatttttagtgaatgtgaggtatcagtgttctgaattcacagaagggagatttatgctagcagatacgtggctgataaaacggtctaaggtcacctgattaatgatgaggttcaaggttaagcttgaaacacaggggctgacagcagattttgaacaggcatagcttgcatcccagaagtctgattcttaatttttaccaaaccaaacccattaggtaaccagaagccaatatagataagtgacgttgtgcttactggcccaacctgtctgagacagcttttttgtatggcttagatgccaatctcgtatctagtcccatttcccttccaccaccaggagaccaaggggcatcagctgcagcaccccccaagtgtcctgcaccacagcatcccattggcgtcagttgactccttggaaggggttgtggcttctttggtctctatccttagaaaaagataggtgagccgggcgcggtggctcacgcttgtaatcccaacagtttgggaggccaaggagggtggatcacgaggtcaggagttcgacaccagcctggccaacacagtgaaaccctgtctctgctaaaaatacaaaaattagctgggcgtggtggcgggcacctgtaatcccagctacttgggaggctgaggcaggagaatagcttgaacctgggaggtggaggttgcagtgagtggagatcgcgccattgcacgccagcctgggtgacagagctagactccatctcaaaaaacaaaaaaaaaagaaaagaaaaaaaagaaaaagattggtgattgcagttaggttttatcattatatatcaaggttttatcattatatatcaagtaaaagcagtattgttgggtgtgaggcactttggattaaacagataggagttcctgcatcagaattccacatacctgttatataaccttaggaaaacagcttaacctctccaaacctctgtttcctcatccctaaatagaaaaatatgctgcctgatcttcagtaagagaactatttgttaaattacaataatcaaattacatataaattttcatatagtacattgccgtattcatttactacaaaatgattatatttagcataatagagaaaaatcctgttcatacaacagaattactaatcttataaaggaaggatcttctttgaaataggatattttgcatatgttgattatagttgcaagatgtcctaaatatggctctaagtatcttgctggctagctgaacaaaaagtggtttgaggcatgtcttggctgaatgaacatgaaatctttaattaattgtgaatttagcctctgcttattaggtcagacaactccagccagtgaataaatgaaggcattatttgcttttaaccaactatgctgtacctataatgtcaatatgatgtctatattaagtgaaattatttccattttgagattttttaaaaagcaaagtacaacatgctttttatgtgtataaacggtaagacattaaggtcactgtatgacttttagcaacactatctctggtaacttccagaactgcactgttgaatatagtatcccctagccacatgtggttgttgcaatttaagttaattaaagttcaaaatttggttcctcacttttgcactgttggtgggattgtaaattacttcaaccattgtggaaaacagtgtggcaattcttcaaggatctagaactagaaataccatttga

SEQ ID NO: 1243673 - DNA, 4001 bp, Homo sapiens
ccgggccagcatacccttgggtgcctcctccacgggggtcaggaactcgtactcctcggcccggggcccatagctgcctaccatgtagtcagtcttgtcaactgcggcacaaggaagagggcggtcagcggccccgcttccccgcctggcagcacgcacccaagcggccccctctgccctgcccggggccccactcactcttgacgcctttcctgtacgtatgctggatgtacttcatgccggacactatctctcggttaacctgcaggacccgaagcgaggatcagggaaggtcggtccggaccccagccccagccccgcctccattccctggccacagcagcctgtagcttacccggaaagagatttttatccggtactccacaccctccttcagcacaaacgactgcttcttgaagctctccaggtcgcctgttggggggacctccccctcaatgactgcccagcagccctgcgcgaagccccagccctgcgcggccccctggctgcacttcccgagatccccaccaggggccgcccggacccccgcggccgcagggcactcacccgtcaggtccagctccagggggcccggggccgagctgcacaccagggtcaggccagtcaccacgacgttggggacgttggggtctggggagtgacagcaggtgagggccccacccccaccagtggaagtaggggctggggagcggcaagacagctggagtgaacgggcggccacccggctcccgcagcccagactcacctgcggaaacggccacgcggcccagcagggcctccttgtactttcgcaggctctcgtcgtccttgtccagctcctggatctcctggatgctcttctgggccgggggcttgtagttgaccgagtgctcatcctcctcgttctccgctgcaatctgggccagctgctcggctgtgggctcctgctcagccatgctcaagcttagcctgggtcgggacacctgtgggcgggacggtgacaggccttggacctggatccccaacggaggcgcacttctgagcaggagtgtgggctgcagccggagctccaaaagggctccaagggggccaccttcgctcctctccacccccgcgattcctgctcaggggcatcctctggggcagtgtgaggtgcccccaccccaggtataacatctaagacaaaatgggaactgcagccgatcatggggagagaggacacacctccccctccacgatggaggaggcagcagccccctgtatgtgtggggcggggctagcaggccccagaatcaaccggcggggcccacactaaaccctctcttagggtcttgccgctcttgagctgcccaggccctcgccctacggggtaacggggctcggtatccctcagtagggttgctcctctggccgtggtagtcacatgtaaacgtgtgtggtcggctcagcgtcatctttcaaacaggatgcccctggagctcggatgttaggggcagctagaataccgcacggggccacctggacacggggatcctaagtatctgcggtttctccacaattgtgagggtctgtgacctacaacttgggagctaccacagccactcagtactctcgggccctcttgtagatggtgggcccggagtgcccggggcagcactgacccggcaggggatctgtcaggctcagatccttcccggcagcgtgggaggtgggtcagggagcagcacacccgggacacccaggccggggtccaggccgccctgcttcctccaggggctggggcctccgcgccgcgcgaggatagccgtaggcgccgggatcctagggcgcggcccgcacttccgcagggcccgcaatccgtgccgggcgtggcccgggcgctgggggaggccgcgccccaatccccgcgtcgcccccgaacgcgatggaccgcggctgccggcccggcgccccccgcgtccccaaggaggggccctcaggtctggcccgggccccacgcgcctcggcggccatgaaagaagctccggaccgctcgggaggggccggcactcccctggtccccgccgcccctccggcccgggacccgcacgtggggccggggccgccgccgcccggtcccgccccggccccgccctagcccgcaccgccctggcccgctgtcaccgcgcccccgcccgccgagaccctgccgcgggctcagggcggggcgcgaacaaaggcggaagcccccacctcagcgccccccgcccccgccggcgccgccggtccccgccccgacccgccgcctccgccccgccgcctccgccccgccacggccactcaccggagggttcggccgcgcggttcaggatccctcccgcactaaatgacgaacgtcgtcggccgccccgcccgccctgcctgtcacttccggggtcacgagacttccgctcactcgggcggggaaggccagggcgcatgcgcggcgcgcgggtggccgggggcacgccgtcgccatcttgcggctgggcctcgtgggcgcgttccgcgtgggttctggcgtcgtcaccttccaccccaagccccgtcagtggtcacctctgtaagccagggcacttccctacgcgagcccagggcgcccgcacccgggaggcgaggtccggtcccgcctctcgccgctgcccaacccgcgcccactcgaggcctgcggcggccgcgtgggctgtggaagcccgcgcaggtgcagtgcgctgccctccccggcccagtcggtccgactgcgactcttgcttcggggcctagtcacctagtcccgggacttcggggaggtaacgggcacggggattaagttctcgttaaacacgggcgagagcgctggcgcgcgggccgttccagggccttggtgtcccccgtggaaagacagggctgtggggctaggaggagccccttgcacgccccgcggaaagctggtgctgggcgagggcgcagcggaggtgtttttctccaggctgagacagaattcgtgcgcagcgcgcgtggctgcctggcgcaggcgccgctgcagaggccctagtgtccctgaggaatcccgcggctcctcaggaccaggaggcagggagctcctggcaccgtgagcagatgaggggctgcctcagcctgggcttcaccgcagagccctgttccccactccgcttgttccgagattccacacattcgcccacaagggccgtgttgaagtatcaggaacggccgcataacgtgagtggcctggcccagcagcagtgctcgcacccagccccgggctcgcctctcctggaggccaagcccctaaatgccctgcaccagacactgggtgggacgctgccccgcgtccagcctgcagcacttgttaggactgtggactcgttaacgtggacgcctcttttatttattgattgattatttttttgagacgtagtctcagtgtcgcccaggcttgagtacaatggcacaatctcggctcactgcaacctccacctttcaggttcaagcgattctcctgcctcagcctcccgagtagttaggattacaagtgtgagccaacatgcccagctaatttttgtatttttagtagcgacagggtttcaccatgttggccaagctggtctcgaattcctgacctcaggtgatccacccacctcagcctcccaaagcgctgggattacaggcatgaaccaccggggtgcccaatctttttttttttttttttttttcttcaagacagggtcttgctcttttgcccaggctggagtgcagtggtacaatctcagcttactgctgcctctatctcctgggctcaagcagtccttccacctcagcctcccgagtagctgggactacaggtgtgcaacaccatgtccagctaattttttattttttgtacagacagggtctcactatgttgctcaggctggtcttgaacccctgagctcaagcgatcctcctgcctcagcctcccaaagtgctaggattacaggtgtgag

SEQ ID NO: 1243674 - DNA, 4001 bp, Homo sapiens
ctgttggggggacctccccctcaatgactgcccagcagccctgcgcgaagccccagccctgcgcggccccctggctgcacttcccgagatccccaccaggggccgcccggacccccgcggccgcagggcactcacccgtcaggtccagctccagggggcccggggccgagctgcacaccagggtcaggccagtcaccacgacgttggggacgttggggtctggggagtgacagcaggtgagggccccacccccaccagtggaagtaggggctggggagcggcaagacagctggagtgaacgggcggccacccggctcccgcagcccagactcacctgcggaaacggccacgcggcccagcagggcctccttgtactttcgcaggctctcgtcgtccttgtccagctcctggatctcctggatgctcttctgggccgggggcttgtagttgaccgagtgctcatcctcctcgttctccgctgcaatctgggccagctgctcggctgtgggctcctgctcagccatgctcaagcttagcctgggtcgggacacctgtgggcgggacggtgacaggccttggacctggatccccaacggaggcgcacttctgagcaggagtgtgggctgcagccggagctccaaaagggctccaagggggccaccttcgctcctctccacccccgcgattcctgctcaggggcatcctctggggcagtgtgaggtgcccccaccccaggtataacatctaagacaaaatgggaactgcagccgatcatggggagagaggacacacctccccctccacgatggaggaggcagcagccccctgtatgtgtggggcggggctagcaggccccagaatcaaccggcggggcccacactaaaccctctcttagggtcttgccgctcttgagctgcccaggccctcgccctacggggtaacggggctcggtatccctcagtagggttgctcctctggccgtggtagtcacatgtaaacgtgtgtggtcggctcagcgtcatctttcaaacaggatgcccctggagctcggatgttaggggcagctagaataccgcacggggccacctggacacggggatcctaagtatctgcggtttctccacaattgtgagggtctgtgacctacaacttgggagctaccacagccactcagtactctcgggccctcttgtagatggtgggcccggagtgcccggggcagcactgacccggcaggggatctgtcaggctcagatccttcccggcagcgtgggaggtgggtcagggagcagcacacccgggacacccaggccggggtccaggccgccctgcttcctccaggggctggggcctccgcgccgcgcgaggatagccgtaggcgccgggatcctagggcgcggcccgcacttccgcagggcccgcaatccgtgccgggcgtggcccgggcgctgggggaggccgcgccccaatccccgcgtcgcccccgaacgcgatggaccgcggctgccggcccggcgccccccgcgtccccaaggaggggccctcaggtctggcccgggccccacgcgcctcggcggccatgaaagaagctccggaccgctcgggaggggccggcactcccctggtccccgccgcccctccggcccgggacccgcacgtggggccggggccgccgccgcccggtcccgccccggccccgccctagcccgcaccgccctggcccgctgtcaccgcgcccccgcccgccgagaccctgccgcgggctcagggcggggcgcgaacaaaggcggaagcccccacctcagcgccccccgcccccgccggcgccgccggtccccgccccgacccgccgcctccgccccgccgcctccgccccgccacggccactcaccggagggttcggccgcgcggttcaggatccctcccgcactaaatgacgaacgtcgtcggccgccccgcccgccctgcctgtcacttccggggtcacgagacttccgctcactcgggcggggaaggccagggcgcatgcgcggcgcgcgggtggccgggggcacgccgtcgccatcttgcggctgggcctcgtgggcgcgttccgcgtgggttctggcgtcgtcaccttccaccccaagccccgtcagtggtcacctctgtaagccagggcacttccctacgcgagcccagggcgcccgcacccgggaggcgaggtccggtcccgcctctcgccgctgcccaacccgcgcccactcgaggcctgcggcggccgcgtgggctgtggaagcccgcgcaggtgcagtgcgctgccctccccggcccagtcggtccgactgcgactcttgcttcggggcctagtcacctagtcccgggacttcggggaggtaacgggcacggggattaagttctcgttaaacacgggcgagagcgctggcgcgcgggccgttccagggccttggtgtcccccgtggaaagacagggctgtggggctaggaggagccccttgcacgccccgcggaaagctggtgctgggcgagggcgcagcggaggtgtttttctccaggctgagacagaattcgtgcgcagcgcgcgtggctgcctggcgcaggcgccgctgcagaggccctagtgtccctgaggaatcccgcggctcctcaggaccaggaggcagggagctcctggcaccgtgagcagatgaggggctgcctcagcctgggcttcaccgcagagccctgttccccactccgcttgttccgagattccacacattcgcccacaagggccgtgttgaagtatcaggaacggccgcataacgtgagtggcctggcccagcagcagtgctcgcacccagccccgggctcgcctctcctggaggccaagcccctaaatgccctgcaccagacactgggtgggacgctgccccgcgtccagcctgcagcacttgttaggactgtggactcgttaacgtggacgcctcttttatttattgattgattatttttttgagacgtagtctcagtgtcgcccaggcttgagtacaatggcacaatctcggctcactgcaacctccacctttcaggttcaagcgattctcctgcctcagcctcccgagtagttaggattacaagtgtgagccaacatgcccagctaatttttgtatttttagtagcgacagggtttcaccatgttggccaagctggtctcgaattcctgacctcaggtgatccacccacctcagcctcccaaagcgctgggattacaggcatgaaccaccggggtgcccaatctttttttttttttttttttttcttcaagacagggtcttgctcttttgcccaggctggagtgcagtggtacaatctcagcttactgctgcctctatctcctgggctcaagcagtccttccacctcagcctcccgagtagctgggactacaggtgtgcaacaccatgtccagctaattttttattttttgtacagacagggtctcactatgttgctcaggctggtcttgaacccctgagctcaagcgatcctcctgcctcagcctcccaaagtgctaggattacaggtgtgagccaccatgtccggccacccagcctcttttaatcactcttgagctccatgcagacagggccctgtctgtttggcccatactgccaggcaacccaggctgatcaagagaagtggagaccacacgcacacacacacgcacagctgctttgttcagacacagacatgaacacaggagggcatttttggggacagaactatgcaaaataccgagcttggtgtcttttgaaaatttctgaatgttggagggatatttgagagtttctgtaactgagtcacactgtcagtgccatgtcatcagcacagcgtttcctaatcaggtgtgaaatgcttcactgttaaagactcagagcccctgtgcaggtgatcatgttgcccaactttccaataacccaagtgcttttaaaaaaaaactgttgggccgggcgcggtggctc

SEQ ID NO: 1243675 - DNA, 4001 bp, Homo sapiens
aaggtccaggcatctatagatctcctccaccctgactcccttcaaatcccgacatacagaaaccagatatcccaaacattaactccatttttgaaaaggtagcccctgaaagttgttagcactgaaaacggagaagatgggtggattgaggtcacccagcgccccccacccgccacactcacctggagcaccgttctcctgggacccactcccggtgaggggagcttctctctccccattcacatctgctctcgcttggagacctggctccggggcatctgcatcctgagcccggccttcagcacccccttcaaacctgccagccagcctccgcacagtgccaggagctgaggcagagccattctgagccaggactccagccatggggagcagaggcgtgcagggtgacccagacggcttgggtggggggactggagaccggggagcaggttctggggaggcggagcgccgggacactggactaggtgtgggggtgctggaaggtgagtctggggaagtctgggagtcgaggctggctctagaagctgaggggggcaaaagagcagggggcttgagggatgcagctgggggctcccagaagatgggggtgcacattggggttggtgcatcattggagtttcggggtagttcttgtggagaggagccattgtggggaggccctggggactgggcagccctggaacgagaaggagggcgggggcggatgatccgagggggcttctgcgtggggggtgttgctgcaggaagggactgggctgacatcttcctctgtgctcttcaaaggagtgaggtgctctgctggagtcatcccctgaggaggagggagggaaagagaaagacccttagtgccccacagggagggtaaactggggccactggaaggcaggattttgaagtcaggagggaaggctggtgtgggggttccagagaatccataaaactcaatacgggatacagccgctccgtgtctgcccactgaaccgtgtgtccgtggagtgtgttgtggaggtttgtgtgtggtttgtgtagggggtggcatggtgtgttgtgagtgtgcgagttctgtgcttgccgggtgggtgtgcagggggagagtggagcatacggtgtgtggtgtgtggccctttaggaagttctcggtgtgagtgtctgagatagcggtgccagggtgggtgtgccatgtgtgttctgcgctgtctgggtctgggtgccgtgggcgcgcctgtccgccgggcctgggctgcgaggcgtgcatcactgtttccctgctccactggccctccgccccccatttcccagttcctctctccggactctccctttccggattatttttagtctccttttcctgccatcaagattcttggagcctctgacccccggagatgaggaggtcctggcgaggtctctcctgtcctgcgtctgatcatccccgcctgccctagggtctggtcacagagagaggcccagcacagccatgggtcttgccaagaggcctggggaggtggctgggagaatgaaccgaaggacaggaccagtcgggccagggcgctgcggcctgggtttctcttcctccctcgaggaaggaggctacaatcccaagaaggctgcagggtcagggctgggaagcagaggaacccccaaactcccttcaggggtcagcaggagagtcagacccctccaggcctcggactggctccttgagaaatgatgaggggggaacaagggggttgtagatgatgggtcttgcagctcagtggcctctgtgttctggcagaaagtcatttagcaaagtgacccacacggtagtcttgaccactggccaactcctccccagcccctgcccctcagggatcccaccccctctcgggtacctgcatttacttccttccctaccccacccttaggaacccaggtactcgggccccaagcactcacccttgaatcccctccactctcagtcacctcccagggctgagtgagtaggggcaggaaacaggaatcagatccgcctcccaaccggacacccccccctcacgaaccacaccactctccacatgcgcacatcacacagggccccaggagacagaggtatccagggtctcagaggttaaaggggtctggggaaaagctgaaattcaggcttggaaagtgtgtgcgcaggttctacctgcacagctgtgtggatcggggctcataggggtgaggtggacaggggtagggatgaggacaagacggcaatggcacagagcctggctgagcagcatgggtgtctggatgcctctgtctcagctaagggatgctgcgtgcgtccctccacggcgagtctcaccatctttccccgacttgcaccaccacctgtctcctgagccgggtgtgagccaacgcctatttcacacccagggaccctcccgcaggcttccctccctaactctgcagtaggtccccatgaatttacctttatctttttggaaccagttgctattttcagcctgtcctgtctgccccttggagcgaggaatgcagggctgaggtttccaagtgtgtgttcctgtgattctggggtgggaactcagggcccagattgagatctctgcggaggaagccagttcctcagccccacccagccattgtgtctggcgtgtgtgtgtgtgtgtgtgtgtgtgtgtgtgtgtgtgtgtgtgttagaggagagagaaaaggggagggccaggaggtaggactgaagagagaagtgtggacttggggtctgtctcctccagggaggtataacatttgcaggggcccaggcgtggttgctcatccttataatcccagcactccagcactttgggagggcaaggtgggaggaccagcctcggcaacatagtgtgaccctgtctctacaaaagatttttaaaaaattagccgtggacaggccgggcgaggtggctcacatctgtaatcccagcacttaggggggccgaggcaggcggatcacctgaggtcaggagttcgagaccagcctgactaacatagtgaaaccccgtttctattaaaaatacaaaaaattagccaagcatggtggcacacgcctgtaatcccagctagtcgggaggctgaggcaggagaattgcttgaacccaggaggcagaggttgcagtgagccgagatcgcgccattgcacttcagcttggccaacaagagcgaaattccatctcaaaagaaaaaaaaaagccataatggcacacatctgtggtcccagctactcaggaggctgaggtgggaagattacttgagcccaggagttggacactacagtgagccgtgatcgcaccactgccctccagcctgggcaacagagcaatatgctgtctgaaaacaataaaaaatgtgcagaggtcgggcgcagtggctcatgcctgtaatcccagcactttgggaggccgaggcaggaggatcacctgaggtcaggagtttgagaccagcctggccaacatggtgaaaccctgtctctactaaaaatacaaaaaaattagccgggtgtggtggcgcacgcctgtactaccacctactcgggagggtgaagcaggagaatcacttgaacccaggaggtggaggttgcaatgagccaagatcctgccactgcactccagcctaggcaacagagcaagactccatctcaaaaaaaataaaaataaaaaatgtcccaggagccgtggctcacgcctataatcctagcagattgggaggccaaggagggtggatcatctgaggccagaagtttgagaccagcctggccaacatggtgaaaccccatctctactaaaaaaaaaaaatacaaaaattagctgggcatggtggcgggcacctgtaatcccagctgctctggaggctgaggagagagaatcacttgaacccaggaggtggcagttgcagtgagctgagatcgtgccattgcactccagcctgggcaacaagagtgaaactccatctcaaaa

SEQ ID NO: 1243676 - DNA, 4001 bp, Homo sapiens
ctgggggctcccagaagatgggggtgcacattggggttggtgcatcattggagtttcggggtagttcttgtggagaggagccattgtggggaggccctggggactgggcagccctggaacgagaaggagggcgggggcggatgatccgagggggcttctgcgtggggggtgttgctgcaggaagggactgggctgacatcttcctctgtgctcttcaaaggagtgaggtgctctgctggagtcatcccctgaggaggagggagggaaagagaaagacccttagtgccccacagggagggtaaactggggccactggaaggcaggattttgaagtcaggagggaaggctggtgtgggggttccagagaatccataaaactcaatacgggatacagccgctccgtgtctgcccactgaaccgtgtgtccgtggagtgtgttgtggaggtttgtgtgtggtttgtgtagggggtggcatggtgtgttgtgagtgtgcgagttctgtgcttgccgggtgggtgtgcagggggagagtggagcatacggtgtgtggtgtgtggccctttaggaagttctcggtgtgagtgtctgagatagcggtgccagggtgggtgtgccatgtgtgttctgcgctgtctgggtctgggtgccgtgggcgcgcctgtccgccgggcctgggctgcgaggcgtgcatcactgtttccctgctccactggccctccgccccccatttcccagttcctctctccggactctccctttccggattatttttagtctccttttcctgccatcaagattcttggagcctctgacccccggagatgaggaggtcctggcgaggtctctcctgtcctgcgtctgatcatccccgcctgccctagggtctggtcacagagagaggcccagcacagccatgggtcttgccaagaggcctggggaggtggctgggagaatgaaccgaaggacaggaccagtcgggccagggcgctgcggcctgggtttctcttcctccctcgaggaaggaggctacaatcccaagaaggctgcagggtcagggctgggaagcagaggaacccccaaactcccttcaggggtcagcaggagagtcagacccctccaggcctcggactggctccttgagaaatgatgaggggggaacaagggggttgtagatgatgggtcttgcagctcagtggcctctgtgttctggcagaaagtcatttagcaaagtgacccacacggtagtcttgaccactggccaactcctccccagcccctgcccctcagggatcccaccccctctcgggtacctgcatttacttccttccctaccccacccttaggaacccaggtactcgggccccaagcactcacccttgaatcccctccactctcagtcacctcccagggctgagtgagtaggggcaggaaacaggaatcagatccgcctcccaaccggacacccccccctcacgaaccacaccactctccacatgcgcacatcacacagggccccaggagacagaggtatccagggtctcagaggttaaaggggtctggggaaaagctgaaattcaggcttggaaagtgtgtgcgcaggttctacctgcacagctgtgtggatcggggctcataggggtgaggtggacaggggtagggatgaggacaagacggcaatggcacagagcctggctgagcagcatgggtgtctggatgcctctgtctcagctaagggatgctgcgtgcgtccctccacggcgagtctcaccatctttccccgacttgcaccaccacctgtctcctgagccgggtgtgagccaacgcctatttcacacccagggaccctcccgcaggcttccctccctaactctgcagtaggtccccatgaatttacctttatctttttggaaccagttgctattttcagcctgtcctgtctgccccttggagcgaggaatgcagggctgaggtttccaagtgtgtgttcctgtgattctggggtgggaactcagggcccagattgagatctctgcggaggaagccagttcctcagccccacccagccattgtgtctggcgtgtgtgtgtgtgtgtgtgtgtgtgtgtgtgtgtgtgtgtgtgttagaggagagagaaaaggggagggccaggaggtaggactgaagagagaagtgtggacttggggtctgtctcctccagggaggtataacatttgcaggggcccaggcgtggttgctcatccttataatcccagcactccagcactttgggagggcaaggtgggaggaccagcctcggcaacatagtgtgaccctgtctctacaaaagatttttaaaaaattagccgtggacaggccgggcgaggtggctcacatctgtaatcccagcacttaggggggccgaggcaggcggatcacctgaggtcaggagttcgagaccagcctgactaacatagtgaaaccccgtttctattaaaaatacaaaaaattagccaagcatggtggcacacgcctgtaatcccagctagtcgggaggctgaggcaggagaattgcttgaacccaggaggcagaggttgcagtgagccgagatcgcgccattgcacttcagcttggccaacaagagcgaaattccatctcaaaagaaaaaaaaaagccataatggcacacatctgtggtcccagctactcaggaggctgaggtgggaagattacttgagcccaggagttggacactacagtgagccgtgatcgcaccactgccctccagcctgggcaacagagcaatatgctgtctgaaaacaataaaaaatgtgcagaggtcgggcgcagtggctcatgcctgtaatcccagcactttgggaggccgaggcaggaggatcacctgaggtcaggagtttgagaccagcctggccaacatggtgaaaccctgtctctactaaaaatacaaaaaaattagccgggtgtggtggcgcacgcctgtactaccacctactcgggagggtgaagcaggagaatcacttgaacccaggaggtggaggttgcaatgagccaagatcctgccactgcactccagcctaggcaacagagcaagactccatctcaaaaaaaataaaaataaaaaatgtcccaggagccgtggctcacgcctataatcctagcagattgggaggccaaggagggtggatcatctgaggccagaagtttgagaccagcctggccaacatggtgaaaccccatctctactaaaaaaaaaaaatacaaaaattagctgggcatggtggcgggcacctgtaatcccagctgctctggaggctgaggagagagaatcacttgaacccaggaggtggcagttgcagtgagctgagatcgtgccattgcactccagcctgggcaacaagagtgaaactccatctcaaaaaaaaaaaaaaaattagccgggcatggtggcactcgcctgtaatcccagctactcaggagtctgaggcacaagaatcacttgagcccaggaggcggaggttgcagtgagctgagatcgtgccattgcactccagcctgggcaacaagagtgaaactccatctcaaaaaaaaaaaaaaaattagccaggcatggtggcactcccctgtaatcccagaagagacttaattttccaaacaataagccccaataaaaacagcatgaagccaattaaattttttccaaaaaaaaattttttttttgagacggagtcttgctctgttgcctaggctggagtgcagtggtgcgatctctgctcactgcaacctccgcctcctaggttcaagtgattcttctacctcagtctcccgaatagctgggattacaggcatctgccaccatgcccggctaattttttgtattttttagtagaggcagggtttccccatgttggccaggctggtctcgaactcctgacctcgtgatatgcccgactcggcctcccaaagtgctgggattacaggcgtgagccaccacacctggcccca

SEQ ID NO: 1243677 - DNA, 4001 bp, Homo sapiens
ctgccccggacccccagctgcaccacctccctaccgagccatgcttccggctgtaacccgagggagcccccgcccccgctgtgctccctctcagctcagggacgcgtacattttattgaagagtatcagcaccgatgcttctgcaagttgttctgcagaaaggagacctaagagctgcacacaggatgcagagagctgggtggggtcagaggcgtccatcacaaactggggaaaaagaaaaagacagcagcaatgccccgctgccaaacttcctcccctgggcctcacagacctggcactgggagagcaaaactgcattttttaattaattaatttattttttgagacgaagtctcgctccgagtgcagtggcacgatctcggctcactgaaactccgcctccagggttcagggttcaagtgattctcctgcctcagcctcccaagtaactgggactacagacacccgccaccacgcctggctaattttttgtacttttagtagagacggggtttcaccatgttagtcaggatggtctccatctcctgacctcgtgattcgcccacctcagcttcccaaagtgctgggattacaggagtaagccaccgcgcccggcccaaagtagctttaaacaaagctttgggaacaagcagaagcagagggaatcgagttttatgaagacgacctggtgtcactcgtctctgtcctcatgtggccatcagttctccatactggtatccgcggcacaggccttatcaagatgagaccaaccagaggtacgtataagtccaacataaacacagacgtaccggggagtgacacagagggccaagtctgttctctgcggagcagcagccctgccctcagcaagccctctgtgagctcctaccgggggcctgggagcgcaagcaccagaaaccagacagggtgcccagcaggaagcaacactagctaagacctatttccatgagtagtatagtcactaaataacccaaacccctttctacacacagcaaggttggggactggacgtcacagaaatgtagacacacttccctaaaggaagcccatataggattacaacccaccaggagagaacggcagtttccatagtaactggaccagatggggcccatgcaccccccaagctcccggatggtgatctttctctgtgccacgatgtcagtaagattggtgcccacctataggaaaaaccacgatgcaaaaagaacaatacaaccgctgtcccgttgtgaactcctgaagagcaccgtgcccacaccttacacggtggcctgaaccccgcagacccattctccctaacgcaggaacggcgagcagggaccgacgcccatcagtagctggactcgctgtgggggcgaccagccacaggaagccgttgcgaggggagaggaagtgcccgtggagggcggcaggccccctcatcccgcgccaattatcctcagctcgggccgtcccccgctcccgaaggctggccttaagtcacgacctgacccgctgcgcctcggcgtgcacttagaggagcccggagctcttcgccaagcgcagaactgaccccccgcaactccacccgcgggggcggacacctaccgtgggccgtgtcgggggcggctcccccaggtcgcctttcccatcccgggagctcacctgtgcgaagcggtcaaggacccgagcagctaaagggtgagtccccgccccactccgggtgccccccgcgccccggtcccgtccccgcgcggaaggatatcctgcagccgtttcaccagcagcgtcttcccgacgcccgtggcccccagcaggagacacattccgtgcttcgctccacccggcacccgtagctcggcgccgcggctcaaggcccgcccaccggccactctcattggatagttctcaccttcggacttctcattggttcttagggctcattgttccaagggcgcgtccaattagcgcgcagcgttagcgggagagcggaagaccccgcctcctcgcggctctagggccggcgcggtgacgtgcgcgtgcgcgcactggagggaaaaggcggaagcggaagtcggggggcgcgccagctcgtagcaggggagcgcccgcggcgtcgggtttgggctggaggtcgccatggggcgaggcagcggcaccttcgagcgtctcctaggtaacgcgtccccacccgacggctcggccttggtcagcccgcagcctccgcccggcgctgagtcagcgcggccccgagggcccgaggggcgcggaccggccgccctgcccgcctctccccggcccgctgtcctcccgggttcggagccgccgatcctggaccctcggcgcggccgtggggtcggcgtccgtcgggcgttggcaaatggggctctgcgagggtccgcgcagggcgccaggggcgctcggcgacctcgctcctccgcgggcccgggcattcggccgatttcctcttgaccgacgagcacccggccgagtgggccacaaggcctgagtcatgaaagtgggtgactcagtcggatgttaggctcgcacttgggcttctgacccaaaacactgggcctcgaagggtggagccggcagtgttctctctgggaccttcgagctctcttgggggctgcgggtcccagacccaccttttgttcccacactggcttcgggaagtgcctaatggtttaggaaggcgttttctcacgtttttggaggtgaaagctgatcctatctgagcctcctggaattgacgcgttttgggagggaaacgaatgttgatgtgcacgtgcccagcagcacgtggaaaatgcgtctaatgtttgggggtaggagcttgggtggtcgaatgggctgcccaagcttgcctttttgtcaagtagggttttcaaggagacttcaagtgagacaccttccttgccaagggaaccagcaagcagactgagtatctcagccacacaggtagttcagtgcttcagggatgaatccagaggttaactactgaatcagtatagaaagtggacgtggcttggcttgttagatcgtttctgtatccgggaaaggcgatgtgggcagagctggagctgcccccccagaggggccagttgttggagacagcagtgatgtggtatgatgacaggtatgctggcgagtcctccttggagccccgttctgcccttatttccaaagcacttggcttggagcaaggggcctggagtctacactgcaggcctctctagcccttgcccaagctaaggtcccattgaaaccgggagcatctgggcgaacggggactccaagggacgggtgatagggttctttgttgagaagcagccgagcctgatgtttaagagtgaatcagcctctgtctctggtgagctgtgtgactcacggcagtgccctcgcctctctgctgagtgtctttacctcgctcgcgggttgtgggagggcttggaccagcacctggtgtgctcttacgctgtttgctgcttccctggggaggatggcacttccctgcccatcagcacgctcaggaggattctgtcatgctttttcatttggtccaaatgtctaaaggggaaggagagagtcccccccagctgctgccaagctggggtgctgcacggggcgtccagcaggataacccctccctttcatggcattttctctctcagacaaggcgaccagccagctcctgttggagacagattgggagtccattttgcagatctgcgacctgatccgccaaggggacacacagtgagttagcggggcctgtgccctgatgcggaggagcagccgtgcactaagctgggctcgcttggtgcccgttgggtctccacgacgtagctgaccgtgttaggctcttatgtggagaactgcatgggctacatgctaggattttttgacatcttggaggattaaggggttttctctgtacagcttgcagatacctggttatgtttgtatttgcttcggggttctcaaagactaag

SEQ ID NO: 1243678 - DNA, 4001 bp, Homo sapiens
ctgggcacagtggctcatgcctgtaatcccaacactttgggagaccaaggtgggtggatcacctgaggtcaagagttcgagaccagcctggccaaaatggtgaaaccccgtctctactaaaaatacaaaaattagctaggtgtagtggcacacacatgcagtcccagctactcagaaggctaaggcacaagaatcacttgaacctgggaggtggaggttgaagtgagccaagattgggccactgaactccagcccagggcaacagagtgagactccatctcaaaaaaaaaaaaaaaaaaaaatgattatcagaccaattctccttgtgcctcctcccagtcattactccataaaaggtaatcactatattgacttctaacagcataaatgttcaatattttatttttcagtagaaatcatggtaggttatataaagtaagtcaatagtaaagtcagactaacttacagaaatttacagtctctttgagatcagcctacttgaaatgtgagcttgacattctaagtaaagacttacaagcagtgctgggtctacacctctaactaagctcttggaagtctgtaaagatcttcagaccaggcagggtggcttacccctgtaattccagcactttgggaggctgaggcaagagggtcactttagtttttgcttactgagataacagaagacaagggaggattgctttaggccaggagtacaagaccagcctgggcaacatagcgagaccctgcctctatttttaaaaataataaaacaaaaaaaaattcaaaaagaaaaagacatacatccttgttccagagactgtgatttattttctttttaaattgctaaccaaagaaagctttactcctgggcaggggaggaggaagacacaaggaggatagccaatctcccattcattcggactctggtaaccacagagcggaggtaaccaaattccacaggcctcaccgctgaaattcaacagtggccagcagtagcttaatatcatggattacgcccaagtacacaacattcctttctaggatgagagaaagcgagcacagaatttatcctgttcacaaatgtggcgtaagtgaccaaagaatgataaatgttttaatcattcaaagaaagtccattataggtctataaaagtccagtgcattgcagcactcaaaatcttgccgggcgacaaaactagagattccttttctttgtttcgaaaaacaaatctcacagatgaggagacttttcaggaacatgctgggggagggaaggtacttcccgctcagatgccccttgaggcagctagtcccaattccccctgccaaccgcacagacacaccaccttgacctccctctcccttctctttcctcttattgctactcatgtgccccaggcgcccgtggtcctgacacccctgcgccgctggagacccctctaaggtaagatggctccgactacagggcctttttggcacgctcagtctcccagccccaagcgccaaaagtgcattagggagaaacgtcggcacgacgtcaagggcgcgaacaagcgtggtggcccaggtgagcgtgcgcggcagccaggcacgcccggctcccggggaaagacgccccttttttgccccggctgccaggccgctccttctcaacttgtgcgcccctggaagagcaaagagagggccctgcgtggaacctatgaagcctccttcggttcctcgctgctccggccctagagagggcgaagaaggaacagcggagcccaatccctttccgaaagccaccgccgccctccagtttctggcccgcagacgaagtggagatccagccaggtcttgagtgctgccgccccatccctgcagccggagactcacctgttgccactcaaggtaccgctacctacaacaccgccgactccgcggcctttaggatttcagctcagttcagctaaaccacgacaggcgtgggggcaggaacagcaaccaaccaatcacccaccgcctcctggagcttttgcaccaatgagctcgaagttttgtgagtgacgacatatctggccaatgcaaagaagagtaagggcctgggagggagggagcgccgtaggcgacgccatgaagctctggcaataccatgttcatcttcaaatcacagttaaacgaattctggcgagacacgcccacgtcccccacccccgatgccatgtgcgaccaatcagaaaagcaaaaggattgtctatttgcacggccaatcagctgggaaaatcgccgaggtttgagctaacctcggagcgtccacaccaaccgggaggggacatgtgggccgggccaagttaatagtgccatggaaggaaatttaccgcggttgagttaaacgtagacattagtttggggcggtgttccgcgtaggaaataccacacactgacactgaaattaggcataaggaagttttcctattccgcctgaggctagactgccctcccacctctacacagattttcaagttggggaaaatactggccacccgcacctcgttaagacgtcgcagaaccagtcctcgtttccgagaaatgctttctatagtcagttccctaaatgcccaacttgttagctaaagaggttacaaacgcctgtaaatggtacataactgaaatcatcagaacaacaaacatctattaaacatatactatgtgccagaaactatatcaagaacttcagcaggcccggcgcggtagctcacgcctggaaggccaaggctttgagctaggagttcgagaccagcctgagcaacatggcaaaaccccatctctgcaaaaaaaaacaaatttaaaattagccgggcatggtagcggctgtagtcccagctactcgggaggctgaggcaggaggatcacttgagcccaggaggtagaggctgcagagagccgtgatcacgccactgcactccagcctgggtgacaaagcgagaccctgtctcaaaaaacacgaacaaaaaaagttagaagatactgctagaattgactaaataaataaataaataaataagaaaaacaatgttacctgcaggaccgtaacgcccagtgaattacaaactattatccctggccagacgtggtggctcacacctgtaattccagcacactgggaggccgaggcgagcagatcacctgaggttgggagttcgagaccagcctgaccaacatggagaaaccccatctctactaaaaatataaaattagccgggcgtggtggcacacgcctgtaatcccagctacttgggaggctgagacaggagaattgcctgaacctgagaggcagaggttgcagtgagccaacatcgtgccactgcactccagcctagacgataaagcaagaccctgtctcaaaaaaaaagaaagaaaagaaactattatccctgctgttttacagaaaaatattaagtagcctgggtctgtcccactcccacaccttaatctttttctttctttttccttttttttttttttttgagacagggtctcactgtcgcccaggctggagtgcagtggtgcgatctcggctcgctgcaacctttgcttcccaggttcaagtgatcctcctgcctcagcctcacaagtagctggcattacaggcatgtgccactgcgcctgcctaatttttgtatttttagtagagacagggtttcaccatgttggccaggctggtcttgaactcctggcttcaagtgatccacccacctcagcctcgcaaagtgctgggattacaggcatgagccaccgcgcctggccaccttaatctttttaagcaaatacagaatggaaactgccctcacaggattaaggagagttacaagccaggctttaggcagcattatatatagttagctgttatccagggtgcacaagtgtactttgacccacttccctgcagctgctaactcactgaacatcactccacgtgctagaccacctcctacctgtttctccatggttcttaccat

SEQ ID NO: 1243679 - DNA, 4001 bp, Homo sapiens
ctgggcacagtggctcatgcctgtaatcccaacactttgggagaccaaggtgggtggatcacctgaggtcaagagttcgagaccagcctggccaaaatggtgaaaccccgtctctactaaaaatacaaaaattagctaggtgtagtggcacacacatgcagtcccagctactcagaaggctaaggcacaagaatcacttgaacctgggaggtggaggttgaagtgagccaagattgggccactgaactccagcccagggcaacagagtgagactccatctcaaaaaaaaaaaaaaaaaaaaatgattatcagaccaattctccttgtgcctcctcccagtcattactccataaaaggtaatcactatattgacttctaacagcataaatgttcaatattttatttttcagtagaaatcatggtaggttatataaagtaagtcaatagtaaagtcagactaacttacagaaatttacagtctctttgagatcagcctacttgaaatgtgagcttgacattctaagtaaagacttacaagcagtgctgggtctacacctctaactaagctcttggaagtctgtaaagatcttcagaccaggcagggtggcttacccctgtaattccagcactttgggaggctgaggcaagagggtcactttagtttttgcttactgagataacagaagacaagggaggattgctttaggccaggagtacaagaccagcctgggcaacatagcgagaccctgcctctatttttaaaaataataaaacaaaaaaaaattcaaaaagaaaaagacatacatccttgttccagagactgtgatttattttctttttaaattgctaaccaaagaaagctttactcctgggcaggggaggaggaagacacaaggaggatagccaatctcccattcattcggactctggtaaccacagagcggaggtaaccaaattccacaggcctcaccgctgaaattcaacagtggccagcagtagcttaatatcatggattacgcccaagtacacaacattcctttctaggatgagagaaagcgagcacagaatttatcctgttcacaaatgtggcgtaagtgaccaaagaatgataaatgttttaatcattcaaagaaagtccattataggtctataaaagtccagtgcattgcagcactcaaaatcttgccgggcgacaaaactagagattccttttctttgtttcgaaaaacaaatctcacagatgaggagacttttcaggaacatgctgggggagggaaggtacttcccgctcagatgccccttgaggcagctagtcccaattccccctgccaaccgcacagacacaccaccttgacctccctctcccttctctttcctcttattgctactcatgtgccccaggcgcccgtggtcctgacacccctgcgccgctggagacccctctaaggtaagatggctccgactacagggcctttttggcacgctcagtctcccagccccaagcgccaaaagtgcattagggagaaacgtcggcacgacgtcaagggcgcgaacaagcgtggtggcccaggtgagcgtgcgcggcagccaggcacgcccggctcccggggaaagacgccccttttttgccccggctgccaggccgctccttctcaacttgtgcgcccctggaagagcaaagagagggccctgcgtggaacctatgaagcctccttcggttcctcgctgctccggccctagagagggcgaagaaggaacagcggagcccaatccctttccgaaagccaccgccgccctccagtttctggcccgcagacgaagtggagatccagccaggtcttgagtgctgccgccccatccctgcagccggagactcacctgttgccactcaaggtaccgctacctacaacaccgccgactccgcggcctttaggatttcagctcagttcagctaaaccacgacaggcgtgggggcaggaacagcaaccaaccaatcacccaccgcctcctggagcttttgcaccaatgagctcgaagttttgtgagtgacgacatatctggccaacgcaaagaagagtaagggcctgggagggagggagcgccgtaggcgacgccatgaagctctggcaataccatgttcatcttcaaatcacagttaaacgaattctggcgagacacgcccacgtcccccacccccgatgccatgtgcgaccaatcagaaaagcaaaaggattgtctatttgcacggccaatcagctgggaaaatcgccgaggtttgagctaacctcggagcgttcacaccaaccgggaggggacatgtgggccgggccaagttaatagtgccatggaaggaaatttaccgcggttgagttaaacgtagacattagtttggggcggtgttccgcgtaggaaataccacacactgacactgaaattaggcataaggaagttttcctattccgcctgaggctagactgccctcccacctctacacagattttcaagttggggaaaatactggccacccgcacctcgttaagacgtcgcagaaccagtcctcgtttccgagaaatgctttctatagtcagttccctaaatgcccaacttgttagctaaaaaggttacaaacgcctgtaaatggtacataactgaaatcatcagaacaacaaacatctattaaacatatactatgtgccagaaactatatcaagaacttcagcaggcccggcgcggtagctcacgcctggaaggccaaggctttgagctaggagttcgagaccagcctgagcaacatggcaaaaccccatctctgcaaaaaaaaacaaatttaaaattagccgggcatggtagcggctgtagtcccagctactcgggaggctgaggcaggaggatcacttgagcccaggaggtagaggctgcagagagccgtgatcacgccactgcactccagcctgggtgacaaagcgagaccctgtctcaaaaaacacgaacaaaaaaagttagaagatactgctagaattgactaaataaataaataaataaataagaaaaacaatgttacctgcaggaccgtaacgcccagtgaattacaaactattatccctggccagacgtggtggctcacacctgtaattccagcacactgggaggccgaggcgagcagatcacctgaggttgggagttcgagaccagcctgaccaacatggagaaaccccatctctactaaaaatataaaattagccgggcgtggtggcacacgcctgtaatcccagctacttgggaggctgagacaggagaattgcctgaacctgagaggcagaggttgcagtgagccaacatcgtgccactgcactccagcctagacgataaagcaagaccctgtctcaaaaaaaaagaaagaaaagaaactattatccctgctgttttacagaaaaatattaagtagcctgggtctgtcccactcccacaccttaatctttttctttctttttccttttttttttttttttgagacagggtctcactgtcgcccaggctggagtgcagtggtgcgatctcggctcgctgcaacctttgcttcccaggttcaagtgatcctcctgcctcagcctcacaagtagctggcattacaggcatgtgccactgcgcctgcctaatttttgtatttttagtagagacagggtttcaccatgttggccaggctggtcttgaactcctggcttcaagtgatccacccacctcagcctcgcaaagtgctgggattacaggcatgagccaccgagcctggccaccttaatctttttaagcaaatacagaatggaaactgccctcacaggattaaggagagttacaagccaggctttaggcagcattatatatagttagctgttatccagggtgcacaagtgtactttgacccacttccctgcagctgctaactcactgaacatcactccacgtgctagaccacctcctacctgtttctccatggttcttaccat

SEQ ID NO: 1243680 - DNA, 4001 bp, Homo sapiens
accaaatcaagaaaagatgatttatcaggctgggcacagtggctcatgcctgtaatcccaacactttgggagaccaaggtgggtggatcacctgaggtcaagagttcgagaccagcctggccaaaatggtgaaaccccgtctctactaaaaatacaaaaattagctaggtgtagtggcacacacatgcagtcccagctactcagaaggctaaggcacaagaatcacttgaacctgggaggtggaggttgaagtgagccaagattgggccactgaactccagcccagggcaacagagtgagactccatctcaaaaaaaaaaaaaaaaaaaaatgattatcagaccaattctccttgtgcctcctcccagtcattactccataaaaggtaatcactatattgacttctaacagcataaatgttcaatattttatttttcagtagaaatcatggtaggttatataaagtaagtcaatagtaaagtcagactaacttacagaaatttacagtctctttgagatcagcctacttgaaatgtgagcttgacattctaagtaaagacttacaagcagtgctgggtctacacctctaactaagctcttggaagtctgtaaagatcttcagaccaggcagggtggcttacccctgtaattccagcactttgggaggctgaggcaagagggtcactttagtttttgcttactgagataacagaagacaagggaggattgctttaggccaggagtacaagaccagcctgggcaacatagcgagaccctgcctctatttttaaaaataataaaacaaaaaaaaattcaaaaagaaaaagacatacatccttgttccagagactgtgatttattttctttttaaattgctaaccaaagaaagctttactcctgggcaggggaggaggaagacacaaggaggatagccaatctcccattcattcggactctggtaaccacagagcggaggtaaccaaattccacaggcctcaccgctgaaattcaacagtggccagcagtagcttaatatcatggattacgcccaagtacacaacattcctttctaggatgagagaaagcgagcacagaatttatcctgttcacaaatgtggcgtaagtgaccaaagaatgataaatgttttaatcattcaaagaaagtccattataggtctataaaagtccagtgcattgcagcactcaaaatcttgccgggcgacaaaactagagattccttttctttgtttcgaaaaacaaatctcacagatgaggagacttttcaggaacatgctgggggagggaaggtacttcccgctcagatgccccttgaggcagctagtcccaattccccctgccaaccgcacagacacaccaccttgacctccctctcccttctctttcctcttattgctactcatgtgccccaggcgcccgtggtcctgacacccctgcgccgctggagacccctctaaggtaagatggctccgactacagggcctttttggcacgctcagtctcccagccccaagcgccaaaagtgcattagggagaaacgtcggcacgacgtcaagggcgcgaacaagcgtggtggcccaggtgagcgtgcgcggcagccaggcacgcccggctcccggggaaagacgccccttttttgccccggctgccaggccgctccttctcaacttgtgcgcccctggaagagcaaagagagggccctgcgtggaacctatgaagcctccttcggttcctcgctgctccggccctagagagggcgaagaaggaacagcggagcccaatccctttccgaaagccaccgccgccctccagtttctggcccgcagacgaagtggagatccagccaggtcttgagtgctgccgccccatccctgcagccggagactcacctgttgccactcaaggtaccgctacctacaacaccgccgactccgcggcctttaggatttcagctcagttcagctaaaccacgacaggcgtgggggcaggaacagcaaccaaccaatcacccaccgcctcctggagcttttgcaccaatgagctcgaagttttgtgagtgacgacatatctggccaatgcaaagaagagtaagggcctgggagggagggagcgccgtaggcgacgccatgaagctctggcaataccatgttcatcttcaaatcacagttaaacgaattctggcgagacacgcccacgtcccccacccccgatgccatgtgcgaccaatcagaaaagcaaaaggattgtctatttgcacggccaatcagctgggaaaatcgccgaggtttgagctaacctcggagcgtccacaccaaccgggaggggacatgtgggccgggccaagttaatagtgccatggaaggaaatttaccgcggttgagttaaacgtagacattagtttggggcggtgttccgcgtaggaaataccacacactgacactgaaattaggcataaggaagttttcctattccgcctgaggctagactgccctcccacctctacacagattttcaagttggggaaaatactggccacccgcacctcgttaagacgtcgcagaaccagtcctcgtttccgagaaatgctttctatagtcagttccctaaatgcccaacttgttagctaaagaggttacaaacgcctgtaaatggtacataactgaaatcatcagaacaacaaacatctattaaacatatactatgtgccagaaactatatcaagaacttcagcaggcccggcgcggtagctcacgcctggaaggccaaggctttgagctaggagttcgagaccagcctgagcaacatggcaaaaccccatctctgcaaaaaaaaacaaatttaaaattagccgggcatggtagcggctgtagtcccagctactcgggaggctgaggcaggaggatcacttgagcccaggaggtagaggctgcagagagccgtgatcacgccactgcactccagcctgggtgacaaagcgagaccctgtctcaaaaaacacgaacaaaaaaagttagaagatactgctagaattgactaaataaataaataaataaataagaaaaacaatgttacctgcaggaccgtaacgcccagtgaattacaaactattatccctggccagacgtggtggctcacacctgtaattccagcacactgggaggccgaggcgagcagatcacctgaggttgggagttcgagaccagcctgaccaacatggagaaaccccatctctactaaaaatataaaattagccgggcgtggtggcacacgcctgtaatcccagctacttgggaggctgagacaggagaattgcctgaacctgagaggcagaggttgcagtgagccaacatcgtgccactgcactccagcctagacgataaagcaagaccctgtctcaaaaaaaaagaaagaaaagaaactattatccctgctgttttacagaaaaatattaagtagcctgggtctgtcccactcccacaccttaatctttttctttctttttccttttttttttttttttgagacagggtctcactgtcgcccaggctggagtgcagtggtgcgatctcggctcgctgcaacctttgcttcccaggttcaagtgatcctcctgcctcagcctcacaagtagctggcattacaggcatgtgccactgcgcctgcctaatttttgtatttttagtagagacagggtttcaccatgttggccaggctggtcttgaactcctggcttcaagtgatccacccacctcagcctcgcaaagtgctgggattacaggcatgagccaccgcgcctggccaccttaatctttttaagcaaatacagaatggaaactgccctcacaggattaaggagagttacaagccaggctttaggcagcattatatatagttagctgttatccagggtgcacaagtgtactttgacccacttccctgcagctgctaactcactgaacatcactccacgtgctagaccacct

SEQ ID NO: 1243681 - DNA, 4001 bp, Homo sapiens
accaaatcaagaaaagatgatttatcaggctgggcacagtggctcatgcctgtaatcccaacactttgggagaccaaggtgggtggatcacctgaggtcaagagttcgagaccagcctggccaaaatggtgaaaccccgtctctactaaaaatacaaaaattagctaggtgtagtggcacacacatgcagtcccagctactcagaaggctaaggcacaagaatcacttgaacctgggaggtggaggttgaagtgagccaagattgggccactgaactccagcccagggcaacagagtgagactccatctcaaaaaaaaaaaaaaaaaaaaatgattatcagaccaattctccttgtgcctcctcccagtcattactccataaaaggtaatcactatattgacttctaacagcataaatgttcaatattttatttttcagtagaaatcatggtaggttatataaagtaagtcaatagtaaagtcagactaacttacagaaatttacagtctctttgagatcagcctacttgaaatgtgagcttgacattctaagtaaagacttacaagcagtgctgggtctacacctctaactaagctcttggaagtctgtaaagatcttcagaccaggcagggtggcttacccctgtaattccagcactttgggaggctgaggcaagagggtcactttagtttttgcttactgagataacagaagacaagggaggattgctttaggccaggagtacaagaccagcctgggcaacatagcgagaccctgcctctatttttaaaaataataaaacaaaaaaaaattcaaaaagaaaaagacatacatccttgttccagagactgtgatttattttctttttaaattgctaaccaaagaaagctttactcctgggcaggggaggaggaagacacaaggaggatagccaatctcccattcattcggactctggtaaccacagagcggaggtaaccaaattccacaggcctcaccgctgaaattcaacagtggccagcagtagcttaatatcatggattacgcccaagtacacaacattcctttctaggatgagagaaagcgagcacagaatttatcctgttcacaaatgtggcgtaagtgaccaaagaatgataaatgttttaatcattcaaagaaagtccattataggtctataaaagtccagtgcattgcagcactcaaaatcttgccgggcgacaaaactagagattccttttctttgtttcgaaaaacaaatctcacagatgaggagacttttcaggaacatgctgggggagggaaggtacttcccgctcagatgccccttgaggcagctagtcccaattccccctgccaaccgcacagacacaccaccttgacctccctctcccttctctttcctcttattgctactcatgtgccccaggcgcccgtggtcctgacacccctgcgccgctggagacccctctaaggtaagatggctccgactacagggcctttttggcacgctcagtctcccagccccaagcgccaaaagtgcattagggagaaacgtcggcacgacgtcaagggcgcgaacaagcgtggtggcccaggtgagcgtgcgcggcagccaggcacgcccggctcccggggaaagacgccccttttttgccccggctgccaggccgctccttctcaacttgtgcgcccctggaagagcaaagagagggccctgcgtggaacctatgaagcctccttcggttcctcgctgctccggccctagagagggcgaagaaggaacagcggagcccaatccctttccgaaagccaccgccgccctccagtttctggcccgcagacgaagtggagatccagccaggtcttgagtgctgccgccccatccctgcagccggagactcacctgttgccactcaaggtaccgctacctacaacaccgccgactccgcggcctttaggatttcagctcagttcagctaaaccacgacaggcgtgggggcaggaacagcaaccaaccaatcacccaccgcctcctggagcttttgcaccaatgagctcgaagttttgtgagtgacgacatatctggccaacgcaaagaagagtaagggcctgggagggagggagcgccgtaggcgacgccatgaagctctggcaataccatgttcatcttcaaatcacagttaaacgaattctggcgagacacgcccacgtcccccacccccgatgccatgtgcgaccaatcagaaaagcaaaaggattgtctatttgcacggccaatcagctgggaaaatcgccgaggtttgagctaacctcggagcgttcacaccaaccgggaggggacatgtgggccgggccaagttaatagtgccatggaaggaaatttaccgcggttgagttaaacgtagacattagtttggggcggtgttccgcgtaggaaataccacacactgacactgaaattaggcataaggaagttttcctattccgcctgaggctagactgccctcccacctctacacagattttcaagttggggaaaatactggccacccgcacctcgttaagacgtcgcagaaccagtcctcgtttccgagaaatgctttctatagtcagttccctaaatgcccaacttgttagctaaaaaggttacaaacgcctgtaaatggtacataactgaaatcatcagaacaacaaacatctattaaacatatactatgtgccagaaactatatcaagaacttcagcaggcccggcgcggtagctcacgcctggaaggccaaggctttgagctaggagttcgagaccagcctgagcaacatggcaaaaccccatctctgcaaaaaaaaacaaatttaaaattagccgggcatggtagcggctgtagtcccagctactcgggaggctgaggcaggaggatcacttgagcccaggaggtagaggctgcagagagccgtgatcacgccactgcactccagcctgggtgacaaagcgagaccctgtctcaaaaaacacgaacaaaaaaagttagaagatactgctagaattgactaaataaataaataaataaataagaaaaacaatgttacctgcaggaccgtaacgcccagtgaattacaaactattatccctggccagacgtggtggctcacacctgtaattccagcacactgggaggccgaggcgagcagatcacctgaggttgggagttcgagaccagcctgaccaacatggagaaaccccatctctactaaaaatataaaattagccgggcgtggtggcacacgcctgtaatcccagctacttgggaggctgagacaggagaattgcctgaacctgagaggcagaggttgcagtgagccaacatcgtgccactgcactccagcctagacgataaagcaagaccctgtctcaaaaaaaaagaaagaaaagaaactattatccctgctgttttacagaaaaatattaagtagcctgggtctgtcccactcccacaccttaatctttttctttctttttccttttttttttttttttgagacagggtctcactgtcgcccaggctggagtgcagtggtgcgatctcggctcgctgcaacctttgcttcccaggttcaagtgatcctcctgcctcagcctcacaagtagctggcattacaggcatgtgccactgcgcctgcctaatttttgtatttttagtagagacagggtttcaccatgttggccaggctggtcttgaactcctggcttcaagtgatccacccacctcagcctcgcaaagtgctgggattacaggcatgagccaccgagcctggccaccttaatctttttaagcaaatacagaatggaaactgccctcacaggattaaggagagttacaagccaggctttaggcagcattatatatagttagctgttatccagggtgcacaagtgtactttgacccacttccctgcagctgctaactcactgaacatcactccacgtgctagaccacct

SEQ ID NO: 1243682 - DNA, 4001 bp, Homo sapiens
gtctctggggcaagataaggagaggaaaatgccccagaccaaggtaagagctacagttatcagtctttaataacttacaggcaaatgctaaaaaatagttaataacaataatacagaggacacacacagcttataaaaagggtcatggatctacaaatgtggggaggggttcttggcactttcacagacacaaaaataaaaactatgtgactggtattcctagaaaagcagcctggggagactccccagttgggggacagaggaaggggagatagttatttcatcccaaacacattctccaagtcacttccatccccccgcccccaaacacatccaattaaaaatttttagccagagaagaaaaataagaaacagggtcgaggtagagtcacagtttacatttacgtctccacagtcctgcagcgcccacttctccagagaggatgagagagatatgcaaagacatcccatctcccatccccaccccagtgtggcaccaaaacgggacaccccatgctcctctctccttcattgaggtggacaggtcctgcaccccagtctgactgagaggtcacaggctggtcccaccctgctgtccaagtgtgcagacccctactaggtgggaggaaagggagggggggcttgggtcaccgtctcttcttgccaccccgagctgccttcttcctcttgaggatcatctcatagaggcgctcaaggccctgctgcaggcccagaccgtccacagcgctgcagccttgcacatgagtgagagtggcggctgctagctctcggactgccagcctcttctccacctcagcagcgctcagtgccccgggctggtcctgcttgttggccagcaccagcactggcacgccctggttgtccgaggcccggctgattcggtgcaactccaccttggcttcctccagccgctcagcctccgcagcgtccaccacaaacactagaccgtctgtccggcgggtataagagcgccacagtggtcgcagcttctcctgccccccgacgtcccacacttggaaggtgatgccacgcgatcccccgaggggcacccggatcttctcggtgttgaagcctttggtggggacactctggacaaactccttgaacttgaggcggtaaaggagggaggtctttccagcagagtccagcccaatgaccacgacatgcagggcttggaagtggggcaagaaggaggaggcagtgggcgccatctcagtcaagtggttccccatagtgagctaaggcgcctagtagaggcagggaggccttgaaattgaaggttccagggagcacagctgggttatctgaaccaagaaaaggtcatgggagaaaaaggagacgtttaataatacacacaagatttgcaacttcttgatcccttcctaaatcaccctcccatccttcatttttaaaattcctttcctttttttttttttttttaaggcataacagaggtgttcccccactccctgggggggtcgtgaggggggcgatgggacctagagagactcccaggtcctgggccactcaagtggggggtgagggctcgatccatggacagtgggcttctagagcctcttctcagagcttatggcgccatcccccaggcaagatccccgagggacgggggaagtcgacagtgcccccaaactaagagctagggtgcagacgctgagaccggagattgagtccggctcccacccgccctccgcagccccaagccgttgacacggtgcccttccttactccgcgaccctcgccccaccgccccgcgacactctcctgcccgcccgccctcctccgatggccgaccccagctccagcggcccggcaccgggaccgcctcagcacggtctgcagggtccgtttacctctcgtgagccgcgctctcctcgagcctttcccggtgaaacaccgcagccgccccgcgagacccccgcagacacccaccgcgcctccaaccgctgcctctgcagagcctgcctagggttcggccttaaaaacccgcgtgtgacgtcacaaggcgcgggacaatcagcggcggcggggcggagcgtggagctacgggcgctgcagcccccaccatacgcggaggggcgtttgcttaatccgtggctgctctatttgaccttttctaccacactctaatatttggaattaaacttggaattaatgcagaatggagggtgggaggggcgaaaggaacgtgcctggcaacgtttgactcgggaggaaagatatgaataccctaatattctcactaccatcgcatccccctccaccaggccgagataccaccccacatggacactccttcggccaaaggatctactcggagaggctgacaagtctttctcctttatctttcataattcaattgtcaaacctaaggtgaacctggagccccataaaacagctgcttcatagtgctaagcccattatctgcaatagcctgttagggactgttgtctgccttttacagatacacaaagccctgaagggttaaatgacctatttgaggttacactcaacagtatgtttaggcgcagtggatcatacctgtaaactcagcactttgggaggctgaggcaggcacatcacttaagctcaggagttccaccagcctggacaacagggtgaaaccccatcagtaataaaaagacaaaaattagccgggcgtggtggcgggtgcctgtaatcccagctactcgggaggctgaggcaggagaatcgcttgaacccgggaggcggaggttgcagtaagctgagatagcgccactgcattccagcctgggcgacagagcaagactctgtctcaaaacaaagcaaacaaaaaaaaaaaaccagtgtgtttattgggctgggcacggtagctcacgcctgtaataccagcattttgggaggccgatgtgggcgaagcacctgaggtcaggagttcgagaccagcctggccaacatggtgaaaccccgtctctactaaaaatacaaaaattagctgggtgtggtggcgggcgcctgtaattgcaactattcgggaggctgaggcaggagaatcacttgaacccgggaggcggaggttgcagtgagctgagatcacaccattgcactccagcctgggcaacagagcaagactctgtctcaaaaaaaacaaaaacaaaacaaaacaaaacaaaaaacactgtgtttattgacctcattcatactgtgtgctctgaatgagacagagagatggtggagaaatagaggatgtctcggctgtagaatcaggcctcaaagggcttaagacttaagactggcaatgacagaatgagacagcacatgtattgggtctttgtaaatcatgagatagcacttgtaggatttcagagaagagagagaatgtgtcaactggaagcttctgaaaaggtttatagacgttctttagccctatctaggactggttaggaggggcacaggaatgagtagggtctccccagccactgcagcctgctacagtctgggcagccctgaaaggaaggagatgtcacaaagggcagtgtgaccaaaaggacaacagcaattaggtgggggagagaagagggccaatcaaagaagaatgaaattgtaaattgtaactttatctatttatttatttatttatttatttatttatttttgagacagagttttgctcttgttacccaggctggtgtccaatggtgcgatctcggctcactgcaacctccacctcccaggttcaagcaattctcctgcctcagcctcccgagtagctgggattataggcatgtgccaccacgcccggctaattttgtacttttagtacagacaggatttctccatgttggtcaggctggtctcgaactcccgatctcaggtgatccgcccgcctcgacctcccaaagtgttgggatttacaggcgtggattattttatttattgtgtaattcagtattaatctttttaagggctatgtgtgagag

SEQ ID NO: 1243683 - DNA, 4001 bp, Homo sapiens
gatccgcccgcctcggcctcccaaagtgctgcgattacaggcactttgagagcaacagcgcccggccatggttttgcattcctaataagctttcaggtgatgcctgtgtgactggtctgtagaccacactttgaggagcaagagtttagaaaaatgagacagacacagtgagggacatcagagaggtgctttgtttaaagtgacatagaaaatatacacatgcttttatatgtaaataatgcttctgaaaagttacgcaaagttacaataggaggaaaactaggagccagaggcaagaaggaaacttacttttcaccgtgtattcctccattgtttgaaattttcctttataattttttaaaatcattacatgtattactttttcatggaaaagcttctcctaagtaaagtactttggaggctgtaaaatgggagaggtgccatccagagagcgaatatcggggaaagctgcgatcggtatttactcagcaccacccatatgtgccaggcttgctagaccaggagctacagagcctcagtgagcctttgggtttgaagaaggggaagaaagttaactggcagaggggacaggggtgagaaaggagggacctgccgctagagggagcgaagagcagggaggcagtttgggacacttggcaggcctggagctgggtttggcagggcccccgggaagatggaggaaagcagtgggagctagggttgcctgtacggtgcaggatttgaatgccagaccgaggagccgcagtactaggaaggtccaagcagcgtgcccaatcgctcctccggactacagaggagcccgggaacccagggaagagctccagtgattggtccccctgcctgtcagtctggtgggaggcccagctctctaccctccccgcccgagagtcacttacaaccggtagagaatggtggtctttccttcattgtccagtcccacgatgatgaccgtgtgctctggaagcgtcggaggaagggcagcgtcagggccaaacccgaagaccaagggactgtgtgcccccaccagacctcccaggaaggagatagcgctccccgcaggctggggacctctgcccaccgtaccgcgtctgcttcccacccagctccgacacctgccccactccgggacggtggaaaagacagctgagcccccacctcccttcacattccagaaaagtgtctgaaaggcccggggcgcttcggggcttgccaagagacggtgtttagagaaagagcataacgcgaagtcacaatcgcaggaaactcgcagcagccccccatccccgccgctggctccgtttagcggggagaaaggagggtcgcccagctttgcgtcctggggcgcaccgaagcgccgggacccaagaggagcaggcagggacgggggcaggggaggccgcggggcagtcgaggagcgcccatatacgaccctcggagcccgaggtccccccgtgcgtccgaccacagatcagaggagtcccagaagagggcgagatcaaagcgctcgcttggatgccctgtgcgccccttaccctggttcccgaagatgctcattaacttggcgatcagctgtcccatggcacttcccgggccggacaggtgcaggagggctcagcggcctcaggagcggagtcggccctggtattcggagctccgctcccccgggagggtctggcagattttgcctacgaagttagggaagccccacacgtcaccaacctgacctgggaaccctctgggacgctggcccttcgtgggcactatggacaccccagtgactaagggctgcctgtcccgggcccaagaggtgcaaggaatatgggggttccaggctccagccctccccctcgccctgcgaaaactcctgagttctccgggtggactgctccactaccgcaaatcaggggagactcagcactgcgcgcggaaccggatcccagctctccctcctctgagtgccatgtctagggcactagactgaagcaaaaccccaggcgacccactttctgtacctaccagctgtgtagtacagacagggctcaccgatcctctctgagctgggagaatattccaaccctccacagatgtgcagttggttcactagcgtgggtcttgtgggcccactcaaattgcattcccctggggaagggcagggtctccccttgatgcttggcaacttctaggataaatcagtactcctacaattcacggacaaacctactgcccaggcacagcttcctgatccccaaaagtgggcgcctgaagacaaggatggagcatgaagagagatcctccggctggagaccctgcagagaggccccagatacctggcagaggagtacatgggccaacagagaaccaggaggccaggcctgaggagggaatggaaggtggagtttcctgctgttgcttgtgaatttctttctttgcttaagctggggggaaaaaaacaaaaaatcagataacaaaaggagaagtccaaaaggcaacgtgccctcaggctgcaggaatggttagcaggagatccagccaacacaccagggagccagctccttccacccgactgtactgccttcctgcagcctccactaaggtaacaaccctccattaaggtaacaactttctaactggtctccctgcatcttcctctcctttcccaaggcatcctctccatggcccctattaaccttcctaaagcacagctcagggtctgtaactcccccagctcatagatcttcaatggctccctattgctcactggattcagatcagtctccacttgacattcaagagcttccacgaacagcccccacctgccttcacaggtttatctcccaggctctgtatctactggttcctgcctatacatgcctggctctttctgatggtgcctttgcttctgcatttcctccttgagtgcctttcaccttctcagaaaggagaatgcctgagacccattagctgccctgccataaaagccacctgcttccccagccctgacttggttctccagccacatggggcttctccctacactgggcttatagacgggcaagtctgtttcctcccatcaactgtgagtaccagggtgggattcatatattgttaaccagcatatgacctcccccgccagcccaatcactccctgcctggtccagaaccctgcacacaggaggaatgtgttgctgtcagactgatgtagaatgagttaagctacagcctgagaaatggcacttggagtattaaaaaaggaatgtgaacacaagtttaagaggattgaggaaggctgggaagtttgcgggaagaagaaggaaaatagctgactaaatacagactttcatcccaccctgcttggtgcccagagttagaaggatagagttgactgccagagcccatctgggctgattgcatttcagccttaggagagaaggagccaagtctggggctggggggtggggcaccaagggtgctgagggaagcagcagtgtcttaagcattttaccatctgtttcctggggttagtgggatgcggggaggaacatcttagtgcatgctgccctccccacctcctctttgcagaattgaaagtaacactctgcaagctggaaacacattcagtaaacagacaaggagagggcatctctctgagcatactctggctctggaagctgcctgattaaaaaaaataataattaaaagagaaaagaagaaaaaaaaaagaaaagaaaatagaaaaacagacgagaagatctgcctccactttgaggcccaggacctggatcttaagaagcattcattcgttcattcattcatttgacaaatatgagccaggaaatacatgaagtagacaaaacagacctagtccaggtgtttatgtttttgttttgttttgttttgttttgtttttttgagacagaaccttgctctgtcacccaggctggagtccagtggcaggatcgcggctcactgcagcctcaacc

SEQ ID NO: 1243684 - DNA, 4001 bp, Homo sapiens
ctaaccacctgtcccccctactagaatgtaagctcctgaggggcaaagacctttccctaagctgttcaccatactccagcatttagagcagtagcttgcatatacggtacacgcgcaataaatatctacccagtgaataactcaataggtcttaagatcataacaactacagaagccataagttacagactgcaagccatctctgcttctcttgatatgaaaacactaaatatgagttatttttgtttttgagacagattctcgttttgtcacccaggctggagtacagtggcccaatcccagctcactgcagccttgacctcccaggcttaagcaatcctcccacctcagcctcctgagtagctgggacaccacgccagactaatttttttttttttttttttaaagcagagatggggttttgtcatgttgcccaggctggtcttgaactccggaactcaagtgatctccctgcttcggcctcacaaagtgctgagattaaaggtgtgagccacctcacccgcctgaaattgcttttttttttgagacagagtctcactgttgcccaggctggggtgcggtggtgccatcttggctcactacaacctctgcctaccgggttcaagcgattctcctgcctcagcctcccaagtagctgggattacaggcgcccaccaccatgcccggctaatttttgtatttttagttagagatggggtttcaccatgttggccaggctgatcttgaactcctgacctcaggtgatccgcccacctcagcctcccaaagtgctggtgctggtattacaggtgtgtgccaccgcgcccggctacaaaactgctctttttaaaacatatttttttgagacatggtctcactctgtcgcccaggctggagtgcagtagcacaatctcagctcacttcggcctctgcctcccagactcaagcaatacctcctgcttcagtctccagagtagctgggcctacaggtgcacaccactgtgtgcggcttttttttttttttttttttttttgagacggggtctcactcttgtccccgaggctgtggtgcagtggcacgatctcagctcactgcaacatttgcctcctgggttcaagcttctcctgcctcaggctcactagtagctgggattacaggcactctccaccacgtctagctaatttttgtacgagacggggtttcgccatgtgggccaggctggtctcgaactcatgacctcaggtgatccgcccgccttagcttcccaaactgctgggattacaggtgtgagccaccacgcccggccccaaggactcacttctaattcacttatctcaccctggcccatttaggcatctagggaacgggccccgcccttaccaatagcaaactccaccagggtctcattctcctccgacagcgaatcgagaaataaatccaggacctgcagctgccgcagatactcgtagttgctggggtcataagcgaagttggcgaggttggcgaggacttgctccttggcgtctgcaacgggaaagcggcactgaagccaggtccgggcggcggtcacagcggaccctgccacctgatcccaccgtggctctcaccttggctttgggtctcctggaattccgtgaccagcgcctgcaggtatcccagccgcccgacgtgggggtccaccttcggcttctgggccatggccgcggtgacggaggacccccagggacgggcgggagggtgggaaaggtgcagggggaaagccgagcgagaccctcacccgctctccacctgtctggagagggaagagggggtcggcaaatgggtttctttcctgggttcagattctgcagtaatttgcagctggaaatgggatatgggagatgggacggggtctcagaatcctgtaggagttgcgtttgaaaatcgaaattggggcgcgggagacagggaaccgtctactggttggggctcgcggagggggcactggcgcaccgtccccggctcctgggctcggttccgggctcccggcggaagccgcgctgtccctacccccgaaggggcggggccgtcgccgaactccttggcgcgcgtgcgcggcgcgcttctggttttctggatgccgaagctctttagcctgtgctggaaccagcggcgagcggcttcgctgaggcaggtgcaggcgtgggtgggtgtactgcgaggagcagcctggcctcccgtatcccatgtccagatgcaaattactgcaaaatctgaacgcaagaaagaaacccacttgccgcccccgccaacagatgggcgagtgagggcctcgctcggctttcccgccccacctttcccactctcccgccggtcccccggggtcctccgccgtcccgacatggcccagaagccgaaaatgagacacccatgtcgggtggctggaattccgccaggagcaactcaggagcgcagcagagtctggcagcacccatgttggaggacgtcgaggcagaagcacctccagggtccccacggctggcgggggcgcggcccatcctccttgaccaggacgcccctttggagcgcgggcgtcagctccttacgccccccatcagtcctttgccccttttgcaaaaagcctagcgaccccgacccgccctccatcccagccccgaggtgggtccgccacctctggacagaaatcaaagggtactgggtcatgtcctggtgctttttgtcagccgggtggatggcgcgcgcccggggcagcacgggggagcccgaggaggagccttgattgtggcgctttcggggctttctggatgctgaagcccttcggccgattccttctcggagattatcaggaagcgggtgtgtgatagattgctcgtggttacaggaaacaaagcaccagggaaggaggtggtctagccacactcccatcgcatttgacaacgtaggggtagaggtggcttaggctgtgagtgtcctgagagtgcaaaagttgttaatctaaatggagtcacttgtgttaaaaaacagaacaaaaaaacccggacacagcccaagaaacccatgacaagagggttctcgtgcataaatacctgataatgaaaactatcacaaagactctgcaaaaaccacaaccttgcacaaagggcgtcacaaccttgcacaaaacatacttttgaatggccatctgcccagcaaccgcttgtccaaccttgagcggtcacccttgttattaatccttctacctaaggataaatatttcaaaacaattatgtaatcctattttttcccttaaagcctgtcttcctttacctccctgaatacccatatagtttactatggcatggatactaccattgcaatgccctatgcccaaatagatatcattttctttgagagagcctctctgttatttaggctgacaaaggcaaggaccattatcttaagccctgggcccggatgaaggcagagtggccgtcacactccagccagctgcagccccattggaagcaggcctcacctctgaggtttcaggtccttgtggtcagcccctgccctatgtacaccctctgaggcaggagtttctaacttagtctgggtacctaggccccaggaccctcaccaaagccctttggcttctcttgggagcctctgcagcctgggaagtgcatcttacccctaggtgcccaaggggtttctctgcctcttgctggacagagcagcaaataggagcccagaaacagggaggatggaagtaagctccatccctccctgcccaggaactgccccagaccttctctagaggttcgcaggcaatcagctagatggggattgctgaatcagatgggccaccccatcttccctcattggtcttctccctttttttctttttgagatggagtctcgctctgtcgccaggctggagtacagtggtgcgatctcggctcactacaacctccgcctcagattcaagtgattctcctgcctcagcctcccgagtagctgg

SEQ ID NO: 1243685 - DNA, 4001 bp, Homo sapiens
taccacagtgtctgggtaagacctaaccatctttccatctggtctccagctctgacagctggagcatataggagagcaatgaccctggcctttggccctacatggtttctaccataggcccagtttctgctacaacttcacttgccccttcttcccagaaagccaagctgtccaaaggttgtaaggcaaagggtatggagggccccaggtattcctaaccaataaaagagaatacacatcgatatggtagccgctagaataaacaccctatctttcatcccaacttgggagctgagtgccgtggcatcatccaggctctccctcccctttgcttctggttttcctctttgtcccagggtgtcctcccattaggagccctggcacagggctgtgacagccacaatcagtgggccaactggagtgtggttctggggcaattgccctggagcagctgcaaggcacttgccctttggatcctaacccagccacctcctgccaggctggggaggagcagcgtgcatatactaggctggccaaggaggcagagtgtggggatgaccagggaggtgcccagtgggagcaggggtagctgaagcagatgtcctttcacacttcctgctattcgctccatttcctgtggcccagaatttcatgggggtgagggaaattgtgccaagttagcagtctcctttggtccatccgtcccactccctgaaccacatgacggaaatcaggggcctcccacaagtcagcaacttcccctttctctgggatgtttaaaccctgatccaggagacggatcatctctctgatgatctctttctgatgctcgtctacttgatgctcagaaacccgggttctcatactctataggttggaagtggggttgatatgatgttttgcagagcaagccagagctcaggaccaattccctattcctgataccctctgagttgaggcctacagccccaaccttttcgtcttttgctcccgctcccctgcgactcaggcatccaccccttgccccttgggggtgttgagtcacaacaggaagtggattttgctagagaccaaaaaagagaactcggggtatcagtggaaggaaagagcctcgattgcacagaaaacatccggggagtggacgcgcgcccagggtgaatactgcctcccccacccccagagagagggatacgatctagtttcagggagggtcgccacgcactcggctcccccaagatgaagctgttgctcctggcaacccaagggaaggtagaagtttgggtgaggagccacccggccctcgggacaggtgtgggcagcgcgactacctgggggatattggataggaggctttccattggcttggcgcgagtctggagtggatcccccccgtcccggcatccagcctccccgtacacgacccctcggggccagccacctgctcctccttcctccatccctgcatcgcagcctgcacgggagagcccagtagtctggccccacatccctgcgagaaccccgacaccggtttttctgatccccctcaggcctcgctttctgcaggggcccgggcatttcccccccaccctcattatcctcgaggacctgcgcgtgcggccccggatggctgtccctagggacccaggcgtccggcccccagatcctctccgctgcgccctcgtctgggaccgtcccagcccccgccccgagccgccgcccatgccccgccgcgtggccccacctcccttacctggtcccgggtttctcccccatggtgcgcgcgcccgccgcccgctcggttcgcggctcgctcgcagcctcctcgcccgctgccaagatccctgctcctccccgcgccaatgcgcacgcgcgccctccgcgctctcgcctcttccccctccctcccggccccgctctggtcttggggaaccggggccagatgcgtcagccggatcgcgcgcgccgcggcgctgcccgccctctcctagcagacacgcggggccattggctccgcccccagcccttcgcgctccttcccagcctggtagccctcccccgcgcgcggggccagctcccactcctcccgcccatctccccgccccgctgcaaccccttgaaaccgattggacccccctaaaccaaggcgcccgccttccaggggatctaagtctttcgattggccttcggcatccagaacctgcaggggtctcctcccctttgtttgctttctcagtggcggtgggggcgaccgggctgctgggggcggtggaatgagctgaagcgccgtctgggaaggaggatggtgggggggaacacgtgggtgagcggttcaattgcgtgatgcttgcttcagtgcgcgccgctcacctgctccactcggagcgtgccgccttctgtggccagccctcccgcttcttcactgcagcgtgtcagctcctcctggtgtttgcatttgatcttcgcagggttcccttttccaatgtctctgactatccatctccttcacccacccatcccagctaacatccactcactcacccgctcccatccatcggtccatctatggacccatccatccgtgcctatgttatgctattcactatgccaatcgatggggacacatacgaattaccatggcccctgccttcctagaatagttgaggagacacatacacaggtattacccaggaatgctattacagaggtctgagtcagaagacacagccgctaacagcaattggcccgggcgggggtggagggagtgcaggctgtccagagcggggaacagatgaggacagtctttctgaaggatgcgcagaagttttttttctttttcttgtttttttttttttttttgagacagagtctcactctgtcgccgaggctggagtgcagtggtgagaggtgacagcgtgctggcagctctcactcactctcggcgcctcctcggccttggaacccactctggccgcgcttgaggagcccttcagcccgccactgcactgtgggagttcctttctgggctgtccaaggccggagccggttccctcagcttgcggggaggtgtggagggagaggcgcgggcgggaacccgggctgcgcgcggtgcttgcgggccagcgcgagttccgggtgggcgtgggctcggcggctccgcactcggagtggccggccagccccgggcagtgaggggcttagcacctgggccagcagctgctgtgctcaatttttcgctgggccttagctgccttccctcggggcagggctcgggacctgcagcccgccatgcctgagcctcccctccccctccgtgggctcctgtgcggcccgagcctctccgacgagcaccgccccctgctccaaggcacccagtcccatcgaccacccaagggctgaggagtgcaagcacatgcggactggcaggcagctccacctgcggcccccaagcgggatccactgggtgaagccaaatgggctcctgagtctggtggggacttggagaacctttatgtctagctaagggattgtaaatacaccaatcggcactctgtatctagctcaaggtttgtaaacacaccaatcagcaccctgtgtctagctcagggtttgtgaatgcaccaatccacactctgtatctagctactctggtggggacttggagaacctttgtgtctacactctgtatctagctaatctagtggggacgtggagaacttttgtgtctagctcacggattgtaaatgcaccaatcagcaccctgccaaaacagaccaatcagctctctgtaaaatggaccaatcggctctctgtaaaatgaaccaatcagcaggatgtgggtggggccgattagagaataaaagcaggctgcctgaaccggcaattgcaatgcactggggtactcttctgttaggtagaccttttgttcttttgttttttgcggttaaatcttgctgctgctccttttttgggtctacactgcctttatgagctgtagtactcgc

SEQ ID NO: 1243686 - DNA, 4001 bp, Homo sapiens
ttagaatcatgctccccaaaagccaggtttcacttgctcaaacattcagatgtgatttttccaatcattcattcactcctgaggatttaggtataatttgagtcattttttaaatcaagagactgaagtacagagattttatgtgacttgcttcgagtcactcaggtataaatggctggctgcacctttaggttcctaagacatacagaatatgctgtcatattgcacatgatatttccatatagagtacagtaacaggtcctaagtattaaagtgtaagatcctaaatatcaaagattatcttacaggcagccctgcattagcatgaagtgttcaaatcagtttctaaatatcattatatatggatcctttgaagaacaactcaaaaaagggctctctctcacagggagtgtgttggagtcagcaattaattggccttggtaaagcataaatcgtaacagcagcaagagctaatgggtactgaggccttaccaaatgccagtcactgcgatccgcactttacaagtaccataaattaaaccctccaattctgggaataccacctccatccccattttacagatctggagaaattaacgctctacgaggttaaattacgcctacaaggttgcaaagctgctcagcggccccttggctgtacactactggccatacaaggcaccctgtaccaacgaatcttctccccacttacacaaccagaacttgtcaacggcaaaggatggcatttaactcaggagagcctatcccaaaatggtgagagaactcagcgagcaaggaaggatttttattaaaattcagatcgccgactcctcccggtggcgaccctccgtgcatgcactcccaaactaggctctcttgagtttctgacatcagaaccacattctccgaaccccaatgaaggcagcagccggcgccaaagtctgcatacgaatgcaaataacatggcctttgcttccgagcagtttccaaatttgccctcgggatgtgaggtagagaccaagaagctaagtttgcgcccccgcaggctctgaaatgtctaggatctgacacatgctttgtccccatgaggagctcctgagatttcgcgtgcatcatccgcttagttcacggtgaccttggggtcggggactacgggatgaggggcacggactgtctaaacctccaggtcccttacagagggctccccgcgggtatgggagccatgcacctgtgccgacgccgccactgcctggagggtgcgcgcgcgccccgggccggggatgctgactcagcccggctgctcacattcctttcgcgcaacgcggatgctgttgctgccgctgctgccggtgcagcaaagtgggggaagcaaggcacccgcagcggcccggccgctcgctccctggggcccactgcgacactccctccccactgccggaaggggaactgtgggggtgcgcgagttgacgaaactgggggaagtgggcgctgcaggaggaactcaggcgccgcgcgcgcagctcacacccaaactggaaggaacctgttctgcccggggcgggcgcgaagccgccgcagccgcgagcgccgcgcgggatcagccccggcgcgcgcgtgttccccctcgccgctaaatccctaaatcctcagggcgcgggcgggactgggcggtgggcgcgccgggaaggcgcccgggggtggggacggggacccgcgcgctcgcgcctggccgaggtgctccgagacaggatgcaggcacccccaacaccctgcacgctcgcgctcctactagcgttgcagcaaagctccggggtctgggcgggtcacgcgcgcagaggcgcacccgggttgggagatcggggcgttgtgccaaggaccccggcggcgctggcgggggcggcccggccccggaccgcgacgcggttacctttcgtgacccccagcccaggcggcaggctggcgggcgcgcgaccggcgcggctcaggtccacgtgggacggcgcgcgcgcgccaggcaggccccctccttggctgcgctcagcgctcgcagcacatggtcggcggcggcgcgcccccgaggccggcggagaccggctgcagccggtataggataagagctaggcagcgacgcggggccggggcgcgggcggcagcacgcacggcccgggtcgcaggcggccggggtggggggcggggggagggtgtggctcgggtgcccgagtcgcgggagtgggtggagggcccgggcgctcgggcctcaccagcccgagccaacttgcgctagagtcgggcccgccccctaaggggttaatccttttctcatgttaccgagcggcttataaggagggggaggccaagcctccgccttattgggagcctttgggggtttattctcttcccttctaacttggtgagttggtttattattttacatgtttaaaagtttgattgtgggatgtgggttgttttttaaaaaatatgtgttggggcctttttttgtgatgggaggcggaggagaccactgaacatcttcacattttggagaggttattcccaaaaatattcgctctgacagttaggaatgcccagggccaccgggatgacgcgctcgcgccggtgtgggtagctgagagttgaatgtccgtgaccctggtacagttgggtcccggaagatacctaaaggcacgcctggcctttgagtgccccctgccccgggttgggggctccgggacgtcggaagagtcgggggctccaggctcagcccctccgcggattttccgcatgaagttgcctgcgcgtcgcaggagcgaaatgtcagaggtaccttcctaccccaggctggcgcgcgcacgcaggccgggcactgaggcagcgcgagggaaagtggggctccctgcctcccccgacccccaaacacagcactccctgcggcggccaccgtttgtccccagcgggaagccggggatttcccggcagagcgcgggtcctccacctggactgtcagaactgtcagcggctgacggccggtcccgcgcaacttcaaggttcccgggctgccaaccgcaggaaagcgctggtgtcgccaagcagttccgtagcaagggaagatggttttgcagaggaaatgggttatttccttctaggttgttgtcgtcttttctttttattccccccaccctagcaagacaggtcatagaagtttgttaggtggcgtatataaaatgtcaccaaacatggggggcgtcagtcttagaaaaagctccccggagccaactggggaagagcaattacaacttgtcaacctggaagccggttttgtttgcacggttagacactccgtgccagctccttctcgcaggagatggtttctaccccgggaatgagatttctcagtgatctgattgtttttgcaaatcatggtaagataggtgtcttgcttgtaaaaaagatgccaagtgcttatgctgaaatctctaaaccatgcatctccccatgtcccaagcaccgttatgtggcatttttggggtcaacaatacatccggccagatgatataatagaaacccctcttctcataattaagggaagagtgtccaaaataggaacttacagtgtgtaaataaacaatgcagccaagtggaaaagctccttccagtgtaatgagtaccactaaccctgagttttccttctgtggtttccgaaaaaggactttcctcagtggaactcctgaggaggacacttaaattaggggctcaggtttcaacaccatagtcttgtaaaatggtgactcggttgtagccagtgattcaacatcgtgaggcagctatccaggttaggtttggaaattttttttaaatagagaatgcagatgaactttagccaaatacagactggttttgacaacttgggccagaaacaacttgtcaaagctgttctccgggctacgcctttaagaagaagagaaatccgcagtgcttttgctcgaggtctgcctacaacagta

SEQ ID NO: 1243687 - DNA, 4001 bp, Homo sapiens
caagagaaaaaaaatgttatctattgacagttacagttcaagagagtctgtgctgctacgaaacagctggataaccataggacactgaaagcactgtgctgagaacccaccggctcagcatctgaggatggatgggtctcagagtgcccagcagtagtgtactatatgggtgggtcagttgtaaagaagaaaaaactgatccatgagcagacactaaagaaaacagtgggatgaaatcaatactgggttaagtatggaggtctgtgggttttaacatactgcctcaatagattttgtttcaactattttccagtagactttttttttccataatgctttcttttaatgcctcaactagtcggaagagctttactaaatattgcaactcttggccggccatggtggctcacatcagtaatcccagcactttgggaggccaaggcaggcagattgcttgagctcaggaatccagaccagcctggacaatgtggaaaaaaccccatctctaaaaaataaaaataaaaaaaatacacggggcatggtggtgcacacctgtaataccagctacttgggaggctgaggtgggaggaccacttgaccacgggaggtggaggctccagtgagccgtgatcatgccactgcactccagcctgggcaacagagcaagaccctatttcaaaaataaataaatattgcacctctctttttttggtactaaggcagaagtatatagactgatttctccaactttgagcaaccccagatgactctacttgaacagaaaagaaattgacagtttaatcgtgtataatcccttgtaaacaacccgggggaaaaatggttaggttctggttggtgatattttacttcaatgaggtcatgcagcacagtgaaaacaacgaataactcaacattagggagacttgggatctgatcccatttttgccattggttaaacaacaagcaagtttactcggctgctgcaggcttgtgtcctcatgcatgaaatggactaaataatctccacattattaatgctttacgactctgctttccaaaaatggaaatgcatttgaagacaataccaggcccttgaaaatgaagacgggagggtaaaaaacaagctgcaacagagaacagtatcaagcttttaaagaaacaagttaacaccgaagccagaggcctttaatgtagacattaaacggtgtctacatacaccctttcagcttgaatgtcaacaccggctgtactgacagaagatttacatgaccttttcctgaaataagccttcctctcctagtaactcaataccacgggtacatttttccaggtacactagagttgggtactggtctagagctgcactgtccaatacaatagacacaagccacatggggctgttgagcacttgaaaatgtggccagttggaagtaagatgtactgcaagtgtaacaaacacacgggaatttgaagatggtacaaaaaaaggacataaaacattcagcattgatattgattgaaataatattttggatgcattggattaaacagaatatactattaaaattaactccacctgcttctttatgcatttgctaatacgactactagaaacatcaagcttacatatgtggcttgtattatatttttgttggacggtgccactctagatatcagaatctacaaagtgactgagattcaaactcttcaatgaagcactttttaaatgctctacttgagaattaattccactcactgctctgctgccgtcgcggtcctgactttccaaggctgtgcccagagcgcggcacacgtggctctcacacaggcaggcctgcacggcacgcagcagtggaggaggttaccctgggtcgctgacgccaggggaagccaagcgaccgatcccacacttctgagccccgccggggaagtccccgggcgcggaaacaggtggtgcgccggcggttcgcagctgctgggcccgccggcctgggcgcagccggggacagcgacgcgtttcctgcccgggaagggcccgagcgcagggccggctatagcggtcccgcagctgcctgcttcgattttagcactgctgctcccaagagggagcaacgcggccctctgtccctcgtagggcttgaaatgtaaattattcatatcaggggaatgtgtgcttcaaaaagcaagctggacaagaaccgacgggtaatcctcgacaaattcttctacttaaccctcaccattagaagtctgaggcctgaaaaatctcttgaccggagagatactaactccacaggtgcccaggatcaggatctatgacataaatgaaaaacattccaaattcactgatttttaagagtatttagatagtagaaaattattaattctctttattagctcaatactttgttcagccagcatttgcagagcaaaatctgcgtggatttatttagtgaaaattatcttttaaaaccacaaagatttaaccatagtacataaaatttagttgcagtaagcaaattatatttttaagctgaaccctaagaaattatccaaaaatatatagttatacacagcacttatgattgctgaacaaatgaatcatataaaatttatgtttagttcaatttttagcaagagtgaatgacttcttagatgatttttctcctagtctcatagtgcagtgtagacacaaatggaccttatttattcaactaggcaaatcttagttcaaaagagtttgtgacaaaggctgacctacaggactaaaaccgtgcttgccttgtaggaaaataaaaaaaaatgtaatcgaatggacaataattttttaaatacattattcaaggaggaataagccctgtaacagaatccataaaacaccatgctccatcagtctctttttcctaatagaatgaccaagtattctctccaattaattttaatagcaaaccaccattttctaaaatgacttaaatgggttcaatcaagtagaatgactccaagggaaaccactgactcagatatgaaatgtgccttacatcatactccatacatcaaagactatactttcagggatcatttctatactttgttacatcatactgcatacatcaaacaatgaagaatccaggtttcaaattacaaatacatatatacctttaagtcttaccctcaaggtaagataggaaagtgggaaatgctgtctgctcactgatattccataaaatattcactgtaatttctggatttccaagatacatctatctagcagaggtggtttgtcaagtctgagcttttccacctgtccacccccgtagcaatggggctgatgttcacaccctgcagaccatcatcagcattcatggcaccccgacagataaccccattaaactctctccctgactcaggtaaacacttcacaatgtaatgtgaggaggacattattactgaaataaacctgaaagccgctctaaatctatagaaaaagtgcaacactcacaaatataaataccattacacactatttgtaagatccctcataaatgactatgttatagctgagacctgcagcggaactcccaccaccaaatgttgtggtagtgtaaggaccattgttattttcacttgcaaatattcctgataggtcatattttaagctgctaaaaactgatacaagctgttcattctttcagggataaggtgacaaccagcaagagaaaaaaacaaggtaatgcacttgagacagtaaggtaggctctcggaaaaggagggctgtggtgatcagagcccacggacgtccaaaaatgtgacttggctgggcctaaaagaggggagcggctcttctaaaaacaaaatcaccccctggaaattatgttggttggttccttggggcattgaacggttctttttcaagttatttacttgctcgttaccgccagtcccagctttcttgggagacctaaacatatttggggaatggaaataatgtgcttgctgccaca

SEQ ID NO: 1243688 - DNA, 4001 bp, Homo sapiens
ttgcagtgagctgagaccacgccactgcactacagcctgggcaacagagcaagacttcgtctcaaaaaacaaaaaaaaacagctaggtttggctacaaaggattcacagggtattggagactgcagttggaacagagttttcccaaaaagcaacagggcttctgcctcctgggcttagcagatgtgaccttggacaagttactaagcctttctgagcttcatttttctcatctgtaggatgaggtgtctccaggttattgtgaagatgtgtatatgcggtgctttatgaaccacaaagctgcatgtggttgtcaggttccctcttctggccttgtgagctggagacacacacacacatttctccccaaactgtctcagcccccaggcacctactgcaaggactcggggatcgtgcagaggtgcaaaggagtcgtgccctcctcagtcagcacattagccttggctccgaaggtcagcagcagccgcacacagtcaaactgggctcgggcacaggcctcatgcaaggcagcgcgacccccgacacgggcatccagctcagctccctgccggatcaggtgtcgagcacagtctgtgtagcctcgggctgtagcgatggcgaggggtgccgtctgcttggtcttgggggtcagcacccagaaccctagggagagcaaatagttttgggaggtggtgtataagacagggcagggcagggagtggggatgctggttccagctgacagctgacactggccttccctctgcatggtttgctgagcacaaacactgccaggctgtacctgtggaagggggcttattcaagtcctgaagtggaagaataaattggaacagccttttaatacagcttatcaatctgtaacaaaacatagtatgtgtcataaaaaaattaattgctgtataaaaccacaggggccaactaagtagagtgactcccattaaggaaatctcagcgtctttgaatggctaatagtgtcaaaggcttgttcaccttggggcctggggtggtggctcacacctgtaatcctagcactttgggaggccaaggcgggatgatcacttgacctcaggagttcgagatgagcctgggcaacatagtgagaccttgtctcttttttttttttttttaggcagggtctcgctctgtcccccaggctggaatgcagtggcgctatcttggctcactgcaagctccgcctcccgggtttaagtgattcttctgcctcagctgctgagtagctgggattacaggtgcgcaccaccatgcccggctaatttttctatttttagtagagatggggttttaccatgttggtcaggctggtctcaaacttctgacttcgtgatccgcctgccttggcctcccaaagtgctgggattacaggcgtgagccactgtgcccggtcaacttttaattcttaaaagacatacagactgctaaccctgcctcatctctgtttaggagggagctaggataggtggtggaaagggctgctatagtctgtggtctgcagggaaggaggggcctagactctcccccttccccacccactccccttctttctccctcctcttctgccctcttctggtgccccctaccctgttcagccgaccaggccagctggttgctcacagtctccacaatcatgttggcggcctcttcatcttggaacagggcttggacctgctgcaggttgccggagaagagggcttggtggacagctgggtctcggcaggaacggtgaggcctagtgagtcgggcccggggacttgacgggcacctgcggctccggcactgctgggcagccgcccgccgccggtcctcccattccagccactcctgctgcaggcggagagagcgcagcatggaggaggtgaaggggaaggtctctcttgccatggatggggcccaggggtttgggcagtggcacctgggcagagccaggttccctcgacccgactacctcccttgctctgaggagccaccctgcccccgccaccgtgagccagagaaagcagcagctgaggctataaataggtcctttgctgctctggtaaacatggtttgctcagagtcatgatcctggtgctgagaagctgctggcccaacccccagcccagggtgagggccagcccctgcccctgccgataccctttggttggtcagcaggccctcagctgaggccacccccgaaccccagcatctgcatccaccttcatctctagagcgagcatcttgggttggcaaggtccagggtgcgcaaaaaggtcagtcatggagatgggcagggctgggaggaagacaaggtgcctccagcctctctgatgttggctggagggcaggagccaccattggcccacgtggaggagagagggctgacctcagcacaggaggtaaggggaggtcaaggcagagttactgagaaggtgagcagctcttcccagcatctgcagtaacagcaataactctgtacatatgcacagagtttcacggtgtttaaatcacattcatatccaccttcacccaggggatcatacttcccagcccacccaataattagtaaacttggtttggacaataaatgaaattatcacagttgaatgcccctgagatgggtggtcttatctctgttttacagatgaggaatttaaggcttaacaaagtaatctactggctcaaggtcacagtttgtgagaggcagagccaggaccccacatagatggtgtgctttgggccaagaatggtggctcatgcctgtaatcctagcactttgggaggccaagacaggaggattgcttgagcctaggagtttgagacaatcctgggcaacacagtgagacctatatcttttttttttttttttttttttttgagacagagtctcaccctgtctcccatgctggagtgcaatggcacgatcttggctcactgcaacctccgcctcccgggctcaaacgattctcttgcctcagcctcctgagtagctgggattataggcacccgccaccatgcccagctaaattttgtatttttagtagagatttaatttagggtttcaccatgttggccaggctggtctcgaactcctgacctcgtggtctgcccgcctcggcctcccaaagtgctaggattataggcgtgagccaccaccccctgcctctccatctcttaaaaaaagaagaaaaaaaaaaaaagatggtacactttttgccttcagctgctgcagccacctggcagcctcccccattctccaagcaggacagactagtctgtagaaactgccttcaatcatcctttttttttttttctcatggtgtcacccagtctggagtgcagtggggtgatctcggctcactgaaacctccgtttcctggggttcaagtgattctcctgccttagctgcctgagtagctgggattataggtgcatgccaccatgcccagctgatttttgtatttttatttattattattttttttttgagatggagtctcgctctgtcacccaggctggagtgcagtggcgcgacctcggctcactgcaagctccgcctcccgggttcacgccattctcctgcctcagcctcccgagtagctgggaccacaggcgcctgccaccacacctggctaattttttgtatttttagtagagacaaggtttcgccgtattagccaagaataggatggtttcgatctcctgacctcgtgatccgcccgcctcggcctcccaaagtgctgggatcacaggcgtgagccaccgcgcccggccgatttttgtatttttagtagtcggtttcgccatgttggccaggctggtctgaaactcctgacttcaggcgatctgcccgcctcggccccccaaagtgttggtattacaggcgtgagccacagctcccagcaccttcaatcatccttgatttatttttttaacccagctgctaagggggctcacatggccggcctgaggagagccaaggggttgag

SEQ ID NO: 1243689 - DNA, 4001 bp, Homo sapiens
tttgctgacacctaatggcatgactgcgtcactgcagccaatccaggaacctcagtccaccccctcctcccgcgccttgaaacgcaattgagtggcccgcgcctcggagtcgctgcttcccctgaaagtggggaaagaaggaaggtttctttctctgtccatgaattccacttgtctttggctgcgtgcagggagagaaggtgcaatagctaccattcaggccctcaagtcttccacccagcagggggaagagacacgttagccctgtgccctgagagctggagggttgggggggcctccctgccgggtctcctccgctgcggaccctccttccgtcaaagcgcgctgcaccccatcccccacgaacttcatccttgctcagcctaaacaattccctgctcggaggacaaagaaatgggtcaaggggaatttgtttttgaagcaaaagagtctcgttctccctcaggtcagagacccctcatcgcccccctcacagaatcctcagacccttcacagaaaccttttcccccttcaccaaactgatcactgacacacacacgcacacgctcgcacgaccggggtccctgggtggtgttggaaggggaaaggaagagggggcgtgacttcgtcataggaagccgacagtgacctcatctctccagcttccagctgttcccacacccccgggtccacctccgagggccaggaggcacaggaaagctttgggcacctgtcaccaataaagggactccaaccccacactccgcccctctcctgagagaggcagttccgacacctttcccagtgttgggggagggagacagacccagagagagagccaggctcacgggcaagagtaggagctgtggctggggggtggagaaccgccaaattctcgccttgcagaggcagggcaaggtggccctcaccttttctgagctgatggtggtcactctcctcattgtccagatgctgaaggtcttgatactccttggtcatgatagggctggcgctggacctgggactgagtcaagactgaggctggggctgaggtgggggctcaccaggactagagtgggaatgaggggcccatctctttactcccatctgattgacggctccatcatggagacctttcttctttctttcttttctttttcttttttttcttttctttttttttttttttttgagagggagtcttgctctgtccccaggccggagtgcagtggcatgatctcagcttactgcaacctctgcctcccgggttcaagcggttctcctgcctcagcctctggagtagctgggacaacaggtgcacgccaccacgcctggctacttttttgtattttagtagagacggggtttcaccgtgttgcccaggcttgtctcaaactcctgagctcaggcaatccacccaccccagcctcccaacgtgctgggattacaggcgtggaccaccgcgccccaccgggagctttcttctttcctccatcccctcccaggcctgacatccagaatccatcctctgatgtttcccacccagcaccccccaacacaccctgggttccctccgcacccctgcacccccagccagcctcccgccacctctcttcccattttacttgctcagggtctcagggtctgattcccaggttcttcagtgctgtgcagatgccgaactaaggagggggctgaagcttggagaatgggggtgggcggacagccgtggacaatgggaggggagcgggcagggtccataggagggccctgggccccggtgtctctgtgtctgcgtgtctgtgtgtccaagcacgccaaacgtggcatctccagtgcccgggactttggacagtaaacagaggtggaaatggattggaacttaggggagtgtgggggtgggagtgggggatgggttgcctctgctctgctccccagggaggagaatcgtgttgcccccacacatgccagtcacctcactcttccgtgcaccgtttgggaggggtgccaggccaggaggggctggggtgggatttgccatatccctcctccctccccgtttcgcttcctgcctctaaattccccagaactattggtgtctccaaatatccctgaacaggatcagagggaccggttctctgctcttgcccaatccagacctgtgaccctggcaccggagccgcaggccccagtttcctgtggggctgagccccaggcttcccagctctggcctgacttgcttccctctcctggggagtaaagtcctccaagcagcatgagggccagcttggttccaggaaaggcaggagagcctccgctgggactggtgccagcaaacctccactcactactactgtgtgcctcaggtcactgcgttcatgaacttctctcattatccccagagcacatcccatttcacagatgagaaagctaaggccctacaaggtaagagcttgcccagggtcatgctgcaaggaagcagcaaagggtagactagaacctgggcagcctgactccaggcactgcgttcgggccccagaaccacacccatcacacagagccaggatcccatcccgttgacacagctgggctccagtgtcccagagatgctaaacgatggtccctcacagccccacggggcttcagagagagccatgtgaatttgaattatgctcacttggaaatcaggcaatattaaagataagtctcggctgggcgcagtggcttacgcctgtaatcccagcactgtgggaggccgaggcaggcggatcacctgaggtcaggagttcaagaccagcctgaccaacatgatgaagccccgtctctactaaaaataaaaaaattagcagggcatggtggtgcatgcctgtaatcccagctactcaggaggctgagacaggagaatcgcttaaacccgggaggtggaggttgcaatgagccgagattatgccactgcactccagcctggtgacagagcaagactccatctcaaaaaaaaaaaaaaaaataataataataataataataataagtatcagctgggtacagtggctcatgcctgtaatctcagcactgtgggaggccgaggtgggcggatcatctgaggtcaggagttcgagaccagcctgaccaacatggtgaaaccttgtctctactaaaaatataaaaattagccaggcatggtggcaggcgcttgtaatcccaactactcgggaggctgaggcaggagaatcgcttgaacccgggaggcggaggttgcagtgagctgagatcgcgccattgcactccagcctgggggacaagagcaagacttcatctcaaaaaaaaaaaaaaaaaagataataagtctcactttaggcccaaatgtgaagtcatccaaatcctattttacagttatttcagtgagaaaacaaggcttgaattttgagagttttcaatgatgtgagatattcaggaacacatctcttgcataaaatgtgacaggtctgtgtgtgccctcctttgtctgtgtcctgacaaccaccatgtcatttatatgtgctgggacaatggccagtgattttgttgactgttgggctgttaattaaacatcctctaatataatcacttacaatcgggcttattcaggcaaatgaacctacattatttcggtcggaatagtggtcacccggctgggcgcggcggctcatgcctgtaatcccagcactttgggagaccgagccgggcggattacctgaggtcaggagttcgagattagcctggccaacatagcgaaatcccgtctctactaaaaatacaaaaattagccaggcgtggtggcaggcacctgtggtcccagctacacgggaggctgaggcgggagaaatgcttgaacccgggagacagaggttgcagtgagccgagatcgtgccactgcactccagcccgggcaacagagggacactccatctcaaaaaaaaaaaagaatagtggtcaccctcacagaaatagtgactagccaa

SEQ ID NO: 1243690 - DNA, 4001 bp, Homo sapiens
tcctaagctccaagcccctgctcctcctgcctccatggaacccggctccaccaccagcacccacacacctgacactcctccattcctggctcttgcccttctgcctagcactgctcagatctctctcaccttaaaatcttttcccaccagcctgggcaacatagcaagaccccatttctctaaaaaattttttttaatttgccaggcacagtggtgcacacctgtaagtcctaactacttgggaggctgaggtgggaggatggcttgagcccaggagttcgaggttgcagtgagctatgatcctgccactacactcctgtctctaaaaaaaaaatgtccaagatacttaggtccttcagtcaagatttattacagaaggatccagggaagggtcttgggagatgagaggagcagggatcttccaggatctctctgtgctcacgtcccccacccatcccaactcaccccacctctacacacacacacacacacacatacaatcacatacacacactaacacacacactcacgcaacacactcacacacacaacatacataacacactcacaacatacacacacaacacacacactcgcacaacatacacacacgcacaacatacacaacactcacacaacacacaaacatacatacactcacacaatacacacacacaacacacacacaacatacacaacgtacacacacacaacatacacacactcatacacaacatacatacacacaacatacacacaacatacacacactcacatacacaacatacactcgcacaacatacacacatgcacaagatacacacacaacacacaacatacactcacacacaagatacacacaacatatactcacacaacatacacacacaacacactctcacacacaacataccctctcacatacacgacatacacacacacaacatatgcacgctctcgcgcacatatacacacacacaacattcactcacacacacacacagagtcccagctgaatctgcattcctcatatgcacatacgtgcacacgcacatacgaggcacatgtgttcttgggttgggaggagaagggcaggcagttatcttccagatctccccacacctctggcacatgcctttcctggggtcctggggtagacaggaaggtgaggtgagggaacaagcgggggtgtcgggccctcctcagtccctgttcacagagtgggtgcggcagagacctcaaagggacagagcaatcatgagctgagacagagggggagcaaagccgcagaaactgcacacttgcctttcaaaaatggatttcctctcctgggattcagcctgcgagtgcctggcccctcaccttgatggaaaggatggtcattttcctccgagctcagctgctggatatcttgaaagtccttggccatgatggggcccgggctggagctggagctggagctgggctgggctgggctgaggttgctctgagggctggggctggggcagaggtgcagattcacgtggaggttgatggtgggatggaacgcagggtcggaggggttcggggtggtggcctgggtaggatctgaggttggcagggcgtttgggatgaggtttgaaatcccgctgggtcctttcccttctcaggagaccgcttgggccttgacctggccaggagacccctccccacgctcatggacccgaccacccacagcttcccatggggtcctccccatccctgaaccaaggcctccttgttcccaagcatcctcgtcccagttgcctccccagcctcagttacctgtgaaaggtgtggagagcggacacctggctcccgcaggcaaccctggccttggccaaggaggggttaaagccaggagaactggggcaggtggagctcacaggggagaggagagtggaggaggggctggtccgggcaaggcctgcactggagggtctgagtgtccaagctctaacctggcacctcctggcctgggactttggacagtaaacagaagaggaaacagagctgtaactcatttgtggggtgggggcaggggacggggctatctctgttcttattcccagagaggggggtcccctgggctgcgctcaactccacacgccactcaccccactcattgcaccatttggaaggggtgccaggccaggaggggctggggtgcagtttgccgtttccctctctccctccccctctcacttcctgcctccgaatttaccagaactgtgggtgtctccaaatatccctgaccaggatcacagcgaccagttctctactcttgcccaatccggcatctgaaccacagaccccagcttcctgtgggctcggccaccagactctcagctctggcccaactcgcttcactctcctggagagtaaagcctctcaaatccagaagcttcagcaggaggaggaaggggctttgcagaaaaacagctctcctcgcaggaggaatccaacctcagagagccccgtccggcccagaccctgccccagcccaggcaacacaaacactgtcctcaggcccagccactgccctaaattctccaaggtgtttcttcatttatcacagcacaacacccccacgaggcaggacttctgttactcccatttcacagggttcggaagcggagcctcggagagatgaggcaacttgctctaggtggtggcccaggtgagtagagaaactggcaaagcaaaatggagtaaagaggggaaaataacatcataacaaaaggtctggccgggcacggtggctcacgcctgtaatcccagcattttgggaagccgacgtgggtggatcacctgaggtcaggagttcgagaccagcctggccaacatggtgaaactctgtctctactaaaatacaaaaattagccgggcgtggtggcaggggcctgtaatcccagctactcaggacgctgaggcaggagaatcgattgaacctgggaggcggaggttgcattagccaagattgcgccattgcactccagcctgggcaacaagagagaaactccatctcaaagaaaaaaaaaagaaagaaagaaaaagaaaagaaaaggtcttcatggtcctacgaggaagactggcttccatgaagcaaggaacgtggctgactgtctacacttgcgctaacaatagctcgggaaagaaaacacagtttttgtgcatgattttctgaccctcaccaaacttgggcggatggctacgggcagggtttcttataaagctgctcgtttccccgggtgccgaaaaggaattcaaacagaggccttttctgttcttgtaacttgctgacccacatgggaagtagccacccccccagtaccctgacattcccacccagccaccaggcagcagcagccgctgggctctctgactgcagcccacagcgagagacgaatttcatgctgtgatccagaacatacacacaagcacccgcacacacaggtgcatttgtatgtgttactttctcctggatccccagtgcctgccacacagtagctgctcaacaagtatctactgagtgagtgagtgaatagaataatgcgtttggaaatacacggttgacactaaagtttgatgggacaatgctcaccttactacgtgccttctgttgagtttcccagtccattaatgggtcacaactcaaagtctgaacaacactgctgtgaagcccccatcttaaggggcatgtggatttagtcctgagatacaggtaagagcttcacagatggattgtctactgcatgtcaagctttgccaactgccaaccagggatggggccatcctcattggccacccctttgactgaaccaattccacgtttcagggcttgtcacttacacccccactcacggcactacagggagagaagggacagagaaagccagactcatctgcgtccttctctttctccctatttgaaaatcattttaacttagaagttaacatgtacttggactatttctgaagtt

SEQ ID NO: 1243691 - DNA, 4001 bp, Homo sapiens
gctcccatgatgacgttcccccagcccccaccacccgggctgctggagggaaatgcggtgactttgctacatcccttcagacggtccctcactggtgtccctcagcccattcgcgtgagctcactctcccattaatttcagaaatcctggcctctctccaagcctcctgctcaaactctaaattctgtcaccctcagaagattcagcagcatcccgtattctctctgagtgttcactatgtaccgggtgccgtgtgggcactggagttgcagaggagagtgaggcggacagggcctctgcctgtggggacaccgcctggtgggaagtccagccagccccctacagagagaggagatgctactggtgttcctgagtggtcctcgggagggacctcctatccctcctgtcccctgccctgccctgcccagcaccggccctccctcggttggccagcctcaggaatgaggagtccctcattccagcccagctaaccaatccccttcctaagctccaagcccctgctcctcctgcctccatggaacccggctccaccaccagcacccacacacctgacactcctccattcctggctcttgcccttctgcctagcactgctcagatctctctcaccttaaaatcttttcccaccagcctgggcaacatagcaagaccccatttctctaaaaaattttttttaatttgccaggcacagtggtgcacacctgtaagtcctaactacttgggaggctgaggtgggaggatggcttgagcccaggagttcgaggttgcagtgagctatgatcctgccactacactcctgtctctaaaaaaaaaatgtccaagatacttaggtccttcagtcaagatttattacagaaggatccagggaagggtcttgggagatgagaggagcagggatcttccaggatctctctgtgctcacgtcccccacccatcccaactcaccccacctctacacacacacacacacacacatacaatcacatacacacactaacacacacactcacgcaacacactcacacacacaacatacataacacactcacaacatacacacacaacacacacactcgcacaacatacacacacgcacaacatacacaacactcacacaacacacaaacatacatacactcacacaatacacacacacaacacacacacaacatacacaacgtacacacacacaacatacacacactcatacacaacatacatacacacaacatacacacaacatacacacactcacatacacaacatacactcgcacaacatacacacatgcacaagatacacacacaacacacaacatacactcacacacaagatacacacaacatatactcacacaacatacacacacaacacactctcacacacaacataccctctcacatacacgacatacacacacacaacatatgcacgctctcgcgcacatatacacacacacaacattcactcacacacacacacagagtcccagctgaatctgcattcctcatatgcacatacgtgcacacgcacatacgaggcacatgtgttcttgggttgggaggagaagggcaggcagttatcttccagatctccccacacctctggcacatgcctttcctggggtcctggggtagacaggaaggtgaggtgagggaacaagcgggggtgtcgggccctcctcagtccctgttcacagagtgggtgcggcagagacctcaaagggacagagcaatcatgagctgagacagagggggagcaaagccgcagaaactgcacacttgcctttcaaaaatggatttcctctcctgggattcagcctgcgagtgcctggcccctcaccttgatggaaaggatggtcattttcctccgagctcagctgctggatatcttgaaagtccttggccatgatggggcccgggctggagctggagctggagctgggctgggctgggctgaggttgctctgagggctggggctggggcagaggtgcagattcacgtggaggttgatggtgggatggaacgcagggtcggaggggttcggggtggtggcctgggtaggatctgaggttggcagggcgtttgggatgaggtttgaaatcccgctgggtcctttcccttctcaggagaccgcttgggccttgacctggccaggagacccctccccacgctcatggacccgaccacccacagcttcccatggggtcctccccatccctgaaccaaggcctccttgttcccaagcatcctcgtcccagttgcctccccagcctcagttacctgtgaaaggtgtggagagcggacacctggctcccgcaggcaaccctggccttggccaaggaggggttaaagccaggagaactggggcaggtggagctcacaggggagaggagagtggaggaggggctggtccgggcaaggcctgcactggagggtctgagtgtccaagctctaacctggcacctcctggcctgggactttggacagtaaacagaagaggaaacagagctgtaactcatttgtggggtgggggcaggggacggggctatctctgttcttattcccagagaggggggtcccctgggctgcgctcaactccacacgccactcaccccactcattgcaccatttggaaggggtgccaggccaggaggggctggggtgcagtttgccgtttccctctctccctccccctctcacttcctgcctccgaatttaccagaactgtgggtgtctccaaatatccctgaccaggatcacagcgaccagttctctactcttgcccaatccggcatctgaaccacagaccccagcttcctgtgggctcggccaccagactctcagctctggcccaactcgcttcactctcctggagagtaaagcctctcaaatccagaagcttcagcaggaggaggaaggggctttgcagaaaaacagctctcctcgcaggaggaatccaacctcagagagccccgtccggcccagaccctgccccagcccaggcaacacaaacactgtcctcaggcccagccactgccctaaattctccaaggtgtttcttcatttatcacagcacaacacccccacgaggcaggacttctgttactcccatttcacagggttcggaagcggagcctcggagagatgaggcaacttgctctaggtggtggcccaggtgagtagagaaactggcaaagcaaaatggagtaaagaggggaaaataacatcataacaaaaggtctggccgggcacggtggctcacgcctgtaatcccagcattttgggaagccgacgtgggtggatcacctgaggtcaggagttcgagaccagcctggccaacatggtgaaactctgtctctactaaaatacaaaaattagccgggcgtggtggcaggggcctgtaatcccagctactcaggacgctgaggcaggagaatcgattgaacctgggaggcggaggttgcattagccaagattgcgccattgcactccagcctgggcaacaagagagaaactccatctcaaagaaaaaaaaaagaaagaaagaaaaagaaaagaaaaggtcttcatggtcctacgaggaagactggcttccatgaagcaaggaacgtggctgactgtctacacttgcgctaacaatagctcgggaaagaaaacacagtttttgtgcatgattttctgaccctcaccaaacttgggcggatggctacgggcagggtttcttataaagctgctcgtttccccgggtgccgaaaaggaattcaaacagaggccttttctgttcttgtaacttgctgacccacatgggaagtagccacccccccagtaccctgacattcccacccagccaccaggcagcagcagccgctgggctctctgactgcagcccacagcgagagacgaatttcatgctgtgatccagaacatacacacaagcacccgcacacacaggtgcatttgtatgtgttactttctcc

SEQ ID NO: 1243692 - DNA, 4001 bp, Homo sapiens
tcaatcctccctaaggcagctatgggggaagcagccacactggacttctggagggtcccacagcccctgatacccagacgtgcctggcagcaaacagtagtcagcagctgctgtatgacctattatgccaagttatgcctagcagcccactaactggagaaccctggcagcaacagtgctcctctcgtcctttcctctctgcccctccagtaagccccatcctgaacgtaagccacatccccctccgcttttcctctttactcagctccacactcctcccccaggctttccattcccacagctgttcgccccctccctgcacccctcctcctgcatccacgtcgttaagtgattatacagagagaaaaccgagcctttgagtttcaagccaaagctcccagacaaggcagccgggactggttcaccctcacaggcatctccctgaccctcttgcacacgtgcctccgcccagaccctcctctctgcccaagcactctgaacatctcttggcttcaacctgccaacagatcagatggagccctggggtgcccggcctctcctctccccacatggagcttagaattcacacaaggaaaggaagcaaggagacttccacacctctgcagcatcacctgctccagcaagctcccaaagccaccggagccagccagactgcctgggccccacacccccttctctgacggctttagctccagcccagcccacaggatgcagtgcctgatgccacttccgagcagagagagacacacacgcacacgcacacgcacacacacacagaatgccacctcgtcaatgacaagctgttccaatcacacagctcggacaccaagcggaccggacaacggacagcccaggcctcctccctctgactgggaggaagccaactgagcacgtctggggaagtgatcccccaccgcaagccccccactcaccctccatatttgatctgacagcagtgctctatcctggccggtagccttccctgcaaccagctcgcacaactctgaccaactaccctcgtggccttcaggtgaggcactgctctctctcctgtcccaaagcacaaggaaaccccaaaccaagcaggagaccaccggcgcaccacttctccagaggaccagacagagtgagctgaaaaccaagtactcactgtggtgaagtcttggtggccgcactcctgccctttgaacttgcagtagagcatcatatccttcaggtcatggcccacacggtgcaggaactccagcatgctgaactgcttgggtttgtagtgcttgaagttggccttctgccgcagggcctccagcacggaggggtcagccagatgggggtccgggatctgcaggttgacatccagcagggccagcagctccccagcatggtacaggtcattggtggtgagcctggagaaccggaagccattcaggttacagagggtcacagctgggaagaccaggctttgagccaccacttcgtccaccttagtgacatgctggtaggagaagtagtaggacaccctctcagagctctccaccagcagcaggcccagagagcccacgaaggccactgcccacagcacacgccggatggtcagcggcccatacacgaagatgtggcggatgccatggagggtggaggtgttggcaaagatctggatgctagaaggttgcaggctgccctcactggggctttccttgaggtccatcgggaccccgtgcagttccgcaactggcttcaggttgatcgaatttcagagaagagctcccagtcctcgggctctgcttaaaccttgacgttcaggggagagaacgcaaggcaagcatcgcgccagatgctgtgagtttatcctgagagcccagccgcacgctgacaggggtgagtgtttatataaaacccattcaaactctagctcttgattttttccaggcgataaggagggctggttttatttagggagacaccaaggtgatgtggaagagatgtgggtgggaagggagagcttagccaatggaaataaagtcctcccccctacacacgccactagagacaagattaaaagcgagagcgagagagaaaatgcttaaaacaagtcgctgagcagctcggagcctgttaaccagcgcataatgccccatgttaaccatcctgggggatgtcagggcggccacgctgatgcactgcggtcgggcgcagcggcacagccttcagagccgccgccgctcggttccttttcccatgatgttttggactccgaatgccgtttctcgccgccggcctccgtccctcctctcctcctcctccaggcccccttttgtgggcagaattccaaatgccagcggccgctgctagcaccggggagaggaggcagcgcgcggcgcggagaggcgaggaccggtatctggagactggggacggaagcggggagctcagaccgggatccattctctcctcgcctcctgggaaaaaagggacaacccccaggtcacaaagcctgcctgcttcccccgccccagctccctgtccctgctaggctgccttggggggaagggcagggcgggggagaagggctggtgggggctggggactttctccaagttttctttttagccttttttgaaggtagctagtgggggcttcttcgagggttgacatgacaccccgccccccaggtggcaggaagacagtgctaaactcctaggagccaggtgtgaggttggaggcggcattcctttgcatcaatgtcagggatcccaggttagacccagcctgggatctccagaggggagaatgctaaaaatgcagaaggaagggggcgatccaaacccacagtgcctctgatgcagacagcgagggggcattctaggagagcagccaggagcccctcctgagacagaaaagccaagttgcccctggagcctcagagaaggagcaacaagtagtcgcctcccccaccgccacatagctgtcgggagagtctgtatttgaaagagaaaggcaactgggactccaggtgggactggctgcataccattccatttgggcagtgtgtgtgtgtgtgtgtgtgtgtgtgtgtgtgtgtgtgtgtgtgtgtattctgatcctggatttgtcagatggaagtacatttgggcagtgtgtgtgtgtgtgtgtgtgtgtgtgtgtgtgtgtattctgatcctggatttgtcagatggaagtacagccggaactataggtgggagcaaagaattagcctttccgctgcctacctcttttttcctgaaactccactggcagtcagctcctgctagcaggtgagtgtggctcgccctattggcccatgccagagctcaaatggctagaacctactgaatcaatggtgctaaattcccatcagaaggaagggaacagaaagtctgagtggccatcccaagccacactgccaagctggggcagagccacatggagtcaccttgatgagccaagctctcatcttcagggctttccaggcttaaatcatactccttggacaatgttggaaaagaaggcagctgagggcacgtccctctaggtttagctctactctgaaatatgttttcattccatctggacccctgctaaactaggtccactgacaaaaacatccaggtgcactctgaagcaacctgtagcattaaatcagtggtttattgatcctgggagctcagagaacagaagcatcacaagcaagcacaatggcaaagattgataaacttcacatattcgttaaccaagaggtcctggactcctaggataggacacaggtttttaaagcaggaggaccaaaattaacaaaggtctaccatgtgtcaggacctgtgtgagggtgtcatatcatcttacttatccctcttaactatcttgacaggtacatgttcttgttattatccctattgtacaggtgaggaagctggggctcacaaaagtaaagtgctgtgtccaagttacagttagtggtgtca

SEQ ID NO: 1243693 - DNA, 4001 bp, Homo sapiens
gtctattggttttcccaaagacaagaagtccgcacttaagagatctacactccaaacacagagcagtttcttggagtcctgagggcctggagttgaggtcgggaagaaggaggctgactaatattcacagacgggaccataaggagtagaatgagggctttgggggctgacactggaaggaggggctgggacaggggagctcccactggtgggaggcgactcctcctacagttaagtccaagttcccacaacctgcaggagaagactcaggggacccaagaatgggttctgccttggcatcgtggagtggtaacactgcaagaggcctggggacagccccgagggggcggaacaccaggcctcctgactgccggggagtggggcgcagagggagcgggttcgcgcggagggcaactcacggaggagaagttgtgcggcccgcagagctcgccgcggtacttgcaggagagcagcatgtcctccagctggtggcccaggcggtccatgaaggcggcgctgattccctcgaagtggcgcggaggcaggaagaggcggaagtccgccagcttgcggaaccactggcggcgcggctcgtcgccccgcagcagctcgctgacaagcgggcgcgcggtgcggttgggcagcagcagcccgagccagtggccggcatagtagaggtcccccttggagaggcgcgggaagcgcagcgggttgttgttgcacacagtgacggcggggaagggtaactggcggctccactcgcggtgcacccgcgtgtgtgacgggaagctgagccagtagagcaagcggttcgaggaccaggacagcagcaagccgaaggatgtacagaaggccagcacccacagcgcccgccgctggaaggagcccccagccgccgtgcgcccggcacacatgtgccgcagcccgtgcagtttagcgcggctcagcgatggccgccccctgcgggcgacccctggcccctgcagcgcccgctcgccgcctctgccgcccccgggctgcccggcagccgccaacgccgcgggcgccggctcctcgcgggccatgcggaagcgtcccgggccggtgagcgcggctgcgggcagcccggctccgccaatccggctcattcattcagcccgcggctggcggcagcggcggcggccccggccgggcggagccgccatgggagtccgcagcagcagtggaagcagcagcagcggcagccgcgcgcagcccgcgccagggaagcgtgcgcccgaaaggagctccggtggcgcggcatgcccgcccggcgccgccgctgccgcctccgcgggcgcccgcccggggctgagcgccgcctcagcccgcagcccctggcagtggcctctcccgagcgcctcccaggctttcccggcccctggtcttcctggaggatgcccggcgcccggcactacttctggaggggtcccactgggagccgcctctccagtccctgggtgctgcgcccgccttccctcgtcctggacctcgggggaccctgagccgagtcccccctgccccgcctaaccccagcttttacgctggtcctgggagaagggccactcggccaccatgcctgatctggacatccccagggaccccaccagcccggcccgtagcccagcggtgctgggacacgggagagaaggcgccaaggaacgagcgcccccagaggcgcaccgcggctcctggctgggcgggcggggtgggtgtgtacgggggtgagtggtcgccttgccggctgccgccttctttcccttcccctccaggacccttccttgttactgctccctgggctgcgctcggcagagacctgcttaggcttccccaagtcctgcgcctaagtcctgccaggcgcccgctctcgcctggggctgagagcttctcagggcgtcctgcgggaggctgttcgccgccggggtccttcaaggatgctagccgcagggaagtgtcgcttctcgcctcggctctcccaggtgcctcgcgtctccagaaaagcccagccttgctgtctctcgcgtcttctctctgcccccgcggcgacaagagctggggactgcggggacccgccaacacctcccgggggtgacccggactcgctgctccgcgcgcccttctcctctcgagactccgagctcgcggtggccgtgacgccggctaagctccttccccggttgcccgggagaaccctctttgggccccaggcgaacttgggcagcggccgcgcgacgctggcgcggctgggctccgagcacctgctcctcagctcgctggccccgcggctccgggcgggcggggcggcggcggccgtgagcgccgtgcgctcctggagacgcggtgctgacgcgcccggctcctcctcgctgcattttaattcctggccactgtggccgctgcacaccgagcgggaagcctcttgctggagtcggccgggtgcgggggtggggtgtggtggggagcgggatggggatgcgctgtacagatgtgctcaggtgtatgggcttgtgggagagataagtagtataaccattgtgctgatgtggccccagtgtagacaggggtgagaggactcctgagggtgtgagatgggctgtagagagagcgagttgctgtgtagtgtgggcatttgaacacgattgcgagtgtggtgccaagtattgggtgtgcgtaggatgtgcattgtgtatgtgtgaatgggcatttctgtgaaactcttgaatgtgagcatgtctgcgggtggcgtgctgtggccattagagtgtggtgcatgcaggatgtagtgtctatggtgacgtgtatgttccgtgtgtgtatgtgtgcacttagtgagtcctgggtttgaaatgcatgtgttgatgtgtggatggatatcagggtttctagatgtggtgtgtggttggtgtgttttgtgtgtgtgtgtatgtgcatgtgttgtatgtaatgagtatgtgtgttgaggcattgcgagcagggtaggctcagtgcgacaatcctcccctcagcctcttagggacatcccatgtgtgtcccagccccttccctggaagtgcctactgctcagccctggcccagtctgccaagcacagctctccaagagggtgggaagggggagtaggacttccagggacaggagactccatctttcccattccccttgctgggacagggaacacttggagccccattactccatgagataaaggggttttccagacattatccggagagtagaatttggtggtggaggcagtgtgaagggactccaagggtgggaggatgctccagtggaagaaggaccaacgtgtgtatcctttggggagaggaggcttggggaagcagagatttgggtgtggagaggagttttaccgtctttgtaatgatgaattaggggcaatttggccagatctgttgaatgagctgtgggtttccaagcaggagagaagcagtgctgggatgggctttccctccccactgacctgagggcacccttacagcgtgatgactccctgcatctggtctctggagaagaggacctctgagcccctcatttcccactcacccacatacatacatccacacagtcacacatgtacaagcacacatatacacaaacacacacacacactacacatacaacacacatatacatgaacatacatgtataccaacatatacacttaaatgcatatatacccaatgcatactgcatacatacatacacacaacacacatacatatacacaacacacacacacctggaaacccttctcactcatctggggaaaaagctattgcagttgggcattgatgacagtttgctttgggtttggttgcttgaagatgtctgttgctggctttgaggggagggttctgaagctgcctgctgtactggggcctctaccaaaggctcatactccagtgctcccagcctggtctcaagggtcctggaaatgccacagtgacccgtgtcttggccaagg

SEQ ID NO: 1243694 - DNA, 4001 bp, Homo sapiens
taccgtgttagccaggatggtcttgatctcctgacctcatgatctgcctgcctcagcctcccaaagtgttgggattacaggtgtgagccactgtgcccggccatgtatcttatatcttagctagtagtctaccaactccttgaggggtagaaaccaagttgtatagagctgtgtactcccccagtacctggcacagtttcctgagaaaaacagatgtttcagaatattttttagtaaaagaaaaaaagcggcccagcgcggtggctcatgcctataatcccagcactttgggaggctgaggcaggcagatcacctgaggccaggagtttgagaccagcctggccaacatggagaaaccccgtctctactaaaaatacaaaaaattacccggacatggtggcaagtgcctgtaatcccagctactcgggaggttgaggcaggagaatcactttaacccggaggtggaggctgcagtgagctgagattgcaccattgcactccagactgggcaacaagagcgaaactccatctcaaaaagagaaagaaagaaagaagtggtaaaaagcaaatatgtggagtcatattatatccacagtggtagctattatgatgtaaacgaaggcaaaaataattaataaggacctaacctagcatgttatgactgcttacgttgtatgcaatatattacaaatcagcaaaatataagctctgaaaattcagatggtgtctttagttctcatctctggtatcccatctacaacaatccaccatggaagttaagtacgtctgctacttcggatcacagggaggtctgatgtctttatttttatttatttatttatttttttgagacggagtcttgctctgtctcccaggctggagtgcagtggcacaatcttggctcactgcaagctccgcctcccgggttcacgccattctcctgcctcagcctcccaagtagctgggactacaggcacccgccactacgcccggctaattttttgtatttttagtagagatggggtttcactgcattagccaggatggtctcgatctcctgacctcgtgatccgcctgcctcggcctcccaaagtgtctgatgtcttctgacaaaagatatttaatcacgctttcattcaacaaatattacttgaaacattacattttttgaactagaactttatgcattaccgtaagcatagttgcttgaaaacgtagtgaatttcctaaaaagctaacaattttatatgcaagcatagtggccaaacactaactcaatgcaaaggagtattaaatctgtttctttaaaggtatgattttaaaacaaaacccttttctatttattgtctcagtctgtatacatttgaaaagaaaacttaataatctggtgcttaagaaggtttataaaagagcatgtgaatgcccagtttagataattgtgcaattcacaatgcagtataattaaaagtgaaagtgatcttattcaacatacgactgcatgtacggacatgaattatcatctgcatatacatatatgtgttctctttcacacacctaccacttttcacacaacatacatacatatacaatacaaagcatagtcttacccaagattttcaaggtcaaaaatgcgattcaggtcacagtcaatatatctggtacacttcttcactgctctggggttagtaataaatggttttacctccagccctgttctctgaatctcagcgccattctctagccaatgcttaaccagaaatactccggttagctcattcccatgggttcctccaaagatagcaaccttttgtatatgttcttcagcaatgtgacaagaagtcatttcaccaagtagtttttatctgatttctgcaattcagaagagagatcaaaggaaattcgattttcttaagaaaggtttagaaatgtaaatgagactttacccaaagggcaaagtacagaattcccttgagtggagtatattttaattttctgttacaagttctgagccccgtttatggacactcccttctttagccctgccctttgccatatttggattaaaatatgcaaagatcaactagagatacagctgtttactttaacttctaactccctcagatggtcagtagatctaaatacagtaataaattagcatttcatactaatacaaaaattccattcttttcctcagctaggatgtcatccagtgaggctttcacaattatctgtaataataaaaatagtttatacgtttctaatttcacaaaataaaaaagtggcccactcagtatttccacgggcatttcaaaacatttcttctctgaaatgagttcaagcacttttcatgatctgagggcatttgaatctcacctctataaacagccaaaggctgaccctcagagacctcctcttgaaccggcgcccattctttcagaatgctttttcacaatcagaaacagaagggccaaatcaatgatcacttgggactcgaaaagctaccctgaaacatcccttcatttctttctcatgaggtttttggtaattctgtgttaacttacttatgaatcttcctcattttttgcctaaataccaaaggaaagacaactgttagtacttttcaagtttttgtgatgcctgaaaatgtcttgggacacactgcatgtgctaaccacatcatgtgaacttacatagacacagccttattcactgtcagcggggactctccactggactgtgttactcaaaaaggggtcttattaggggaaattttccagaatactaagatgattacatccctttggagaaatgactctgagccaaatctgatttgatttcatgctcagtcacccagaaagtcacatatgttcaagtactgggaataccatgtactagtaacgccaggttgtttgatagagggtacaataagagtaatttattacaattgcagagtttaatttataatgtcctttcactcagtttattcatacattaattttatacgatagggtgggttaggtgttgacatccccactgcaggggtaaacgaaagagaggttaagtaactcagttaaggttctgcagggatgtaggagaacctaggcctgagacccatgtttctcatcccaagtctagtgtttttcacaggacaatagggtgcctctctgttatttttggtcttcttcacagttctagttttgctctttcagaattcacataaacagccattacagtgtgctcaggaaacaaacatgcatacaaaccaaatacatggtggaaaaataaaatatgaatgcttcctaatatttaataaacccactgaatgttcttcctttaagagcttataatgcagagatagagaaagcaaaataaccacatcaaatctatgcattaaaatgactgttctaatagaaaaaaaaagctcctgtaggctttgactgtctgtccacatccatgtacactgaacacttcagacggtgtagagatgatgaaaacacacgtaaaagtaaacagatgacagttgtttagttgctttggttttaagagcagtaaccatggtgaattattaacactctactatgcttggtttcttttctgctgatttgtagtttgttctgtcctttgccctagtctctctggaaatgctgcttcagttatttactcgtagctggcacaaatgacttgcattttgaagcttgttttatggaattttaacagatcagcactttgaagcacatttcacattcataaataaagtttctcttacatgtcaaaatgaataacttttttgagagttaatgaattgcagcaattatttcccatacttaccttgttttttgtgtacagagtttgtcttctgtggaaagctttattaggaaaaaggagagcatttcctcagaagtagagcaacagaggcttttcatactcttataccaagttaacttccgaaagatttttaactccctgtttcccaaagtgtacttgatttttgggatgaccca

SEQ ID NO: 1243695 - DNA, 4001 bp, Homo sapiens
aggaaattcgattttcttaagaaaggtttagaaatgtaaatgagactttacccaaagggcaaagtacagaattcccttgagtggagtatattttaattttctgttacaagttctgagccccgtttatggacactcccttctttagccctgccctttgccatatttggattaaaatatgcaaagatcaactagagatacagctgtttactttaacttctaactccctcagatggtcagtagatctaaatacagtaataaattagcatttcatactaatacaaaaattccattcttttcctcagctaggatgtcatccagtgaggctttcacaattatctgtaataataaaaatagtttatacgtttctaatttcacaaaataaaaaagtggcccactcagtatttccacgggcatttcaaaacatttcttctctgaaatgagttcaagcacttttcatgatctgagggcatttgaatctcacctctataaacagccaaaggctgaccctcagagacctcctcttgaaccggcgcccattctttcagaatgctttttcacaatcagaaacagaagggccaaatcaatgatcacttgggactcgaaaagctaccctgaaacatcccttcatttctttctcatgaggtttttggtaattctgtgttaacttacttatgaatcttcctcattttttgcctaaataccaaaggaaagacaactgttagtacttttcaagtttttgtgatgcctgaaaatgtcttgggacacactgcatgtgctaaccacatcatgtgaacttacatagacacagccttattcactgtcagcggggactctccactggactgtgttactcaaaaaggggtcttattaggggaaattttccagaatactaagatgattacatccctttggagaaatgactctgagccaaatctgatttgatttcatgctcagtcacccagaaagtcacatatgttcaagtactgggaataccatgtactagtaacgccaggttgtttgatagagggtacaataagagtaatttattacaattgcagagtttaatttataatgtcctttcactcagtttattcatacattaattttatacgatagggtgggttaggtgttgacatccccactgcaggggtaaacgaaagagaggttaagtaactcagttaaggttctgcagggatgtaggagaacctaggcctgagacccatgtttctcatcccaagtctagtgtttttcacaggacaatagggtgcctctctgttatttttggtcttcttcacagttctagttttgctctttcagaattcacataaacagccattacagtgtgctcaggaaacaaacatgcatacaaaccaaatacatggtggaaaaataaaatatgaatgcttcctaatatttaataaacccactgaatgttcttcctttaagagcttataatgcagagatagagaaagcaaaataaccacatcaaatctatgcattaaaatgactgttctaatagaaaaaaaaagctcctgtaggctttgactgtctgtccacatccatgtacactgaacacttcagacggtgtagagatgatgaaaacacacgtaaaagtaaacagatgacagttgtttagttgctttggttttaagagcagtaaccatggtgaattattaacactctactatgcttggtttcttttctgctgatttgtagtttgttctgtcctttgccctagtctctctggaaatgctgcttcagttatttactcgtagctggcacaaatgacttgcattttgaagcttgttttatggaattttaacagatcagcactttgaagcacatttcacattcataaataaagtttctcttacatgtcaaaatgaataacttttttgagagttaatgaattgcagcaattatttcccatacttaccttgttttttgtgtacagagtttgtcttctgtggaaagctttattaggaaaaaggagagcatttcctcagaagtagagcaacagaggcttttcatactcttataccaagttaacttccgaaagatttttaactccctgtttcccaaagtgtacttgatttttgggatgacccaaaaaaccacacttttttattagttctcagcgaactgatagtatacgaagtgaaaccctttcgaattgtcactatctcattattaagttgaatatataatattctgaagtacttaaaagagtaagcataacttccagcattacaaatgttttgtgggatagagttgcctgatgtattaataaaataatgtagtttaaaacaaaaggatgccaggtgtggtctcatgcttgtaatcccagcactttgggaggccgaggtgggcggatcacctaaggtcaggagttcgagaccatcctggccaacatggtgaaaccccgtctctactaaaaatacaaaattacctgggcgtggtggcgggtgcctgtaatcctagttactcaggaggctgaggcaggagaatcacttgaacctagaaggcggaggttgcagtgagctgagattgtgccattgcactccaacctggggaacaagagcgaaactccgtctcaaaaacaaaacaaaacaaaacaaaaggagagcagagttttacttcacagtcatggctgtccagtagatccctgccagaaattttgtaggagacaaatttaaggtgggttgtttcccaaatggtatgactgggggataagaagggttttttgttaaatattatacataagatgtctcatacataatgtgatgttcagtagttatgtaatcaaactacttttactactttagttttctccttccctgtgatccatcctgaccaactttccaggtggaaataaataagcagaaaaagacaagtataaaacagattaagtttataaactgctagcaaatattctatattgctcatgtctgcagtccctacagaagtaatcggcttaaggtggttttttttttttttttttaatgaaaaatctatttttggggtgggtgggtgtgtgttgtaaatgtatgcacatccgtatgtagatatcaagtcaaaatctgcttccctgaagcttctattcatgttttgggtaactcctctctggaaccatgataaataacaagttttatttttattgttcaagtcttcttcttcccaaaataaaagatggccctattccttgaaagctgttccttactctggcattcaaggtctgctattatctggtctcagtctacatctaatattattttctaacactcttctttacttgagatagttttaaagcaactactaaaatgtctgtggtcttataggcctaggcctttactaacaatcttcctttcatctctaagcccttccctatcccagtcttcaaatggttagaagatacggtaacaacaaaacatgggctttgaactcagacagctctagaatccactacctggcccatagtaagttccggataaatggcagctactgttactcaaattaaataagggctaacagttactgggcatttactgtgtgccaggattgtctatttcatcttctagtatttttagggcgattgttgttattgttcttttactggtaggtccagagggtgttcagtaagtaacttgcccaaggtcacagggccaggaatccacagtcctctttgccaggaagcctggagctcaacgcccagggtcgcacaccacgcggcttcccctgcagagcgtctctgcggctcacgggcgcttccctcccgcaagctcccgcagccccggcgctgcctcgctgacggctctccgccttccatggccgccatctgaacctgggcttcagctctgtccccagcctcccggggactcagattccctgaccctgatccgacccagaaattgagccagacacctcgggtggccttcgagtcaatctctgggcacactctgggtggccaccagcatctaacaaacggatgtctggaccctaag

SEQ ID NO: 1243696 - DNA, 4001 bp, Homo sapiens
tccaatgacaagggtcttcctgagacacagagaaaacaggaaaaggccacaagaaatcggaggcagagagcaatgcggccacaagccacagaacgcttggagccatgagaagctggaagaggcaggagggattctcccttagggcatttggagagagtgtggccctgccaaggccttgggtctccagagttgggagggaatatatgactgtttaaaaccacctgggggcttttccaagtgagagccagtatgttcagggggcaggggcacagatatactcagaccctgctgctgagctggagcaaactcacttcagatcatattcacaggggttgaagtcctgccgccggcacgtgtcctccagaacctgggggtgagatgaaaggatggtgaactgctgagtgtgcagggctggcgggcgcagtgggccaggtcagccaagggcattcagcttcctggtgagccaggtggctctgcccaggcaaagccaagcacaagaccacactatggacggtccccgcaacaaatgcaggctctcacctgcaaatcctgtccactctccctcccttcttcaccatcccctcagttttgtaggaaagctccactcagagttcccctgcagtacagcaacacgggcatcttcctggcacacaccctgggctctccttcaaaccctgtagttctgcaacctgccttaaacttgcctagcacaagctaccccctggctctggcacggttctgtgcacctgctgccactgcctgcaccgcctccgcccctcttctccataaaaagccaaagccgtggccttgcaccaaggggtcccgcgcagcctctgcgggagcgccccacttccgcactctgcacgcctggcaccaacagcctcctggctgcgccctccacctgcccaggcctggggaccccacgccgtgggctgctcccgcaaactccgagtcgtgtgcaccttcggatcctcacggtcccccacgcagcagaggctcaataaatactttttttttttttttttgatatggagtctcgctctgtctcccaggctggagtgcagtagcgcgatctcggctcactgcaagctctgcctcccaggttcacgccattctcctgcctcagcctcccgagtagctgggactacaggcgcccgccaccacgcccggctaaatttttttgtatttttttagtacagacggggtttcaccgttttagccaggatggtcttgatctcttgacctcgtgatccacccgcctcggcatcccacagtgctgggatttacaggcgtgagccaccgcgcccagccaatacttttacatttaattgattcgcggtcacaaggtgcccaagtaaaagtgcagtgagtgactcggcaaaaatcgcttccaggccccacggccgggacatctgccaccgcgcaacccgggctcccgctccgggggacgccccggaatgggaacgcgggtctagggctccactcctccctcttcccggcgccctcgcgagctgggctcggccgggcgccgagtactcgatgcgggtgacacgcggcgccgttctacctcacccctgggaaggctcgccaccgccccgcccccactcgggacccccgggacccccgggaccccagcggaagcgcaggtgacggcgagcagggggcggggccgccgctcaggaggccgctcattggccgccgaggccccgcccccgaacaccgggacgccgaccgcaatgggcggggcctcggcgcagcgccccccgcccgcctacccgtccgccccgggcgggcggccgcacctgaagcagcacggtgctcggcgtcaccttcaccgtgtggcgccggccgttcggggccagcaccgacaccgcggagcctccgccgcctgccggggccgccattttccgctcacgtgacccgccgccgggccggcgtcaaacaactttatcggcaacagccaggacgcgcagccacgcggccagggggcggggccgcagcgcacttccgggtcctgccaggccccgccctttccccacccacggcgccccggccccgcccttgggccgccaaagcccgcgccagacccggaaagcgcggtcgtcctctgcctccgggaagcgcggcttggatgggctcgccggggccaggctgggccggggctgggcgcgcggtcacccccggtgagcggcactgagccccggggtcccagcggtccgcgctcgcccaccctcgcttcgtccctgacacgtccccagctcggtgccctgctctcccccgaccctcccggcttcctccactccagcagctgagcctcttccctgcccacctgtccctgtggtcagcgtccacctcctgaccttatggtttggggcagtccccccgcccctgtacggatcctccctgggtgttgggactcgtggccctcagtctagacctgatttctttcatcctaaaatgggagtgcagaatctggcagccctagggctgccgcgacggtccctaaacctgagggtaggaaaggcgggagaccggtttcagaaccgtggggtgagcgaacttgagtctcaccggagctcctgccgacccacaggcactcaaggacttcccgcaccaacccatgctgaggaggggcttggtggcagcctcaggaaacactcccatcgccagccaccgcagcagggaaagcacctggcctcaccagctccaggcttccagaaggagctgccctcctgactcgcagccgtcgaatgtgcttagctcccagcacctgggccactcatggacagcactcgcacgtgttccgccccgccccccacctccatggctcagccgggccttggcactcctctctccatgtgcctgcctgtctctgcggactcctggctagggctcagctgcccagtagcctgtggaagggggaactggtgcagttatcagtcaatcctcccacagggctgggattacacacgtgagccaccgcacccggcagtcattgctgagtctaaggacatctctgcatgggtgctgttgtgccttcctgtcgatgacatatccatgtcacccacacacacctgtatgctgacaaacacggacatctatgtacattggagaaacctggggaaagccccaggctagccatagccctcccatccagccagccagtcccatgctctgtgcaacctcagaaccttactgagccacacatcacctggtgggttttaattctttagtggcgtttttgaagagtctgttcctattttccttagactgtcccacagtctggatccttggttaaacgtttggggcaatgatgaagggaggtgacaagtcagcaggaggtgcaggacatcagcgtggccatgagtgaggacgtgaagttgaaccacttggtcagctttgggtctgctgaattcctccatggtcaaggtccgtggctccttgtggagtaattaaggcatgcgtgaggtcattctctgagaccacaagcatcaagttttcccaataaccatttgcccaacagttttagcatcagttaatgagtagattcagtgttaaaccgtaaagctgcaaaatcatggcttcccaagtttattgtttcttctacatttatagtcactttcggtcaagcttccccttctttaaaaagttattaaatatttgggaggctgaggcaggagaatggcgtgaatccgggaggcagagctcgcagtgagctgagatcacgccactgtactccagcctgggagacggagcaagactctgtctcaaaaaaaaaaaaaaaaaaaaaattaaatatggccaggcgcggtggctcacgcctgtaatcccagcactttgggaggctgagttgggcagatcacaaggtcaagagattgagaccatcttggccaacatggtgaaatcctgtctctacttaaaaaaaaagtacaaaaattagccgggcatggcggtgcgtgcctgtaatcccagctattcgggacactgaggtaggagaatca

SEQ ID NO: 1243697 - DNA, 4001 bp, Homo sapiens
aaaataggctttaaagttaaaccaggccaggtgcggtggctcacgcctgtaatcccagtacttcaggaggccaaggcgggtggatcacttgaggtcaggaattcgagaccagcctggccaacgtggtgaaaccctgtctctactaaaaatacaaaaaattagctgagcatagtggtgcacgcctgtaatcccagctactccggaggctgaggcaggagaatcacttgaacctgggaggcggaggttgcagtgagccaagattgtgccactgcactccagcctgggtgacagagcaagaccttgtctcaaaaaacaaaaagaaaccatacatgtattagaaaaacgccattcagttattatttataaagctgcaattgtatcaaaggcaacatacataggctctggagtcaggcaaatctaagttaaatgctggctctgacatttactggtgtaaaacgttaagcaaattacttttaacttttccatttaatttttcaaaaaatttaacttacttttagctactttttaccttctttcatttgtagaatacagacaatagatcatagggttgctattaagcaaaataatgtgtttaaggttcttacccctaacatattaaatggtaagtatcattattatgaaatagggtttcttagcattagggcaccaaaaccagaaactgtaacggaaagattgataaaacagaccacatagaaatcaagaactgtgtacatcaagtaccagaagacaagctgagtaactaactgccttgatttagcaaaggaatatcagcataacaactaagtagacaaaaaaaaacaaaaacaaaaactaagtagacaagtcaccagattctgaaaaaaacaactggtcgcagttaaatgaacatacatacatcttaactctcttcaaggacgccaagatacatgcttcagttagaatgctagtctgagatgaaaaggtgtaaaatataacaagtctaccttaagatgctagcccactacttcatggcattagaatctctttataatgaccgcttagtgcctgtcactgaaacctgataaacccaaaagaacatgttacactgcgattcctaaccgcagatactaagccatgagaaactgttttctttaagtaccttgcttgatttctgtagtgacattctaaagtggcattccaagcacaggtggatgtatgaactagtttaacttaaagatcttcttcagcgctaaagttcagtgattccgtatcacgaacccagaacttgaccctgggatcctctgtgacatgtcggaagtccaaaacatcacgttccaccaacatttcgggatctgggaactggccgtgttatcttaagtccccaatttactgtgaccccgcaaatatctcagaatccaaatgtttatcaggacttgacacgactctaaacgacacactctggcaactgttgcacacaatgtgtcacagctgtgggtcctcacaatgtcccacctttccccttacaaagtcaggatcaccttccgccaagacccaccttccaatcccccaaaagatagaggaaggaactcaacagatcctcgactcaacctcacctcaatctcgcagtccttcacgggaggcggagcagctgcagccgccatggccaggacccccaccatactccccgcttcccggaatcccgtctcctaggacctcacgcggtccagcccggcctgcctggaggccatggaggcggcccgctccagtagcagcaagctgctgggattctgctgagccgtttcggattcccccgcgcccaccgacagagagcgggagcggaggctgggcccagatcagccgaatcgaacacggaaagaggcaatgagaaagcgcgggcaatgagatccctgaggcgcggccagtgtatgcagggtgccctcgaaagcggcgcttcaggctgagcgctcgggaccgggcagggaaagcaagcggaccgcagatcggaccacagagcttcggagggaattcttgtcaattgggttttcgcgccgtcctgcgcgcaaggggcggagtttacggctgcttcaggaggctgcgcggacggtgagccgagagggccaaaatgactccctcggcgaacccgcgggaggcggaaccattgcaccgtggaattgaaagccaacccgggagtttggaaatttgaatttctgtcctatcagtttcaccgttgaggacgtgatttcactaagtcacctagtcagttgttgacagaattaaaatttagacttttaacgccctaggctagcccctctttaaaggcgaaatttgaaaaatgcagaaaaaggaaataattgatttacattgttaccatgcacaataaaatgctaatatttgggcgagctttccacctcaatatacgtcctctcaggatccgaaattcgacttttatacctataaaagtcgaagtacctattcgactaagaaggcatttctttctgtggattccatcctctcgaacagccgagtcattgcttcatctggttggcctgcgttcagtcctcgcagggtacctaccagtagtttgctggtttctgatctcatgcatcatttgcattgttttcatgggtttggttagcctttactttttctcttttcttttttttcactgtcccaggtttatcgaaaatattacagcattacagaaagactcaaacagctccccgaggcgttttgaaattcatctcaactgtaggctgagtgacctacaggttggacagactgccgaagtccaaaagtttctgcatttccttagtgtcaggattctacttcaatgatctcctgatccagagcttagacctcgggaacacaattgtctctcctttctctctcctcctcctgcagcttcatggagatacctctctcttactggccccctctgaatccgctttatcagatgcgtgacatagcctgctatcttgttgcggggcttcttgctgggaataatggcgatttcctcgcacacgcgcttgttcgtgtggaagtctttgcccaggcgcatgtagtacttttctatgatgacccgggccgccttctttacttcacggttttggtgcgaacgcgccccatgttggtgggtccttggtaaaatagctcttttttttttacgttaaagttgcaattacattaaatacagcatgttacatttgtttgagtgcatcgtttttgttgttgttgtttgtttgtttgtttgcttgagacggagtctccctctgttgcaccaggctgaagtgtagtggcacgatctcgaatcactgcaatctccgcctcccgggttcaaacgattctcctgcctcagcctcgcgagtagctgggactacaggcgcgtgccaccatgcggggctaatttttgtattgtagtagagacggggtttcgccatgttggccaggctggtctcgaactcctgacctcaggtgatctgctcaactcggctccccaaagtgctgggattacaggcttgagccactgcgtccggcaccgcgctttttttttttttttttttttttttgaggtggagtctggctctgtcacccaggctagagtgcagtggcgcaatctctgctcactgcaacctccacctccccggttcaagcgattctcctgcctcagcctcctaagtagctggaactacaggtgcgtaccaccatgcccagctaattgtatttttaagagacagggtttcaacatcttggccaggctagtctggaactcctggcctcaggtgatccacctgccttggcctcccaaagtgctgagattacaggagtgagccactgtgcccagccaatttgctttttttcactcaactttttatttatttatttatttttttttttttgagacggagtctggctctgtcgcccaggctggaatgcaatggcgcgatcttggctcactgtaatctccacctctcaggttcaagcgattctcctacctcaacctcctgagtagctgggattacagg

SEQ ID NO: 1243698 - DNA, 4001 bp, Homo sapiens
tttgaatagcaacatctctctcctggtgcccttcagaagccaaactttgaacacagttcctgaaatgaaagacctaacactagcctagctacaaatctctcagagacggcttgttagaaccttcaacagtcaccccaccctcagttcacacccagcaccctgggcagaggcagggaggaaaggcagaatctcccacagccttcccttggtgggatctctccatggctcccccgcctgaagtaaggacccaagggccggctgttcccaccaccctggactcccaatccttccatctcagaggacacttcttccatgaagtcctctggctctcccaagcattgctggattcttctcatcccaggggctggagtttgagttccctgagggaatggattgcatgggacccacttcgtgtaggccccgaatgggtggactgatggggacggtgcccagtgtggaaagattgtaaatcgtgtcacacagtgtcctctgtcccctgtgtctcaacgtcccagcttgaccatccctcttggaagaattccacccctcacctgcacctgtgccggtcaccagaccccctccacccccccaacccccgaccactacagctccctgagtcctgccatggtcagcctggggaggcttccaagtcatccgactgtcacagacacctggctggctgatgcacacaaatcaccacagcgaccactcctccctccgtcaccgacatgggagcaaaacctgcagcctcggtaaaactcatactatcagcagccccccaacccacaaagcagtcccagaaggctcccaaggccaggcggtgggatacagacaacttccgccgtgaagaacccccctaacacaccccccaagacccgccccctcatgaacgttcccagggtccagggggtgggcacgagctaaaaatagacggggctgcggagctagtgagagccggagggagggaaggggcgctctttggaggtgggggacgcccgtgtggagcggacaggccccgagagggagtgtgagcgccggcgcggacacgcaggcggagctggcgaccccccgcccgagggggctccgcggggggcgggaaggcggctgtgacctactttctccgcctccgcacggccagccggggagattagactggcgattcggccccctcccagcccagagcccggcagggaggctggacgccggggacccgggaggggagctggggccgcgtcggcgggaccctgcgcccccgaggcgtcgccccgcggctttcccccgccccttgcgtgccggccctgcgtaccccagctggtcccggtgcggcccataaactggtgcgtcctcgggttccacacgaactccttccactcctcaaccacctgcccgcagctcttcttctctttctggatgaccatcttggtggcgcggggcgagtccgggcgcggggcggggggttgcggagaagcgggggcgccgcgcgctgaagccctccacacacccaaaagcacggggagcgaaggcggcgcgggcaaaggagacccccctcagatatgcagctgctgcagattccggggtgcacgaccacgcgctgcggggtgctggcagcgcggcggaagatgcaccgatcctaggccccccaactgcgatgaaaaggggtgctgtcagagcaggggagaataacaagaggaaggggtatgaatgcagcttcaccccccaccaaaccgtctagaaacaaaacgaaatggggtgcaaaaacagacggctacaaaaaccgagcagaacgcagaaaaaaagcggggtacaaaaaggcagagagaggtgggggagggggccgccccgaaatccaagatgcaaagaagctgtggaacgaagctcaaggctcgctccgccaagcggagaccactgcaccggtggtggctcagccgcgggggtggggcggggacgcgcagctgggggacagccagggatggggggccccccaggcggaggctccgctcctcagcagtgcgaggcccgcggtcgccgagcgcggtctttatactctgcggctctgggggtgcccgcccccttcccacccccagaagctccgcctcctcgccactggcccaggcgacctcatacatatgtaaatatggagaggttgggcccgcccccctgacttctcttagggacctagctgtctctccattacccccaccccaggtactagactgggacagggtgggaggaagagatagagggcgtgtccgggcggagtagagggaaagataaccccagagaaacacaacggcagagagagaagccgatatatgctcaaaggtgggggccccaggcagggagttagaaagagactaagatacagatgcggcggaagagtccgggagcagatggggcagaatgtcagaggaataaagagctagagatcaagaaagagagcgaagagaccagccgggaggctggccgagccaggagggaagctaggacaggccccgcagagatggataaaggccacccccagagggacgttcccctgttgggagccgctaccagtcccccagacgcctccttctccaatctcacagcccctgtccacaccacctggctctgtccacgtgcagaggcttccccatcttcccatcacgtctccctgaagccctctcaacaccacattcccagtccccagcactgccctgagatcccagccctgcagccaggtctacttcggttctctgcctcctggcacccccacccccacgtcggaactcacctccttatgtgtctacttgggtcaacaaacatttattgagcacctctatagactgtgtgctgtagccctggggaggccagagaggttacactgaagccacatctctcacggggctcacagtctagggcgggagtacacttgctctacataccacatgttaagaatcattatctcaagccgggcacggtggcttatgcctgtaatcccagcattttgggaggccgaggcgggcagatcacgaagtcaggagttcgagactagccttgcccacatggtgaaaccccgtctctacttaaaaatgcaaaattaggccaggcgcggtggctcacgccagtaatcccagcactttgggaggccgaggtgggtggatcacgaggtcaggagatcgagaccatcctggataacacagtgaaaccccgtccctactaaaaatacaaaaaaaaaaaattagctgggcgtcgtggcgggagcttgtagtcccagctacttgggaggctgaggcaggagaatggcatgaacccgggaggcggagcttgcagtgagccgagatcgctccactgcactccagcctgggcaacagagcttccgtctcaataaaaaaaaaaaaaaaaattagctgggcatggtggtgggtgcctgtagtcccagctactcaggaggctgaagcaggagaattgcttgaacccgggaggcggagcttgcagtgagctgagatcacgccattgcactccagcttgggcaatagagtgagacttcgtctcaaaaaaagagagaaaaaaaaaatcattatctcggccaggcccagtggctcatgcctgtaatcccagctctataggaggccgaggccaatggatcacctgagcaagggagttcgagaccagaggtcaggagttcaagaccagcctggccaacatggtgaaactgcgtctctactaaaactaaaaaaattagccgggtgcggtggtgggagcctgtaatcccagctactcaggaggctgaggcaagagaattgcttgaacctggaaggtggaggttgcagtgagccgagattgtgtcactgcactccagcctggacaagagcaaaactccatctcaaaaaaatggtatgcattgaatgaatgaatgaatgaatgggagttggggctggcctctgaagggtaggtagtcttccaggacaaaggaatgaaaggcacagaggtgtgaagtcaggagtaagcacagtctaccccag

SEQ ID NO: 1243699 - DNA, 4001 bp, Homo sapiens
ccagaggatccaggggagcccagcaatatccctccccaacttttcccatcacaccccaacacacatccaccctctgtggacctacacaccacgccaagcccacagccttccccatcagttcacacaggtgtgcgctggccagggcaccccaaggatctcatctaaccaaataacaggtggggaaggctggggctccctccctcccagtcagttcctcctccgctggaccaatgaagacatgatatcagaatgaagacagacctggctagggtcgtacagaagcagtatttgtgtgattccagggacaggccaagggctgcgtctccagtttccctcaggaatcaggattcccaagctggaggctatagcagcacaaaagaggcagtgggaccgcagacctgcctgcgccggccctcgcccccagcccaccccagggtcagaggcagcccatgctgcccagctctcctgcagcaaagcacaacctccctgccaagtcactaatgggggatattaaataatatttatctccccagttcctcccacagctcaactaaatatagcaactaatttttttgaaaaaggatttctgctccagaaagataatatttatataagaggtggttttcataaaccaatacaaaacccaaaagtccttttctgacacttcttcctaattttcaagctagccctgagtagtaggatcccagggctagaataccttcccctctggctggctgggaaccccaaaagggcaaggctccaagtccccaaaggatgcagacccaggctgccctctgtagatggtgagggtatttctcctgggatccctcacactctgcccgatgctgcgggcatgagcaagggggtggcaggtcctgcctggaagggatgtggggagggcacctctgtattttccaccctcatgggacctccaaggtgccaggccacatctggacagtacccggtggcactcaatgtgccttttggcaagagcaagaatcccacactcctttgaaggaggtgaggatgaaatgatagtgaagcctccctccctccccagagatgggaaaggcctccctggcagttccctgaggccttgactccgccaccccaggaaggtgggtctcccgcctcagcagttcaaagcccccaccgactccgccagccacatccgcttcgggttgcagaaagaggaagacctggggtgggggtgggggccccaaggctgctagctgataagcggcaccttcctgggcgttttctggagccctcaggggagaccctggggccagctgggaggccgagcctgagtctccggccgtccctcgcccgccggtgtctgcgctgcacctgcaggatgccagcgggagcggcgcggcgttggggtggaatacggtccaggatggggtggaataacgcttccagggtggacggggccggagtggaggtgggaagtccgggaggaccgcgcagagggtgccaggcgtccggtctccccagctggaacccgctcccagcccccagcccccagccccggcgccggcgaaggtggccgcgcagccccgccgggtgccccaggagcatccgaagaggtttccggagccctcgcttcctgcccgcccagagccgggtggggaggcaggaggggaaactgagactgcggcgcgcgcggcccccgctccccggcccggcccggcccgcgcgctcaccgttggggccgtagcgctcccgcgcgccggtcacctgcgccgggctcaggccgccctcggctgtcaccgagaagtggcgcagcacgtcggcggccgggagcagatgcgccgcctccatgccgcccgcccggccgtctgcgccgtccgcaccgtcgaggccgcctctccgccggggggctacaaagcggggcgcgggggactcgggcccgggcgggcgccgcgcgaggccatgtccgtgctgggaccttacccgacggcagtggcggcggcggccccggcccgcgccaggatgctgcgcccgggactccctccccggggcggggcggcgcggggcccgccccccatcacaccccttccggccgccctccgcgccccggggcgcaccgcctgggtcccccgcccattctgcagaggggaaactgagaccgcccgcggggcgcgtgctgggcctgtcgggagccgggggcgcgtggcccgggggtcctcggtcccggtccgcggagctgctaggggtgggatctggccgagagctggggcggtctgcggagcacccggctctgggctgcgcgtcgcctcctctgggctctcctgggcccggggcgtcctgcttcccagctcgaattctgcgaagtgactccagagggaacccgaaagcctctgaataagcgggtcttctctagaggaaagtgctggatgttctccttatttggtgtttctgctttctttattcttttccaatgcccaccggcgaggggttattcctcacataaccagaacctttaacaaagagccggtgcataagaaagttcagaaaaccaggctcgttaccctagactcacaccgtcaccccagcaggaaatgtaaccagggagcaaaggtggggctccccagaggggcccgagagggtggggtgggggggtctctgcccagggctcccaggggactgaccctggcccagggaggggagagatggatgagcctccgcctcagcgctcccgagctccacccgccccaggagggccaggagaagtggcagcgggtcagaggaggaagtcgcaggaaggcagaaaccactcgccccgccaaaaggaggagctaagagaacagcctgattgccgctccctccagcttgagagacccagacagcctcaccccagcccttatctgcctcccaccacgagctgggctctgccttctagagcctcagtctctgccatccaccaaggctgcacagggtcagagatgccaggattgagcccgcacagctggctgttcaaaccccaaaccccttctgtgcctctgcagccaggaagctttcccagatagctgcagctgcgccctgccccaacaacacagcccctcacccgctcctgagagcctcaacttccagcctggtctggagctgctgacccctatccagatcatgcacacccccagattctgtgctcttcctcctgggacaggactgggcccctcctcctctccgcctctcggtgcctccctgagcaaagacactccctgaggactggctggaccgaaaggtgctttggggcttttgatgggtgatccagatggattccctgatatcagctgcgtctcagcctggtgctgtggagctagaggaatgctggttttctggttgtggctcctccggcctggtattttatttattgattttattattattattattattattattattttccttttttttttttttaatttctttgagtcgtagtgtcactctgtcgcccaggcggagtgcagtggcgaggcgacatctcaactcactgcaacctccacctctcaggtccaagagattctcctgccttagcatcccgagtagctgggattacaggcgcccgccaccacatccagctattttttgtattttttttttttttttgtagagacagggtttcgccatgttggccaggctggtcttgaactcctgacctcaggtgatccacccacctcagcctcccaaagtgctggtattacaggcatgagccaccgtgcccagccccattattatttttttgagacaggatctggctctgtcatctaggctggagtgcagtggcatgatcgcggctcactgcaacctctgcctcccgggctcaggcgatcctcccacctcagcctcccaagtagctgggattataggcgtgagccaccacgcccaggtttttttttttttttttttttttttttttttttttttttttttgtagagacagggtttcccaatgttgctcaggctggtctgaaactcctggactcaagcga

SEQ ID NO: 1243700 - DNA, 4001 bp, Homo sapiens
aaaaaaattaattaatgggtttttatgagtcagggtcttgctctgtcacccagtctggagtgcagtggcatagtcacagcagtctcgacctctgggattaaccaatcctctcatctcagccctggagtaactgggactacagccacatgccaccacacatggctaatttttttattttttttgtagagatggggtttcactgtgttgcccaggctggtcttgaacaactgggctcaagtgatcctctcgcctcagcctctcaaagagctgggattacaggtgtgagccaccatcctgggccttgggaacattcctaagagagctattcctcccttacctgtttagatgaattcactgggctattcaagaaggaggcagacacaggcctgattagacccctggtacaacagcggatctgtaaaatcagaaagccacatcctaccaaatcagtcaaggaaaaaaaatcctaattgctgagctgtcaaaaatgactacagatttcataaacagaataagttcaatgtatttcaaggtcaatttattcctgttcctatcagataggcctgccccagagacagctgtctcaatagcttgatatagtcagcagtggcaaccttcaccattcaaaaccaaaccaaagttcacttctttgggcacagctttaatcagcttctcagaatggaacaagaacccacactaataccaaagcaggtacaggaaaggtttatacccagatcaccaagtaatcagatgggggaaattttattctgctaaaatacactcacagctacacaccctaaatggagtgggccagtcagccccggaaaccgactggaatagccatccaaggagagccatctgtaacatggcttttttgaaataatttttagtgcagtggttctcaaacttggctgcacggtggaatcatctggagaagtcttaaaagatacagatgcctgggttccacccccattcccaaagtctgatgcaaatggtctaaggtgcagcctaggcatcaggattttaaaaagttccctggatgattctaacgtgcagccactgttgaaaaccactgttttagtgggctgtctctatggccaggacagactggggataaaaatcaaatccagactctctgaccacattccaaagccaagatagcttggttcacaggcccagataaacaggggttaccttcatcacatcctacagccacctcaaagagcctacatcatcaggacgccaagctcccctgggttcattcattaaacactgatggcgtccacaccatacacctggtactacagagcactgcggcgcggcaccttaccagagctggagaaatgaataatgccccggcggtctgcattttttcagtctgcagagggggaaaaaatagtaataataatcccactgagaccctggttgtttgcttataatgacgacctttggtcgtccccttcacccccgtccgtcctccctagaccacgctcttccttgcaccgtgccccagctgaggagggcattagaggtcagagggacagagcagtgggtcttcaaagcaaagtcatggagatcggaagtcaaggaaatgtgcccaagccccaggaaggaaatgttgcgaaagggaatggtctctcgggaagactggaggcggatactgggcaggtgtcgcgcaggatcctgcccatcttacacagcagtccccgacccgccccagccgaggcagtcaatcgttcattaccgttggtaattaacattcattgataaggccatatctagattgccatagcctctcccagcactggggggaaatacccctccacactgcccagcccacaaccctgcctattgctggctcccggccccaagtcacctgcactcctactaccctgcaacccctgcttggcccacagcgctcgcccggctcaaggtgacagactcacctcccagctttagcccttggtctcagcgctcagcttcccccacccacgtgtcctggaccttctccattctcattggccgtaatatccccgcgtccccattggttgacgtcatcgattccccactcttattggctttccgcagctgcttcctctccctccacaggagcttcgtggcaattcccgcctccatgcggatagaggcggggctttcctacgagatctggattacgattggccgatccctgaaacgctcgaccatagagttggcgggactcagaggttccataacctcgcgcacaagatggcgaccaaggtgtacgctgaagaaaaaggcgtgggagagatgacgggacgtgtgacgcagtcagacacatgactttggccccgagccttcattcgggcgcttgggccacggggcgcgttgcatgttgggattggtagttgcgctgagggggggggcccaaggacagctgagatcccgcgagatattctaggccgggagagccgatgcctttgcagtaattcccaccgtggaggtttgtggaaagaccgctttccatggagagtaaaggccggctggaaagtccccaagcggtgagcgcagttttgtggacctcagccggtgttcagcagtcatggactatcatccagatggctttctaaaacatttgttgggccgggtgcagtggctcacgcctgtaatcccagcactttgggaggccgaggcgggcggatcacctgaggtcaggagttcgagatcagcctgaccagcatggtgaaaccccgtctctactaagaatacaaaaattagccgggcatggtggtggcgcgtgcctgtaatcccagctacttgggaggctgaggcaggagaatcgcttgaacccgggaggccgaggttgcagggagccgagatcgcgccactgcactccagcctgggcaactgagcaggattccgtctcgggggaaaaaacaaacaaaaaaattgtttattttgtaaaaacaacactgaaagaatgaaataatatccctatagaaaaacgagcaaaggataggaacaggcaattcagtaaggaagaaatatgaattgcaggaacgaatgtcagccttcctaatcaaagaaatataagtttaaacgctccgcttagtactgctcaaaacagcagagttctttttattaatgtgagccacacgctctcctatattgctggtgagaggatgaattagaaaaccttccttgaaagcagtttggcaatatttatttttattcaaaggctgtgaatgggccatcctctttgacccagtaattcttgagtaactaagagcctttaagctctccatccacttttcatccagtaatatcacttctaggaatttattttgaagaatcagaaatgcagattcttttaaaaagatgtgcatttgcagagtttgtcgaaattggaaacaagtaaatgttccactgacagtaaaaggtgaaataagttatgatattttcacttgatgaaataagcagaaataaaacaggaaataaaatcatgtgttttttttgagacggagtctcgctctgttgccaagctggagtgcagcggcgctatctcggctcactgcaagctccgcctcccgggttcacgccattctcctgcctcagcctccggagtagctgggactataggcgcccgccaccacgcccggctaattttttgtatttttagtagagacggggtttcaccgtgttagccgggatggtctcgatctcctgacctcgtgatccgcccgcctcagcctcccaaagtgttgggattacaggcgtgagccagcgcgcccggccatgtttttgaagaatattttatttttattattattattttttgagacggagtctcactctgtttcacacactgtagtgcggtggtgcggtctctgctcactgcaacctttgcctccccggttcaagcaattctcctgcctcagcctcccaagtagctgggattacaggcgcgcaccaccatgcccggctaatttttgtatttttagtagagaaggggtttcaccatg

SEQ ID NO: 1243701 - DNA, 4001 bp, Homo sapiens
agactttcccaaacatcagtgtatcggggaacttgccccgatagtcacataggttcttttctattttcctaagcgtcgactggcttgacagagtacaaaagagagaaattttaaagctgggcgtccgggggagacatcacacgttggtaggatccgtgatgccccacaagccacaaaaaccagcaagtttttattagggagtttcaaaaggggagggagtatacgaataggtgtgggtgacagacatcaagtacttaacagggtaatagaatatcacaaggcaagtggaggcagggtgagatcacaagaccacaggaccagagcgaaattaaaattgctaatgaagttttgggcaccattgtcattgataacatcttatcaggagacagggttttcagatcaaccggtctgaccaaaatttattaggtgggaatttccttttcctaataagcctgggatcgctatgggagactggagtttatttcacccctgcagtctcaaccataagagacaggtacgccccaggggggccagttcagagacctacccctaggtgcgcattctctttctcagggatatcccatgctgagaaaaagaattcagcgatatttctcccatttgcttttgaaggaagagaaatatggctctgttctgcccggctcaccggcggtcagagtttaaggttctctcttgttccctgaacaattgctgttatcctgttcttttttcagggtgcccacatttcatattgctcaaacacacatgctgtacaatttttgtagttaacacaattattacagggtcctggaacgatatacatcctcaactgacaggattaagagattaaagacaagacaggcataggaaatcagaagagtattgactggggaagtgataagtgtccatgaaatctctacaatttatgtttagagattgcagtaaagacaggcataagaaattacaaaagtattaatttggggaactaataaatgtccataaaatcttcacaatccacgttcttctgccatggtttcagccggtctctctgtttggggtccctgatttcccgcaacatcagtggaaaatggaagtcacaaataactttgtgtgtgtgtgtgagtgagacggagtctcgcactgtcgcctgggctggagtgtagtggcgtggtctcggctcactgcaacctccgcctcccgggttcaagcgattctcctgcctcagcctcccgagcagctgggattataggggccttccaccacgcccagctaattttttgtatttttagtagaggcggggtttcactacgttggccaggctggtctcgaactcctgacctcgcgattcgcccgccttggcctcctaaaattctgggattacaggcgtgagccaccgcgcccggcgaaattttttttaattcttaaaaatctattgcttaatccccagcgcctagaacagatcatgcgcataggaggtgctcaatgaatctttcttgaatgagtaaccgaactctgcacccgaggagccctgaacgctctatacgttcgaatcctggaagctgccgaaggggaagggcgcagccccgcagccagctgagcgtccctcggcaggttaacactgtctgcgtaatgtttccccagtccccccaccaaactattgaagtctgccgcgctgggagcggactgcacgagacacggcttgtggcagcgcctacatcagcggcgcctgggacacagccgggcccccctgaccccgcgcgccaaggagggctgaggaagggatcgcggggcgaggagcggcagctacacaagggacactctgccagcggggcaagccgagggcccagcgtccttgacgggggcgtgacaagggtcggcgtgaggtttggagagggcagagcagaggagccctccagggatcggatccaatgccccaagccccactcaccttcaccgaccctggctgcccacggtcctccgcagcaagtaacggaagtgggtcacgggaagatctttcctcagccaaccccaaagccaagggggtgggccttgcttcgcagatcagccaatagagatgagggctggttccggaagtatcttcccgggggcgggcacagcgcctcccccgcgcgggtccccgggcgctggttgggggcgctcccgtccctctcccctctgccccacccccgccgatgggccggcccggctctccctgccgagaaatgggccggcccggctgcgcgcgggcagcagcggtggcggcggcggtccaagatggcggaactgcagctggacccggcgatggcggggctgggagggggcggcgggagtggggtgggcgacgggggtggcccagtccgcgggccccccagcccacgcccggctggccccacgccccgcgggcacggccgcccggctgccgccgtcgcgcagccgctggagccgggtcccggaccacccgagcgggcagggggcggcggcgcggcccgctgggtcaggctgaacgtgggaggcacctacttcgtgaccaccagacagaccttaggccgggagcccaagtcatttctctgccgcctctgctgccaggaggacccggagctggactcagacaaggtgtgccccgccctcgggcgcgcccccgggccttcgaaccccctggtttctcgtagatcggtccccagagtcctgagacacgctcctcacaggcagccccctcaggccgggaccccatcctccccctccctcccacactactcgcaggggcctcagagggacctcccactccccttcttccatgctgaggcatactctggctttctccccgaccccgcccttcgttctctgagactccttcccacactgcgcccacctgcacccacgagaacgcactccacaccccttctccatattctctgcccctgacatcccactgagatctgcatgagttttccctggctcctcttcagtccccccactgccggtgccagatgcatccagaactgggtcagggttagctcaggcatccttgtagctttctcagactccctctcggacccctctgccaagttgggcttccacagctgcaggaagcgctccttgtgatatcacactgcttttctatagtcctggtcgcagaacttttatctgttaacagtcactggtttaggtccatatttagatcaaatgcgttttttggaaagaggttactgtttgccgctgcaaatctaggctaagacagaaggaaaatgaaaattttcccgggaaaattttgggcaggatgcatggctgctaaccaaagggttgagaggtgacaagacacttaaaccatttccagtttgaactgtgtcaatttctttttaactttacgtattcacctttaagttctcaacttaaaggcactgaccataactcacaccatcttatatcccatatagcactcagctggtgacctcaaaacagagctggagttgcgtaaacatttgttgttttcgtttattcctcttctctaagaaatctcagattgatggaaacctatcctgccctaactttaaagagatttcaaaacccttgcttataaaggaattatttttatctactctatatcctccttgtggtaatagaagccagtttcttcttgttccttttactgtaaagatgagtaggattaaagctgctcagagccaagtcctggcagtaccgagcttcctctgggcacagagctggggtgtgtgagattacagctggcagtgcaaactcccactgatgttggccttgagctcaggagcattgccaactacacagaggttttcttggaattaggaatgcagttcagaggcagtggaaaagtcagaatgtccatctcaagcaaagatttcagttacacagctacggcattttctccctttcttaataacaaacacgctacagaagaatgtttgtcactgtaattattgtccaggcaaagattgcaaattccagccagtaagtaaacgcctaaatgagta

SEQ ID NO: 1243702 - DNA, 4001 bp, Homo sapiens
aagcaaagagaaaatgacataactttggaaattaccacgagggctaagagcaaatgacaccccactacggctcttgcatttacatttctaacaccccatgaggacaggtcaacaactgtttttgacaccctgtctagaaagatggaaaggagaaattgcaaaggcagttcctgaattctgtcccacagagtgtcagatgaaaagtcacttccattccagtcaacatcaggatcaaatgacaattattttgggcaactcaactgataagaatgtatccagattaaagacaggaactgggaacctcaaacaactctttaaatacccaggacacaatattgaggcagtgagtttcacactgctcaatctgtttttgctagtgcaggaaacaaacagaagaggccttcaataccctctcataaagatgtctgccttgtaactatccttctcccttctactgacaatgcgcatttctaaaagcccaaagttctggcactatcctaaagctatggctacactaaagggtttaatcttccagattcctcagaaaacaatatttccccacttaggaattcaaacaaataaccgtcatctggaaaaagcaaccagtttgcatattaagctcaatttcaaatcaagcatgacaggaacacactgataatgacaaagcagttttatcaagccacagagaataagccttccacctctgcagctttctgtttctcaaccctaccttcaagattaattacattcttccatctgtcaaatctcatgagccaataaaggtttcgttttagtgctgtcttactgttgccgggtatgagacaactggcgctatcagtggtcctgaaactgcaattatttattctcgatcagctaatgtaaggcacagcctgtccagtatccaaactcagaaaaatgcacagtatttttagtgtcataagggcatctatactgagtactgatagatgagtctgacatcaaaggaagatttactcttctggaaggctgggagacattttgagaaatctgaacgaacaaacctttgtgcatgtgatgttcaagacagtaacacaagctcagacataagcaaggacttctcaagagaatatgcaggctgactttaagattctgtacatctgaatcatccaaatcagctgttaccggcaccacccttaaacaaagagagattctacaacctctaaacacataaaattaggcctggtcagcatagttcaggagctgtggataatgataagcctccaacgagtcgcctccgtcctcctgctctttaatgattataggtctcccaagaatatctctatagcaatggaggctaacagaaaactaattaggccaaagtagttctggacgatcacaaaacaaaatatgaagaaacagcaattctgcaaaagatgagtccaactacagcgcccccgcgccctgcctagaagaatctcactcctgtcatccggtcctcgcctcctcccacggtattcacctgcttcatttcctgtctacccaatgagcaggaattctctggactcaggctcatctaccttgagatgggaaaaaaggagaggaaaacccccaaactgagaaaccctttaagaagccccctaaattcttctgcctatccaataacctccggttcctccgcctaccccttaaagcagggaagagatgcggggcttccaaagggcagtgagcctccggttcctcagggcagaggaggggtgcccaaggagggggcgaacccccattttatctcgaagacgtcagatccccgctaattcctctgacaatcaagggggctcttagaaggatttcctacgtccatcgagggccgctccctgttgcgctaaacctacagcccccactcacctccaaactccgccacagcaaccgccacagaaaccaccgcagccaaacccgcaccctccgcggctccaggagcagcgcttcgacgtgcttgcgtccgtaaagccccgcccctgcgccgccgccggcccccgcccccgcaatgacctcattgcagttggccaatggggcgcagcctcgcccgggctgcagcagtgcggagtcacgggggtcgcaggcgagacccagcgtgctgacgccatgttggcccctgtgctgtatctccacgctggggagggttagcgggtggggctggaggtgcaggtgctcgaggccttaagttcctgagcctccctgaatcctttttcttaccccttatactggggtaggttgtcttttctctttctttttttttttttgaagtctcattctgttgctcaagcaggagtgcagtggcgtgatctcggcccactgcaacctccacctcccgggttcaagcgattctcctgcctcagcctcccaagtagctgggactacaggcacgcaccaccatgcccggctaatttttgtattttttttttttttaagtagagacggggtttcactatgttggccaggctgagtctcgaattctgacctcgtgatccacccgcctcggcctcccaaagtgttgggattacaagcgtgagccaccacgcccggccttttttttttttttttttttttttttttagatggtctgtttcccaggcgggaatgcagtggcgcgttctcggctcactgcagcctccgcctcccgggttcaggggattctcctgcctcagcctccctagtagctgagattacaggcacgcaccacgccacccggctatttttgtattttttgtagagatggggtttcgccatgttgcccagactggtcctggcctccacccgcctcggcctcccaaagtgctgggattacaggtgtgagccaccgcgcccggccctctctttattttcatatccaaagaattaattcacacatacgcacccaaataattaatgtcttctctctttattttcatatccaaagaattcacacacacactcaaataattaatacgcagacacatataccaccctttctcttttcccttattttacagatgagaacatttgagccccagactggggagcggctagctttagatcctgtagtagagtctttaacggggtctcatttgcataagtatggaaaacctctctttaaatggtacatggttcatgccttccagcaacttccccgggtctatttttctctgtttaacaggaaaaacctcatcagaccatatgttgtgaaagtacatttcagtcttgtttggtagattcatgtgggctcaattgaccacttaggagttttcaattcctcaaatttattttaaaaacattttttatggcttgtactcaacttgtaaattaaatattgaaaaacattttttaaacgcaaaagtgatgtctattattttttaaatgccattatcaaatattgatattgattcccttttcttgcccttttaaagaagagtagggatctcaagtcgtttgtgataaccagaattgtatcaggaaaaactcagaaaaccggttattctgtcttcctgggtggtggaaccctgttgaaattcaagtgtaatgagggagatattccagataaaaacttgttgctgataattttgtcaacctgacaaaaacatcatcaaacctgctttaccagcctaaacaaaataaggggacaaaaatggacgttttatttgaatttattgtctcatattgtgagtgaagatataacctgacttcaatacaaccttcttaagacacagagtcttggagagacccataccctccttctccctgctccctagctctcaacccttctggcaagacagatcgggacccacatttaaaagcctgccaagttagagaaaactgttacacaatatcatttccttcctctgagacttaaaaaaaaattaacctcagtcagctgcttgctaaccacaaatttttcatactccacttttaagacagcctttcctgtggacttacttcaattcccttgaactcttttcacggcttctttgaaagaatattgtttcagaact

SEQ ID NO: 1243703 - DNA, 4001 bp, Homo sapiens
tccctgggatgcccttcctttctcttctttactggcccttcatggcccatttccaggcccttcccctgagtcctgcaggtgaaacttcagctccctgctgcatccagcccccttccccatttctataaagttatagaacttggctgggcgcggtggctcacgcctgtaatcccagcactttgggaggccgaggtgggcgggtcacaaagtcaggagttcgagaccagcctagtcaatataaaccccatctctactaaaaatacaaaaattagcagggcatggtggcagacgcctgtagtcccacctacttgggaggctgagaccacaaaatcgcttgaatctgggaggcggaggttgcagtgagccgagatggtgccactgcactccagcctctgtgacagaggagactccgtctcaaaaaaacacaaaaaaacagaagaagaagaaaaaaaaagaacttgacagccagaaagatcctcaaaggcaacctagtacttcaacgcatggagaaaaatgaggaagtagttgcatgcccaagatcacacagacctcagaggttcagccagcatcagatcctagatttgcactcctgccacaatgccaaactgcctgtgaagttctggattttctaaaacaggcagtgtcagggaaaagtccctcataccttgctgtcaccctggacacgttctagatacccaacactctcccacctttttgctgaactcctactcatctatcatggctcagcttaaacaaacgccctttcacccaagacccattctaaaccctgaacatccccaagatgggagtaagcgattctctgtgttctcacagtttctttgtatgtcccttatcaggatattataaaccacaatttaatcagaatattataaccttttgcaatgaacagtgaacatcattcaggtgggcctttttcttctttaattgagcttctctaccaatacatacaggtgggtcttaaagacaaccgtgcctcctgcctccagcacaataaaactaattgaatggtgggagggtgttactgctcttcattcactgaaatgagtcattctcactcttaccctgacaccactcaccatcagcaatgaaagagccactacttctaagcttcatcagagttggaggtggaggtgactccacagtcagaggtggaggtgtcaatttctatttaggagagaaggctgcagatggcagaggttgtggtaggagggaaagtcaggaaacctgcagcagaagtgcccgggatggaggaatgaaggcccaggttctaggtcccttctgggcaggtcttgtgttgggcagtggagacacggaaaacagtcagacagacaccacaaacctctgagagagtctgcctgtaacccagacgaagtcctgattcagagcccaaacttccccttttgaaaacaaagatgacacctgctttccttattaaagggagggcagccataagctttgagaaaacctgcacaggccaaatatcaattactgtatcgtgcgtgactcgctgttccctctcgggtcgtctgcccttgtctgggcttcactttctcatctgtaaaaagacctgactggcctgcataacctcatgagcctgaaccctgcctcagttacttcgctttgcacagccgaagcccgaagcccaccttaccccagctcggccccaacccaaaagaacatgtcatggtcttacctgtcggcggggcgtaagcccgggctggagacgggatggttggccccggactcatagaagcgctggggccacccgccggccgattcaggagacggcgtcccccgtcccgcagccggaggcagctcctccacatcgcgcccgagggtctgggaagatgcgagacgcgaaacctggagcaggaaacacagagcgatgggatccccaaagccgcacggtcgggctgtacggaaacctctcaacgcctcctcagagccctcaacctcccttggacgccgccatcttccgcatgacacctacggcgcgccgtcgccgccgcgcgcctcctgcgcacacccccagtcaatcagcatcacaaacgcacctcgccccgccccctccacgccgcgcctcggcgaggagactacaagtcccagcgggccgctcgcgcaccgcgccacgtgttttctcctcccgccaatgggcggaagcgccgcctgagcctgctcccgccccccaggctcgcctgagccaatcggaaggggcggggtgtgtgtgtgtctgtgtgtgtttgtgtgttgtgtgtctgtgagtgtctgtgtgtgtgtatgtgtgcgcgagggcaagtcgggagggggacccagctcaggactgggaggccctgctcgcaggtccctgggtcccggtggcggccggagcgcttgctccgcaggcagcgggcgggtggtcgcccctcccgcccccaccccgcgcgtgcgcgccccggcctctccctccccgccaccctcctcggctcccgcgcggcggcggcggttcctctcccactccccccagccctggctccgggggaccccgcgatgccggtccgcaccgagtgtcccccgccggccggtgcctccgctgcctccgcggcctcactcatcccgccgccgcccatcaacacccagcagcccggcgtggccaccagcctgctctacagcggctccaagttccgcggccaccagaagagcaaggggaactcgtacgacgtagaggtggtgctgcaggtgagcgccgggccgggccggggcccgagggcctcctcgcggcgctcacgggccgtgcccgcttcggctcctcgaccccgcagccgcggaacaggccctcgccgccggggcctcctgcacccggcgcttcccacccgggaccttcccagcctgtgtctcacactctccgagccccagccctgacctgccccttcggacccagagcccgtcgtgaccggctcctggcggaccccgaacactcccagacttgaagcccgtgaccggcccgtctgggatccggaagcccctcatgactcggagaaggcctgggtccttcctccccatgacctgtcgtccctagatcagggactgccaccagcccttttcagaccctgaagaactctccattggtttcaccagacttgggaccctccccatgtctgggcccacgtcagattctctcagacctgagacatgtcctcctgccccttcctcagttccaggaatccgcagaccttggggtcttcctcctcctgagatctccttaggagggcttcatcagacccccagacgggggagcacctaacccgcaactgattggtcaggccctggcctcacctcaagaccaggcactcactccctgagtgctgctcacagtctgttgggatgttgcctcctgggtcccctgttccactcactgcttctgtctcttcatggtccaggcacccagctccttccagcttctccacccccaggcctcctgcccctgctctgggaccatttgcagtcttttcccagtcttcctggcctctatccagacttccccaccccataccttcgtcttgctcgatcctggttccaggggaccctctttcctgttcttaacttttctctacacaggcacagggcttcctcttagtctctggtacccatgtactgggaaatctaactcacccaattttagttcatgtccagtcgcctccccccatttgacctggattcctgaatacctgctgccagtccctgatcagcttcggaagtacagcttcacttgtctgggcctttcccacacctcactcctctcaggcttgacactttttgccagctgaaatggagtggcagtggtgaatactcttttatctcccctccccacaaaactcttcctcctctatacctacccctgcctgactaaggacccctttccccttccctttgccctttttttccttagtctgacacctcatctgccaggctgttcccagaagcccctccaaacacctgtccct

SEQ ID NO: 1243704 - DNA, 4001 bp, Homo sapiens
caaagcagcatcctcaaattcctactcttcctccccagtaggaggcctgtctacccatgtgccctcccccaccccccttccccacccacactcccccgccccggacccaccaaagacaccctcaagcccccaatgacctcagccttgagtcatgacactcgaggactccctgcccaaaggggagggtatctgtcctttacccattatttccccaatgcctggcccggctctcaccttgtctgactttctcttcttggctgtgggaaacaaaagcataaagagcagggtttccgttaagttctcaatctaaaagcatctcaagaaaaccatacaacaggctgggcacggtggctcatgcctgtaatcccagcactttgggaggcccaggcgggcagatcacgaggtcagaagatcgagaccatcctggccaatatggtgaaaccccatctctactaaaaatacaaaaattagctgggcatggtagcacgcgactgtaatcccagctactcaggaggctgacacaggagaatcgcttgaacccgggagacggaggttgcagtgagccgagatctcaccactgcaccccagcctgggccacagagcgagaatccatctcaaaaaaaaaaaaaaaaaaaaaaggaaaaggaaatcgcgtaactacactctctcttcatcattcaaggcaacaatttgtgaccactgtatacccaattcctgcttcccacctcatcccaatgccccccgggtttccccagatccccaagcacctttcttctccgagccataggaccagtcgttgtcattgatgtcatcattatcttcttggtcactctcagacttattcatattgttgctattggcaatcctgccaaggggagggaagagaaaggggccaaggggaaggaagagaaaggggtcaaggtggtcaccccgctctgcccccaacttcagaagcaggtggagcatctggggccaagtaaaacccaccctctgtaccttcccaatgcccccgggggactacaccatggcacaggctgcagagaacgggcagctctggttccctcaccggcggttggcgattcggctgctgttccgacccattcccaggcacttctccagatggggagcaaagcgggaggcggcaatgctgcgactgcaattggggcaaacacactccttgctcttccactggttgaaaacctgtccaaagatgtccaagcccggctggtccacgatctctggggacaggagaggctggcgatcagggtgggcaggaccctctcctcttgttcccacctggggtcccacggcctcttcaatccctcccccggctcacaggagctccaggtgctacatctagcacagtttccagagaaggaaactccaggcagtcccagggaagggctggactgctgctccttcaccctgaagctcaccaaaatccttcatgctatcagggtccgtgtcgtccaagaagaagtagccacacttgacagcccggtgtacctcaaagcagaatcccaaacaagaatcctcgaccaggtccgcgtatatctcctgagcgatggcctgggccccaggggagaacatctacggtcacaagagtcacagccccctggactctcaccaaccaaatctgctgccaactggccccagccaaaaatcatgctttctttgccattttccccatcttgacttcgtgttctttcttcttcctggatccttggctttttcagctggctattccctttaaggaacaaggctgactacccaaattcctctttggtgtggatgccagatacagcgacgtagagacatcaagagaaagaactggaggcacacgtgggggagccctcacctctagtttgctgttatccaggccagacaaagacatttcctccattttcatttgtaaactcttgtggagacggcgctctgactgctcatagcacagcgggcggcaacacggctgcacacacgggggtgggggtgttgttgtgagtccaaggcacctctgaatgcggccaccttccctccccacctcgctgcccaaagctcagtcctggcatcagggtctctccctccccaaggcccaggctccctaagtctggatggtccttcaaggcctgaaacctaaagggggcctagtctttcccaggcctgagctcaggccctggactccactgccaatcagagtctgggtctataggaggcagcagctcaccctaggtccccaaaactcaaacccctctttgatacccatggtgcaatgcagcagggggaggagaaggaactccaaggcctcaaagcaaacccacagggtgtggcaaagaactgcacagactcctaaatacaccccccgccttccctaaagactctcctcagagtcacctctgctttcagccaggatgtccacttgggggggtactgctaccagaagtagaaatggccctaggaccctacaaccttcaccccactctgtcttcccttgaaatcagcctgccactccacgaggggagcagagcccacaggagcctagagctaagggacatttctagccaccatgagcaggaacggcggggggtgggggggaagagcctggtagggtggcacgccaggagcgggcactccccttacctgttcttcctttaaataaccacccgccctccctcaggaccagcccggaagtctctccaagagccccaaagtccaggaacccccacccaaggattcagacacagaacccacaacccagggcccctcggaacggtgggtacgagtttcaggagctgccggcctagagtggggtggggactgacgaatgagccgggggcactgggaagggtaggaggccgggcctcggctcttcccccgtccctgcggcactgctgctgcatcataccgactggggggaggacagccgagccgccggggccggcgccgggccgggacagaccgacccccagagagtgggacgcgtcccagcccctctccttccccgcccgccagcagccccggccggccggggagaggagtccgggagggtgtctctattgtcccgggggctggggcctggctccctaacaaaggccccgcgccccctccccggccggccctgccccgcccaagggggacccagacgggggagagccaggggccccggcccggccgggaagctgggggaagccgggcgtttccgcgtcggcccggggggaggggaaggggcgctgacccagacctggggggagggggcccaagccccgccttgggccccgccccccgccccccacaggcccctcccccgtccccgtccccgtctccgtcccgtactcaccccgcccggggggccgcgccggggcccggcagcctctcagggccgcgtcctccggcggcggcgacggcggcggctgctccggagccccatgtccgtcggtccgtcctcgcctctccccggggcccagggcccggggccggggggtcgggccgcccccccgcctggccgcctcaccgggcggccatggccccttcccctcccttcttgtcccgtcgccgcctcctcctcctcacctcaccccgcccgcgcgcagtccgcgcgccgtccgcgcgcccctccccccgccccccactccagcccgcctctcccgggcggggggtgcggcgcgagcccggagcgcgcgcgcgtgtgccgcgaccggaggatggatggatggagcgagcgtgaacgcgagcgtgcgcgcgcgcgcccctctccccctccctctgcgcgggcgcgaggccaagcgcgagcgcgctccaacctcctcctcttcctcctcccgcccctccccaacaccccgccctccccctcccttcctcttccttctttcgctttcgcgcgcccagcgactgctcgcgcctgctagaagggcccgagcgcgtgcatctgccccgcggccgcagctcggcagcatttgctccagggggcggggaccgggaggggaggaggggcgccacgccgccgt

SEQ ID NO: 1243705 - DNA, 4001 bp, Homo sapiens
aataaaaaataaataacctaagtaggcctaagataaggggcaaaggactcacaccaacacctaacatttcacttctttggccctggcccacacttttcaggcatgaagctgttcaacctgtataagtcctgtccataacaacacagtcattcatccagcccctcacttacaccacagtagagagctgcgtcaatgaacacccacaattcaaggggtttagcacagaggtattctcaaagtctcctaaaaagcttagtttattaaggcttagataagatgcttgaggccttgaatgttatagcaataaccaggatttacacttttgcaagaacaggctttaaggacactaagagctaccctgatggccctggaccacttctcactttcaacttcttcatttttttttttttttgagatggagtctcgctctattacccaggctggagtgcaatggtgccatctcggctcactgcaacctccacctcccaggttcaggcaattctcctgcctcggcctcctgagtaggtgggattacaggcacatgcctggctaatttttgtatttttagtagagacggggttttaccatgttggccaggctggtctcgaactcctgacctcaggtgatccacctgcctcagcctcccagtgctgggattacaggcgtgagccacctacctggcctcactttcaactctcaaaataataggtacattttcttttaggagtgactaaggtaaaagtgacaatggtttctcattcagactccattcctgacagcctcactcagtgctccatgagggagggagctgatgtacaagggaacagacagactctccaggaagcaagagctccaaaaacagggagcaaagcctgtgcagggccccttccttcttctgcagccaagagaagaaagcccctaggccccaaatagtgatattggtaccaatctacaaataagcaagttgaataaaatacagtccagaaatagacccacatatatgtgggaatttatatatataataaaggtggcatttcaaatcagagaggaggcccttcaatgaaatctgtctggaccattgggaaataagtcaatttagatccatttagattcttacctcaatttagtcattaattccaaattgtaatttagacttgccctgggccttttaaactgtaactttatatccttttagagtctatttctatttgctgtctagttttttttttttcaggatatggattgggaatcatggcctgaaggccaggccctgcctgctcagtcccagatatcatttgtatgtgacgagccctgcagaggtcctcaccagctgggagtcactggctggtcagattcacgttggcagcacctgacaggatgtggctacaaatgaccagagcgggttctgtcgtcaaacttgggacccgtactttggagcataacggggaagaaagtgcttaaaggattgctcattgcaggatctcaagtttcccagcaggaactcgccatgcggggtcatgggggcgcagggacggagggaagggccttaccgtctgtcggccgtagggccaggggtaggagttctccttctgggccatccttagagagaaagggggaggagagctgggcggagaagggaaacagccgtgagaagcagagaaaaagagagagagagggaggggttggaccgatcgagccggaagcgctagcccgagctggtaaaagggagcaggtcagcacactagccccaatctgggcgctggtctcaccgcccccgccctgctatcgtccctacctccttccagccctgcggcgtgcgcgcaggccagcccaacggaccctctgatctacctgatcatctgcccactcccggcgcaaggcctgcgacaggaggccagctcacctggggtccaaggcactgctactctcccggccgcccgcaaacaactgaatctgccacgccgcgccctggccaaggacttttcaaatctcccgccccggccccattgggcaagctcgtcgcccatgcctagttcccattggctcgatgtcctgtgacgtaagtcatgggaacccaatggaagaggcggaatgagaagggctcacgcttggcttccagtttaggaaagtttccccaaattcccccagtgaattatcttgctttttcttttctttttttttttccttttttgagacaggtctctctctgtcgctcaggctggagtataatggtgctatctgggcttgctgcaacctctgcctcccgggttcaagcgattctcgtgcctcagccacccgagtagctgggattacaagcgcccgccaccacgcctggctaatttttgtatttttattagagacgggttttcgctgtgttggccaatctggtctcgaactcctgtcctcaggtgatccacccgcctcggcttcccaaaatgctgggattacaggcgtgagccaccgtgcccggccttcttctttttataaaaaaaattaaatctttaatgtaactggagtttatccttatgcatgtatgagctggggtctaacttctctgcccgatggagcgccagttatgtcaacaccatttgttaaacaaactgccccaacagaatttaaatgctgcccttgatatataatgttagcatatttacttgtgtctatttctagactttgtattccgttgtttgctcatttgcctgtgtgtttattcttgtgtcattactatgtcgttcttaaaagttctgacattcctgggaggagtttttccaccaatagacctttcgttgcaagatctctgttagctgccgtgttgtttgggcccactttcatttttcctccttcctgccacacttccttcttttctgctcttcctaaccctcagatttcattactgggttaaataaatacatttttgggccttctatgaaataaccagtggatatttattaagtatgtactgtccagcactcttctcctttcttctaacactctatttttcctttaggggaccacctgtctctccagtctatgcagtcggtttctgtagtagtttctgttgctgacaaccccaaatccctaggttgatgaagacctatttaaatctcacttttttttttttttttgagatgaagattcgctgtgttgcccaggctggagtgcaatggcacaatctcagctcaccacaacctcctcctccagggtgcaactgattctcctgtctcagcctcccgagtacctaggattataggtgcatgtgaccacgcccggctaatttttgtatttttagtagagacggggtttcatcacattgctcaggctggcctcaggtgatccgcccgccttggtctcccaaagtgcttggattacaggcgtgagccactgcgcccagctttattcccacttctgaaagcacttagagttttgaggatttgagaaggaaactgacttcattgcaggtccagaaatgagccccaattaacttatactaatcaataccttttattccagattatggttattggatcaggcataagcctgtgatttaagtgggccagctagtgggaatcagtttcttgctcagaatgctgggcagctcaaggaaacacttaacgtttactggtttatcataaagtgtattacaaatgatatagatgaaaagatgtatagggcaaggtatggaggaagagatttctggaagtgagcagggaagcatgcagccctcattgctgcttctagtgctactgaaggaagcagcttgacattgaagcctaacattgcagaaggcagaagagaggcctggaaagaacttcaggacttgatgacattgttgagcctctacatgcctacgttagcacttttcttacatgaacaatagagaagattattattcagctaatatcctttctgaatgcattctaaatgctatttgctgtttaagcatattgtgtagaaaaaacaaaccatggctaggcttggcggctcacgcctgtaatcccagc

SEQ ID NO: 1243706 - DNA, 4001 bp, Homo sapiens
ggatcaccagccgtctcacgccactactgcctgtgccaagaatcccaaactctactgatttcaagcctgtcttttttccaaagaaaaaagtcttatctaaccaataaacaagctgctttccctagcacggaaaagatcaaactaagaagggtaggggctgaacggggtgcaaccccgggcgagaagccagggaccccggatctgggatgggtgcacgctgaacccgaccagagcctcgagccgcggggctgggcggcgcggcccacggagaagtggggctgccgttggcaccgcgctacccgggcggtgggaggtggagcggccccgttacctggaagacgaaggccgccgaagccaggctctcatgtcctccgagcccctccggcccggtcccccggcccaaatgcaactgaacgcctccagagccctggcgggcacacctcgaggccggaaccccgggacacgccagcagcgccccgagcccgggcggggggtcggtccccggcgccgccgtttgcagaggcgcccgcagaaaaagcacagaaagcagcagcctagtccagaaatggcgacgcgcggagtctctgcctctccgcaaaaggggccggggcggccacgggcgaggggcccgggccgggaggagggacgcgagggacacgggcgccccggacttgggccggtcctgcgcgcagactgagcctccgccagcgctgtgggccccttagcgcggacccgcggcagggaggggaaaaggggagggggaagagaagtaggaggagaggatggggcggaggagaggcggggggcgggggagggcaagcggggggcgccgctaccctttcatcccacctcccaaaggcactcccgcgcgcactcacacgccgactcacatccataaccgcgacagcgacgcgacccccggggggtatctgccccctctccgcccccgccactgccgccactcggataagtctcctctctgggccccccgccaacccggtcaccgcgctggggagggggctccggcgcagggcgcgcaaggctgcccggccaagccccccggaacgctgggcgccgggtccgccgctcccctccgcgccggcccctagcgcgccccgaaatagccggcctgccaacttcaaagggccgccccgcacatcaaagcgcgcggtccgcccggccgcctcggcctcggcactcaccattgatccccgcgcgcgctcggcggcgagacctcgcaggcgcccctggcaggggcccggccccggcccccggctcggctcgcggcggcagccccgggcccccccgggccggccgcggcgtcggggaacatggggagtcgtgcggcgggggagggggtgcgggaaacaacaatcccgggttcagagcgaaagccaccggccggggagggggaacggcgcgccccgccgccccttttatgcaaaagatccgagcgggcctccgcccccgcccggcccggctttcaacgcaggtcctgtttccagcagtcactcggcgcaccaaatgtcctccgggcgcttccaacaaaaactgcgctgtggatttaactgtgcacttcaaaggcgcgagccgagcgcacggtcctgaaagggaggtacgcgccggccgcgccccgggccgccccccgcagccccgccaccgctccgcagggccgccccgcccgcgcccccctccaggcccggcctccgcctggccgggccccctcccgccccccgcgcccacgccgcggctcggcgcgacctcgccccctgtaagaggggggctttctttgaagcggctccgctggggccgagcttccacccccaccttttacagcagggccttcggcgggcgcctcggccgccgggcggccccgaaatccatcgctctgaggggttatttttatttcccggctctcgggctgttactgagttgccaggaccttatcaaagcgcagccggctccagccgactcccccgggccaggctcgcggagccagtgatcccgccgcgccaatcacagccgcgctcggccggcccgcgccgcccgccttaaagggacagcgccccgcgcccgccccgccccgccccggcccgcccccgccgcacgctccgctcccgcgttaacccttccccggcctctcctccgccccctgccagccccccgcggccccgagggcattctcagcccgagttctgatttcttcttttaagttctccggcctctttgctcccgcctcctccccctgcctgccctcgctctccccggctctggaatgcaacagtttctggtagcattatggccatcgcaagaactgcaagcaagcagatttttttttttctatcatcaaacgcttttctacctctattcaagtttccctgggaatttgggcttggaggactttataaagggagttccggccctggggttggctggcccgctgtcatagggcggactcgggcccagccgctggaggcgtgtgcatgcctgtgcgcgcttgtgcacgtgcatctgagttcgggtaaatataggactgcagttggtggatgaattgcgtttgtgcatgtgtgaaagtggggtgtgaatccgccagtataggcctgagtgctaacaccagttaggaggcatacctcagtgccctgaagacctaggtccagcttcctaacctgctggccataagaccctcgtagcggcacacattggccatctctcccaaacaactgcatacccgttactcttccaaagtcccctcttctgccatatgttacatattaaaccgataggaatatcttttttcccactccaaacgacaaggcatgcatgccgttttaatgtatcgaaaactcctcaccccattgtcacctttgaatttctcccacatttgcccaaaaacgtttataaggcacacacaaccttctcttctccgttaaaatgagaaaatatgtcacaaacccagagcattgtgtatttattctgctgctgctatagaatgattccttatgttatgagcgaataattaacttttcttccttttaaaaaacaaagggccggggacggtggctcatgcctgtaatcccagcattttgggaggcccatgctggaggatcatctgaggtcaggagttcgagaccagcctgcctaatatggcgaaaccccgtctctactaaaaatacaaaaatcagccgggtgtggtggcacgtgcctgtagtcccagctactcgggaggctgaggcaggagaatcgcttgaacctaggagacgggggtgggggggttgcagtgagccaagatggcaccactgcacgccaggctgggtgacaaagcgagactccctcaaaaaaaaaaaaaaaaaacacacacacacacacacataaaggtgtgaaccaaagagatccaagaagtgaaaggcagagtcctggcctcagagctgtgcaaggctcttactctccaacttaatggatgacgagcccttttaaatgcgagatggcctgtcattaggccttcagaactttaaaacatgcaagaattgtggctctatctaggtatccatagaaaaagagaaggaagaggctgggtgtggtggctcacccgtgtaatcccagcacttcgggaggccaaggcaggcggatcacctgaggtcaggcattcgagaccagcctggccaacatagtgaaaccctgtccctactaaaactacaaatattagccaggcgtggtggggggcgcctgtagtcccagctactcgggaggctgaggcaggagaatcatttaaacacaggaggttaaggttgcagtgagcctgggcgacagagcaagactccatctcaaaaaaaaaaaagaaaagaaaaaaagaggaggaagatccaccacccatgatctgctggaaaggggcaggtggcaggactgtgcgccacctgccctcagcctaagggactgtgacaagggactagaaagctcttagactttctagtctaagactctggactctggctcgtgggtgccat

SEQ ID NO: 1243707 - DNA, 4001 bp, Homo sapiens
agcccaaaacaaaaatttataaagtgggatggagtaaaaccaggaaattcaatgccaacaaaacaactgattacaggagttaagtcttaatttcatacattataatattaagtgatacggagcgatacttaagagattagtctgtcctcacccttaatttatatccaaaaaagaaaagttgaaattgtgttgaaaacacaatttagtcaagttctttacaaatgaaacctcactctgtctcttcctggacttaggttaataagaataaaacgagttctggccgggcgcggtagctcacgcctgtaatcacagcagtttgggaggccgaggcgggcagatcatctgatgtcgggagttcaagaccagcctgaccaacatggagaaaccccgtccctactaaaaatacaaaattaccctggtgtggtggtgcatgcctgtaatcccagctactcgggaggctgaggcaggagaaacgcttgaacccgggaggcagaggttgcggtgagccgagctcgcgccattgtactccagcctgggcaacgagtgtgaaactccatttcaaaaaataaaaattaaaaaaaaaataaaacgagttccctaatttatttacaaatttaccttagtttggatttacttagaggaaaagaaggaaataatttttctcaagatctacaaaatataatgtttctatcaaagatagaccttgattcacctgttaccaattttagtaagactggaataaaaaagaaaaaaggctggaaaaaaaacaaacaaaaaaacaaaaaacagaaaacatgctgagcctttgggcgactgctaatcctacatccctgtggttgttccctgcatcggcctattggctgggtctgaaccctgagggcctttgctccagcctctgccggagcacggggaaggtgttcggggcttaagggcaggtttttagggcacgtgtttggggtaagtgtgctgggcacacaggcaggtgtgtgggcacggaggaggtgtgcaggtaggtgtgtgggatgcgcaggcaggtgtgcacggcaggtgcacgggcaggtatggggcacgggcatgtatgcaggacgcagagcaggtgtgtgaagcaggtgtgcaggcacaagacgtgtgtgtggggcatgggcaagtgtgccgggaatgtgtgacggcagacgtgtggggtgcgaggttgtgtgggggcacacggacaggtgtgcaggcaggtgtggggcacggggaggtgtgcagaccaggtgtgtggggtgcgggagcgaggcaggtgcgcgcggcaggtgcgcgggggcgagtcaggagcgcggggcacgtgtgtggggtgtggggcaggtgtgcgggggcggggcaggtgtgcagggcaggcgtgcaggggcaaggcaggtgcgtaagagcgaggcagatgcgcaggtgcgcggaccaggtgtgtgaggtgcgggggcaggtgcgcgggggcggggcaggtgcgcaggagcgaggcgggagcgaggcaggtgtgcgggcgcggggaaggagcgcggggcaggcgggcggggatgaggcaggtgcgccgttcctccaccccacgaccaggtgagggcgaacggggaactgcctgagctccgagcccggaagcttcaaaatcagaacgaggaaggtcggtgaggaggccacgctcgcgggacgggggcaggaagcgcagccggagctgcagatctcggccgcgccccgcgggctccaatcccgagcgtcccccgcacgcgcagccgcgctcgcccgcggggcctaagggctgctcagggcggagaccccgtaggtgagcccgagaggcggtgcggggctgcgaaccccggagcgagagaggactggagggcggggtgaggggacgcgaggacccagcctgcacggcggggcaccctccccgctggcacctaccacgtgggcctgcatggcctggctctcctcggacgccccgcccacgccggctccgctcatcccgccgcttcggcctacggcgcctgcgcgggcggcaccaggaggcgggtctgaggccaggcaatctccgattggtgcagagcggcgtccataggggtgggcctcccggaggggcgtggaaggggcggggctgctcggcgcggggcggggccgggaggtcgccgcctcagtcttccgccctgggccacgccccggtcccgggtcacctctcggagccgcctccttggcccgtggaagcctcctgctctcccctagggcgcgcgtcacaatctctggtcccccgtagacgccgccgcggggaaggcggggctgtgcgagggcgccgcgctgcaaacccaagccaggcggcctggagttgctgtaaagcctcaagcaaggctgatatgtaaaaggtcgttgcatttcacccgggctgtgggctgtgctacttgaccggggaggacgaggggactgcagggcgtcctttcagacagacgcggtagggagagcagggcgtgcaggacacttgacggccccaggagaggggtgaggccctgaccccaccggggtgtcatccaggaggaagggtgcccggggcgaggtcccccaggagaagtgcccaggcctgaggccttgaccccactgagatgtccccccaggaggaggggtgcccggggttagctcccctaggaggaggggtacccgggagtgaggccctgaccccaccgcgaggtcccccaggaggaggggtgcccaggagtgaggccctgaccccaccaggaggtcctccaggaggaggggtgcccaggagtgaggccctcaccccaccgtgaggtcccccagaaggaggggtgcccaggagtgagaccctgaccccaccaggaggtcccccaggaggaggggtgcccgggagtgaggccctgaccccaccgcgaggtcccccaggaggaggggtgcccaggagtgaggccctgaccccaccaggaggtcccccaggaggaggggtgcccgggagtgaggccctgaccccaccgcgaggtcccccaggaggaggggtgcccaggagtgagaccctgaccccaccaggaggtcccccaggaggaggggtgcccgggagtgaggccctgaccccaccgcgaggtcccccaggaggaggggtgcccgggagtgaggccctgaccccaccgtgaggtcctccaggaggaggggtgcccgggagtgaggccctgaccccaccgtgaggtcccccaggagaaggggtgcctggggaaagacatgacctcagtagctccgggtaccctccacctttgccctcatttccgcctccgcatgcagccttgggaactgcagggctgggaacccggagaaggcggccgggctctgggggagctcagaggtggccttccctgccaggaacacaggccaggccccatccctatctaaccttatacttgaggagcacagagcggatatctccagatttgagtcctgaacgcgcggccgggaaccccagcagttctgaacttgtcaagggagcagcctgccatgaggggtctcccaggcggctgtgaggcctctggaaactccctgcttggaggaggttgactggggacagggccgtgggggtcaataaaaaggactgctgccattagccctgggctgcctgcacacagagattaagcccgcttgggatttgttccagctgatctgaagtaatgagtaattcacaattaatgagcatggctgtaagcagcccttcctggacaaatccttggctgtccaaaactaagattaaatgcaaatcattctgtcaattaaccgttacaacaaagccaaacttctgttaagcatcacttcatagatggttttttttcccttaaattgcctccttgtttgcaaagcctgttttacaagtggactgcttaagtcacatgagtgaaaatgcagccttatttaccgttcagcaaaagctatctgagaatttgcttccagggacttcatgttctccagaggttggggtactaggaatcatttca

SEQ ID NO: 1243708 - DNA, 4001 bp, Homo sapiens
aaaatacaaaagaaattagcagggcgtggtggcgtgcgcctgtaatttcggctactctggaggctgaggcaggggaattgcttgaaccatggaggtggaggttgcagtgagccgagattgcgccactgcactccagcctgggccacagagctagactctgtctaaaaaaaataaaataaaataacaaaaattagttgggcatggtggcgcgcgtgcgcacgcctgtaatcccagctattcgggaggctgaggtggaagaatcacttgagctcgggagggaaagattgcagtgagccgagatcgcatcactgcactccagcctgggtgatggagcaagactgcatctcaaaataatgataataatatagtttcaaatagctaggaggaagatattgaatgtttgctcccaacacaaagaaatgataaacgtttgagaagacgtatatgctaattatcctgatcttatcactatggtatgtgtttatcactacatgtatcaaaatatcactatgtacctcatgaatatgtacgattattatttgtcaattaaaaagaaactgcagaccttttatgcatgattccacaggtggaggaaaagtcaaatttgccgaggatttgccagctttaaatttatccgcatcagtatcaggcctcccagcttcctccttttcagtcacccatgaaggattgtggagtgggggaagttggggaaggggaacgctggaatgaaagccttagccaaggacgtggatggatgcaaagccgccttcctttcccccattccgccaatcctctattcaacgtgtgttgctgctttttgtttgtttgtttgtttgttttgtttgtttgtttgtttttgagacagagtctccctctgtcgcccaggctggagtgcaatggagcaatctcggctcactgcaacctctgcttccaggttcaagtcattctcctgcttcggcctcccaagtagctgggattacaggcacttgccaccacacccggctaatttttgtatttttagtagagacggggtttcaccatgttggccaggctggtcttgaactcctgacctcaagtgatccgcccacctcggcctcccaaagtgctgggattacagatgagagccactgcgcccggccaaacgtgttctttttcatgcttacaagatgtcatgtcacaaacatgttattgcatttttgtgagatgacttctttgtcaatgtttagcgattgttttagagttttggaaaatacaaacaaaataaactttgcggataaaagaataccaaatgtatgtctgatccttcttcgtagcttataaaaattaatttagactttcaaatgtactttaccccgttaattattatatcactccgtagaggctctttagcacgcggggccacacaaccgcagctcactctgccctgcggtgggcgcctggatttgaaaaccgacttttccctgactccgcgcggactgtggaggagaccaagccgccgggctccccgactgtccacagcccgcagtccccgcgcccgggcactcacatacccctgacggcggctcctcccgtgggcagcaaacgggccccaggctgggtcagcgcctctgagttccaagcagagagccccgaagcccgcactcccgagccgattcccacactcgggcgtccccgagacacattcccggccgcgagaggccacttccacgtggaattttcccacggaaaagccagcgctccccattcctgggggtgcagagttcgttccgcacgcgccgtcacctcgcctctgcagccacctatgcggggaaccggttggacttaagactccaaccgcccgctccctggctccggcgtctgcgtccccagcacctgcccgctctgcagacgccagaaaggacccgcggcgctccctgctcccgaagtttcacctctcgctctgctctgccccggggacactcacccgcccgaagtcatcccgaatcccgccgccctcagactgccggatgtcacggagcctagcagccaggccgccgactgccccgccctggcaccgacccgggcaaattctcggcgagtagggcaggtgcaggacgcttgggacggcccccgcccttctctcctgaccgcccccacaccagcgcccccatctctaccctggacttttctcctccgctgccggtgatcgggcttctctctcccgcttaaagaaaaacacaatccccgcgtccacccctagtctatcaccacggtccctaccgttccttcctcgctatgctgtgtccccgtgccctccaacctcgcggccttgacccacccgcagctcatgctgggggtccctaaattcggccttggtcccacctccaccctccacttcaccacgcactccacacctactgtcctggcaaaagaccccaggaactggaaagctggggtgtggctgaatccttctaacgggcagggacccgtgcggccacataacgcctgtgtgcctggaagaaagagtctgttgaacttcagatgaaattagatttgcaggacctttttcataagccaggctcagtgtttcccatggctcctctcacgcatgattatattgtattctaatgacccagctgccacaaatacaagaatttattttttgaaactgtcacccagcctggagtgcaatagtgtaatcatagctcatagcctcgacctccagcgctcaaatgattctcccacctcagccatccgagtagctaggactacaggcacccacgaccgcacctggctaattaaaaaataataataataatttgtagagaggaggtctcactctgttgcccaggctggccttgaactcctaagctcaagcaatcgtcctgtctcggcctcccaaagtgctaggattacgggtgtgagccaccacgaccggcaagaatctttaaatatggcgtgcaaaatgcatgcaaaatggggccgggtgcggtgtctcatgtgtgtaatcccagcactttgggaaactgaggcaagtggatcacttgaggccaggagtttgagaccagcctgggcaacatagtgaaaccccatctctactaaaaatacaaaaattagcccggggtgattgcacacacctgtaatcccagctacttgggaggctaaggcacgagaacacgagaatctcttgaacccaggtggcagaggttgcagtgagccgggatcatggcactgcactccagtctaggtgacagagagtgactccatctcaaaaaaagggaaaaaaagaaaaatggccagtgctttttttttttttttttttttttttcggagtctgggaaagtgagtcttggaaaagagtagaaggaaatgccagcgtgatctacaactttgatgcaggtgagtcccaagttcaggtctgagctccttggcagccagcagagaaagggagtctctcagaagggagttttaatgtaacaaatgtagataactattttctagctccagactggaaaagagatcctctttgacaagaccaatcagaaaagtgttgtaccgactacgtgcatgtaggggggtaaaaaaagacatttgtataacacctccttgcttacaaagagcttccatattcattcccgtccttcattcagctcttgtaataacactgtcaggcacttctcagatgtgaagactgagcctatgagatctttcatgactcattcaagcttatgtggccagtaatggggctaggattttcacctaggagttgtgtctctaaagccagtgctggctccctcaaaccccctgtatcaccagctgttctgtgaaagggttgtatacacaaagagacccccaaatgctgaagaagatgagaaaccaaaggaggaggtagacaaatccagtttgttggtattgggtgatttattaagggaacttagaagtgtggtcctggacaccacaaggcaggtagatctctatactacaacccctcaacccagagcatatatcttgggcaaaaagca

SEQ ID NO: 1243709 - DNA, 4001 bp, Homo sapiens
tgcactccagcctgggtgatggagcaagactgcatctcaaaataatgataataatatagtttcaaatagctaggaggaagatattgaatgtttgctcccaacacaaagaaatgataaacgtttgagaagacgtatatgctaattatcctgatcttatcactatggtatgtgtttatcactacatgtatcaaaatatcactatgtacctcatgaatatgtacgattattatttgtcaattaaaaagaaactgcagaccttttatgcatgattccacaggtggaggaaaagtcaaatttgccgaggatttgccagctttaaatttatccgcatcagtatcaggcctcccagcttcctccttttcagtcacccatgaaggattgtggagtgggggaagttggggaaggggaacgctggaatgaaagccttagccaaggacgtggatggatgcaaagccgccttcctttcccccattccgccaatcctctattcaacgtgtgttgctgctttttgtttgtttgtttgtttgttttgtttgtttgtttgtttttgagacagagtctccctctgtcgcccaggctggagtgcaatggagcaatctcggctcactgcaacctctgcttccaggttcaagtcattctcctgcttcggcctcccaagtagctgggattacaggcacttgccaccacacccggctaatttttgtatttttagtagagacggggtttcaccatgttggccaggctggtcttgaactcctgacctcaagtgatccgcccacctcggcctcccaaagtgctgggattacagatgagagccactgcgcccggccaaacgtgttctttttcatgcttacaagatgtcatgtcacaaacatgttattgcatttttgtgagatgacttctttgtcaatgtttagcgattgttttagagttttggaaaatacaaacaaaataaactttgcggataaaagaataccaaatgtatgtctgatccttcttcgtagcttataaaaattaatttagactttcaaatgtactttaccccgttaattattatatcactccgtagaggctctttagcacgcggggccacacaaccgcagctcactctgccctgcggtgggcgcctggatttgaaaaccgacttttccctgactccgcgcggactgtggaggagaccaagccgccgggctccccgactgtccacagcccgcagtccccgcgcccgggcactcacatacccctgacggcggctcctcccgtgggcagcaaacgggccccaggctgggtcagcgcctctgagttccaagcagagagccccgaagcccgcactcccgagccgattcccacactcgggcgtccccgagacacattcccggccgcgagaggccacttccacgtggaattttcccacggaaaagccagcgctccccattcctgggggtgcagagttcgttccgcacgcgccgtcacctcgcctctgcagccacctatgcggggaaccggttggacttaagactccaaccgcccgctccctggctccggcgtctgcgtccccagcacctgcccgctctgcagacgccagaaaggacccgcggcgctccctgctcccgaagtttcacctctcgctctgctctgccccggggacactcacccgcccgaagtcatcccgaatcccgccgccctcagactgccggatgtcacggagcctagcagccaggccgccgactgccccgccctggcaccgacccgggcaaattctcggcgagtagggcaggtgcaggacgcttgggacggcccccgcccttctctcctgaccgcccccacaccagcgcccccatctctaccctggacttttctcctccgctgccggtgatcgggcttctctctcccgcttaaagaaaaacacaatccccgcgtccacccctagtctatcaccacggtccctaccgttccttcctcgctatgctgtgtccccgtgccctccaacctcgcggccttgacccacccgcagctcatgctgggggtccctaaattcggccttggtcccacctccaccctccacttcaccacgcactccacacctactgtcctggcaaaagaccccaggaactggaaagctggggtgtggctgaatccttctaacgggcagggacccgtgcggccacataacgcctgtgtgcctggaagaaagagtctgttgaacttcagatgaaattagatttgcaggacctttttcataagccaggctcagtgtttcccatggctcctctcacgcatgattatattgtattctaatgacccagctgccacaaatacaagaatttattttttgaaactgtcacccagcctggagtgcaatagtgtaatcatagctcatagcctcgacctccagcgctcaaatgattctcccacctcagccatccgagtagctaggactacaggcacccacgaccgcacctggctaattaaaaaataataataataatttgtagagaggaggtctcactctgttgcccaggctggccttgaactcctaagctcaagcaatcgtcctgtctcggcctcccaaagtgctaggattacgggtgtgagccaccacgaccggcaagaatctttaaatatggcgtgcaaaatgcatgcaaaatggggccgggtgcggtgtctcatgtgtgtaatcccagcactttgggaaactgaggcaagtggatcacttgaggccaggagtttgagaccagcctgggcaacatagtgaaaccccatctctactaaaaatacaaaaattagcccggggtgattgcacacacctgtaatcccagctacttgggaggctaaggcacgagaacacgagaatctcttgaacccaggtggcagaggttgcagtgagccgggatcatggcactgcactccagtctaggtgacagagagtgactccatctcaaaaaaagggaaaaaaagaaaaatggccagtgctttttttttttttttttttttttttcggagtctgggaaagtgagtcttggaaaagagtagaaggaaatgccagcgtgatctacaactttgatgcaggtgagtcccaagttcaggtctgagctccttggcagccagcagagaaagggagtctctcagaagggagttttaatgtaacaaatgtagataactattttctagctccagactggaaaagagatcctctttgacaagaccaatcagaaaagtgttgtaccgactacgtgcatgtaggggggtaaaaaaagacatttgtataacacctccttgcttacaaagagcttccatattcattcccgtccttcattcagctcttgtaataacactgtcaggcacttctcagatgtgaagactgagcctatgagatctttcatgactcattcaagcttatgtggccagtaatggggctaggattttcacctaggagttgtgtctctaaagccagtgctggctccctcaaaccccctgtatcaccagctgttctgtgaaagggttgtatacacaaagagacccccaaatgctgaagaagatgagaaaccaaaggaggaggtagacaaatccagtttgttggtattgggtgatttattaagggaacttagaagtgtggtcctggacaccacaaggcaggtagatctctatactacaacccctcaacccagagcatatatcttgggcaaaaagcatatgtaccctagaaggaatacataggggctacaggcagaaactatggtttctgcaacaataagaagaaaacttacaatgaataagtgttcatacataaagagtaatacacaactagacatttttttctttgaagatggagtctcactctattgcccaagctggagtgcagtggtgtgatcttggctcactgcaacctctgcctcccgggttcaagcaattctcctgcccctgcctcctaagtagctgggattataggcatgcaccaccacacctggctaattttgtatttttagtagagacgagggttt

SEQ ID NO: 1243710 - DNA, 4001 bp, Homo sapiens
cagctagatagcagaaatgcctttcagtgttttgtaacattgtaggatgaacatagttacaataatatatagtatcaggctgggcactgtggctcatgtctgtactcccagcactttgggaggctgaggcgggtggatcatttgaggtcaggagttcgggactagcttggccaacatgatgagaccctgtctctactaaaaatacaaaagaaattagcagggcgtggtggcgtgcgcctgtaatttcggctactctggaggctgaggcaggggaattgcttgaaccatggaggtggaggttgcagtgagccgagattgcgccactgcactccagcctgggccacagagctagactctgtctaaaaaaaataaaataaaataacaaaaattagttgggcatggtggcgcgcgtgcgcacgcctgtaatcccagctattcgggaggctgaggtggaagaatcacttgagctcgggagggaaagattgcagtgagccgagatcgcatcactgcactccagcctgggtgatggagcaagactgcatctcaaaataatgataataatatagtttcaaatagctaggaggaagatattgaatgtttgctcccaacacaaagaaatgataaacgtttgagaagacgtatatgctaattatcctgatcttatcactatggtatgtgtttatcactacatgtatcaaaatatcactatgtacctcatgaatatgtacgattattatttgtcaattaaaaagaaactgcagaccttttatgcatgattccacaggtggaggaaaagtcaaatttgccgaggatttgccagctttaaatttatccgcatcagtatcaggcctcccagcttcctccttttcagtcacccatgaaggattgtggagtgggggaagttggggaaggggaacgctggaatgaaagccttagccaaggacgtggatggatgcaaagccgccttcctttcccccattccgccaatcctctattcaacgtgtgttgctgctttttgtttgtttgtttgtttgttttgtttgtttgtttgtttttgagacagagtctccctctgtcgcccaggctggagtgcaatggagcaatctcggctcactgcaacctctgcttccaggttcaagtcattctcctgcttcggcctcccaagtagctgggattacaggcacttgccaccacacccggctaatttttgtatttttagtagagacggggtttcaccatgttggccaggctggtcttgaactcctgacctcaagtgatccgcccacctcggcctcccaaagtgctgggattacagatgagagccactgcgcccggccaaacgtgttctttttcatgcttacaagatgtcatgtcacaaacatgttattgcatttttgtgagatgacttctttgtcaatgtttagcgattgttttagagttttggaaaatacaaacaaaataaactttgcggataaaagaataccaaatgtatgtctgatccttcttcgtagcttataaaaattaatttagactttcaaatgtactttaccccgttaattattatatcactccgtagaggctctttagcacgcggggccacacaaccgcagctcactctgccctgcggtgggcgcctggatttgaaaaccgacttttccctgactccgcgcggactgtggaggagaccaagccgccgggctccccgactgtccacagcccgcagtccccgcgcccgggcactcacatacccctgacggcggctcctcccgtgggcagcaaacgggccccaggctgggtcagcgcctctgagttccaagcagagagccccgaagcccgcactcccgagccgattcccacactcgggcgtccccgagacacattcccggccgcgagaggccacttccacgtggaattttcccacggaaaagccagcgctccccattcctgggggtgcagagttcgttccgcacgcgccgtcacctcgcctctgcagccacctatgcggggaaccggttggacttaagactccaaccgcccgctccctggctccggcgtctgcgtccccagcacctgcccgctctgcagacgccagaaaggacccgcggcgctccctgctcccgaagtttcacctctcgctctgctctgccccggggacactcacccgcccgaagtcatcccgaatcccgccgccctcagactgccggatgtcacggagcctagcagccaggccgccgactgccccgccctggcaccgacccgggcaaattctcggcgagtagggcaggtgcaggacgcttgggacggcccccgcccttctctcctgaccgcccccacaccagcgcccccatctctaccctggacttttctcctccgctgccggtgatcgggcttctctctcccgcttaaagaaaaacacaatccccgcgtccacccctagtctatcaccacggtccctaccgttccttcctcgctatgctgtgtccccgtgccctccaacctcgcggccttgacccacccgcagctcatgctgggggtccctaaattcggccttggtcccacctccaccctccacttcaccacgcactccacacctactgtcctggcaaaagaccccaggaactggaaagctggggtgtggctgaatccttctaacgggcagggacccgtgcggccacataacgcctgtgtgcctggaagaaagagtctgttgaacttcagatgaaattagatttgcaggacctttttcataagccaggctcagtgtttcccatggctcctctcacgcatgattatattgtattctaatgacccagctgccacaaatacaagaatttattttttgaaactgtcacccagcctggagtgcaatagtgtaatcatagctcatagcctcgacctccagcgctcaaatgattctcccacctcagccatccgagtagctaggactacaggcacccacgaccgcacctggctaattaaaaaataataataataatttgtagagaggaggtctcactctgttgcccaggctggccttgaactcctaagctcaagcaatcgtcctgtctcggcctcccaaagtgctaggattacgggtgtgagccaccacgaccggcaagaatctttaaatatggcgtgcaaaatgcatgcaaaatggggccgggtgcggtgtctcatgtgtgtaatcccagcactttgggaaactgaggcaagtggatcacttgaggccaggagtttgagaccagcctgggcaacatagtgaaaccccatctctactaaaaatacaaaaattagcccggggtgattgcacacacctgtaatcccagctacttgggaggctaaggcacgagaacacgagaatctcttgaacccaggtggcagaggttgcagtgagccgggatcatggcactgcactccagtctaggtgacagagagtgactccatctcaaaaaaagggaaaaaaagaaaaatggccagtgctttttttttttttttttttttttttcggagtctgggaaagtgagtcttggaaaagagtagaaggaaatgccagcgtgatctacaactttgatgcaggtgagtcccaagttcaggtctgagctccttggcagccagcagagaaagggagtctctcagaagggagttttaatgtaacaaatgtagataactattttctagctccagactggaaaagagatcctctttgacaagaccaatcagaaaagtgttgtaccgactacgtgcatgtaggggggtaaaaaaagacatttgtataacacctccttgcttacaaagagcttccatattcattcccgtccttcattcagctcttgtaataacactgtcaggcacttctcagatgtgaagactgagcctatgagatctttcatgactcattcaagcttatgtggccagtaatggggctaggattttcacctaggagttgtgtctctaaagccagtgctggctccctcaaaccccctgtatcaccagctgttctg

SEQ ID NO: 1243711 - DNA, 4001 bp, Homo sapiens
gtgcttccctccataaaagcaatgattgcctgtgtctaagtctgtcagttcctctagaccatgagtagagaagagatttaatgcctttctgtgtccccactgcctggcacagggctgggcacagataaggtctaaggcaggggtcctcaaccagtccgtggcctgttaggaacgggtccacacagcaagaggtgaggagcaggcgagcaagcaaagcttcaactgtatttacagctgctccccattgctcgcatgaccacgggagctccacctccttgtcagatcagtggcggcattagattctcataggagcacgaaccctactgtgaactgcacatgtgggggatctaggttgcatgttccttatgagaatctaacgcatgatgatctgtcactgtctcccatcacacccagatgggaccatctagttgcaggaaagcaaactcagggctcccactgattctacattatggtgagttgtataattatttcattattatttacaaggtaataatagaaataaagtgcacaataaatgtaatgtccccaaatcatcccaaaaccatccctcgccacctggttttccacaaaaccagtccctggtgccaaaaaggttgaggaccactggtgtaagggaatggtgctgaagtgaaaggtctgagaacccaggaagccatcatatgcaaggctggagctgaggccctgaaaagagggaggtgctgagagcagagcagggaggaacagtgtgactgtcagtgtgtgtgtggcgggggggtcgctgatgctgagagcacagacacatgtgactcagcccagccgagagcccctaataggaaaggacaggagagtggggaaagacggtcttaggcactaggctaaggcagaggcggacagggtgggagcatggagtagtatccctgatgaaataggaaggcaggagacacctacaaagcatcaggccctgtcagagccttacccaaaccgtctcagtcaatcctcacaataatattataaaataataataaacaccacctccaacagcctggaaggacagtgtagtgaagctttgaggtcagataggcgtgggttcaattcccagacaggccagttcctttggtatatttccccagctgtaaaatgggggtgttagtagtgcctatctggtaaggctgtaagggtggaccagtgcggagcaccgactttgggacatattgaggacttggtgagcgttggtttatatttacaataaatgattcctctaaagtgtagggggatggggaatagcgtccctcgggcctagcaggcacaccttccttgggtcaattccaggccaccaccattgttggatggttggattcgaacccgagttcaaggatctggggattcagaacgcgggacagtaactccacacgggacacagcgcaaatgctggaaactcggccaagcctcggctcctcgcgttaaccccaggaggctcctgccagtgatccaagcaagtgggcatgacccgtgcgagggcccacaggcttgcccgagtgtgacctcggtactagctcaacatctcgaggtctgcttctattcctgcacatcgggactcaggatccgggcaacctcgcgccaagctctccaatgctggctcccctcccccgcctaaccgagaggctcagaggaatgacgtggctctccgggggccacagggcagcccggggggttgcgggaagggccccgggggacgctggggggcgggccccggcggggtccacggccgctcacctgggcgctctccacctgcccgttgaccatgagtagaaagacgctaggactcgcggtcgccatggcaggtctgggggtgccggggggacccacctaggccgcgcgcggttgctaagagacgccggcgttgccctagaaacagacggcgtagcgcgcaggacacgtttcttggcagcgacaccttcgcgaaggccacgcgagtgcgcgtgtggcatgcgcaggcgcagtgaacgggcgccgttataagggggcggggcacaaggggcggggatccacgccgaggctccacccctccttagggcaggtatgaccgagagctggggcgggagcgttgacctgtcgggtaaagccagccctaccgctcgactcagttgcacgcgcagggagtgtgtgttcactctgactcggcccggctccccgtccccgccgaagcgcagaggcgaatgagagctgagtcctggggagcagcgctccgactcacgccctcagcaagccgagtgtttaaaatacattcagccactagatgtcgctgtggccccaccgcgaggacgcggagggaggcgctgcagagcacgggcgacgtgaccacagctgtcggggctaactctggaatgccgggtgctcggaggagcctccccagctggggccaagcagcgtccaagcaggtgaaaaggatgcgcccctgtggcttggagacgcttgccctcgaaaaagtttattaaacaaacttgggagggacctcaagaatccttacatccaagccatcgctctttagttcgaagctggggaaactgaggcccgcagcgggcggcgcctggcaccccaatcagccagcgctcaggggagttgctagccaaaatccacgaatctgtcaagatacagtcttgtatcttagtggcctgtcacagagtaagcacttggtaactactaacttgttgataaatgaataattgaagacatctccattttacagaggaggaaacagattcagatggcaaaggcaggtaagtagctaagtcaggattcaaacccaggactccagaggctaacaaccctcactgcctctgtcttgtcctgggccagccccaacagcatctgttggcagaggtgtcaaaggagacgttggagacattatcttggatccaggaaatgaagggattcacaggtgtgtagactcccgggaggccaggctccgagcagggaccccaggtcatcacattctgcagcttctagcttgggagcagactaggggagtcccatcaaccatctgcacgagggagggaaggagcagtctcagcccagcctgcacccactgaaccaccccctgcctagtgagcaaagatatttgatcaggggagggaggcagcgggtaaccagttcacacatctgacaagagcagctgggggaggggatgggtgggctggtggcccaagtgctgcacccagagcccaagacagggcccatttcccctcctggagagggggtcatactcccttcttcccccgctctgtccatctctttccagttaaagtgctttctcccacacattctatcagtctcacccaattatttcctccctttggcctttgaggctcggtgttgcacacaagttagttttcagcaaaatgcttgtagttatcgaataactgggggctcccagtagtttaagacctggctataccaaaggtggccccacattcaaataggacataatgggggagtctccccaaggggtgggaagttctagggtggccttcaggggtacaaataagcccgacccctgggtgttggggaatggaagactccaggataggatgggagggtgaccaggcctaactttaacaagtctagtggcattagaagcgactttaggagaggggtctcaggggcttgcataggggcttgcatagggcctgctggaatccttaccaccagttcaagggcccagtggagagcctggtgtactagaagtccttgggcaggctgtccttcaggtcaggacagtcaggttggaggagaaggtagtttctgcagatgctgacacacagcgatctcagcaggacactctgcagctcttggggtgggatgtagggatctgcaatggggtggggcagaccctcagcccagctgacatccagccgatctgcaccagtccagccatgctggttgttaacatatattgctgagcttccctgcctgtgcctgtgccaagtctctccacccccaga

SEQ ID NO: 1243712 - DNA, 4001 bp, Homo sapiens
ttcagtggttgcaagggctctggtgaaagaggaatgaggagtgaccgttaatgggtataaaccaaaaataaaattagaaggccctttgcaaccatctgaatggactccctccttggccagcacaccctaaaatttaacctgaaagactggttcaggccacgatgggaggtgagagttggacatgccttattatacccctccaacattaacatcaacactgaccttaagtctgataagaaatatttgtctattctctctatagcctgctactgggaggcttcaactgcataataaaacctaggtctcctggccaggtgcagtggctcacgcctgtaatcccagcactttgggaggccgggagcaggggggcgtggatgacttgaggtcaggagttcgagaccagccaggccaacagggtgaaaccccatctctactaaaatacaaaaaaaaaaaaaaaaaaaaaaaaaaagccgggcttgatggctcatgcctgtgatcccagctattcgggaggctgaggcaggagaccaggagggggaggttgcagtgagccgagatcgcaccactgcactccagcctgggcaacagagtgagactcactcttcaaataaaataaaataaaataaaataaaataaaataaaataaaataaaataaacaaccaaaaaaccctaggtctccacaaccccttatcataacccagatattcctttctatagataataactcttgtaaccaactgccaatcaggatatgtttaaatctacctgtgacttggaagcccctcccctttgagttgtcccgcccttccagaatagacattgaacagacatttccccaaaggagacaaatggccaataagcacatcaaatcaatgtcaatcttgcatgtattgacttatgtattatgtcttcctgaaatgtataaaggctgactatgccccgaccatcttgggcacatgttgtaggacctcctgaggctgtcaccaccatgtccttaacattggcaaaataaactttctaaattgacttgagacttgtctcagatacttggttcacataggtttcttttaggggcgatgaaaatgttccataaaccactctacctaaaattaggtagtgatgatggctgctcaactgtgaatataccaaaaaacactgaattgtacactataaaaggatgagttttatggtatgttattaaaagttgtttaaaagtgagggacccctccagttattgatatggaatgatcttcaggaaaagagcataatatgctacatttttgtacaccaaaggggaggtaggtacgaatatgcatacatattgcttttttctagaagccgcctaggagtgaaaccaaaattcttcacttcttttcggccctacctcgagctccctttagaaaacctttccttccagctcacagtatccaccatgtccaccttcgcctcccggcactgagccttagaggggcggtgctccataaacatttgctacatgaatgaacgaataaactatcggattttggggtgggtcgggacagctcggttccagcgagggctccgcccacccgcgggctccgcagaggagcagaggttgggcggccgcctcggttaactccgctgcagcccaaagcacgggaatcgcgggacagacaaacgagcggagggaagatacctagaagccaggaaaccgcgagctgcagtccaacttggccggaagctgcggagaggctcagccaccggaagtcagtggagggttcggccggacgctctagaatcccggaggaccgggatctctgtggttggccgtgacgggcaccctctaccggggatgacacattcccagagctcctgggaccaagcaaatggcggacacaattccctgggcggaaggggacttcgggagccagtagccaaggtaacagtcccagacctgggcatctcaggccgggcagttccccgagctcacgggactagctgtgattggccggatgaggttgagagcttcatggggacgcgcgcgctacgtgcaggggcgttgccttccattcacttggcgcccgactgccagtgcgcatgcgtttgaaggcggtgcagggcggggagcacacccctgcgaagtgccgggcaccctttgggcggctcccgccggcgagctggacagcggcgcgcgccaggcgtggctttctcggccggtgggctaggattggacgcagtaggtagaaggggcaggaccctccgcagcagtagctcagcgattggccaggagctggagggagcgtggccttgggaggcggggcggagggggacggacagggcagctcaagacgctgaggtggtggctgcggcctttgaacaagtaagtgagccaccctcggagacccccgcgctggggacgggaggccggcgagcctcgggacctctgaaagccttgaggaggcgcgggggtgagtgcggccctgaggaaacccaggtgccccgcccctccctttcttcctggcccgcgcctcgcctacccctcccccgaccctggcgggcccccggctctgggcccggacccctggggtagctagtctgccacgaaccagccgcgcgcttctgcccttgtcggtttaggaaactgggaagttccctggtcctgctccccagcccgcagaggggacactgaggcccacggtaggtggtcctctcctcacccgagtctccacacagacaccatggccgagcctctgaaggaggaagacggcgaggacggctctgcggagccccccgggcccgtgaaggccgaacccgcccacaccgctgcctctgtagcggccaagaacctggccctgcttaaagcccgctccttcgatgtgacctttgacgtgggcgacgagtacgagatcatcgagaccataggcaacggggcctatggagtggtgtcctccgcccgccgccgcctcaccggtgagcttcctgagccgtcgcctcccagatgtggcagcgtcgcagggagtgggaaaccggcctgtcccagacagccgggaaggaaagcggggtgcgagttctggctccagtcaacacacactgaccagggccttctgcctgccaggctccggggaggctcggttctctgaaactccggcctggtggttttgccatcctgcctgcctacttcctccttaggaaaatgatagtcccagttagaccagaatggagagccagtccttcgtgtctaagagagaaatgtgttctggagccagacactggcataaggaactggtggtgggatgggtgaggtctgagatggagagggtgtaggcataagaggctgagctacaccactgggcatccgtgcaacctccaacaagttactaagccatatttccttctctttaacgttgacctattgggacctgccccgcaggggagttgtgaaggtaacatttaataatgtaggtaacatgcttagcacagggcttggcacatagtaggtacccaatacttggtagctgttgtcatttgcatcctagaagggaggtgttgataggggctgagtcgactctgcagtttctccaaggtatcctctggtatgtcccttttccctgctcctcaggccagcaggtggccatcaagaagatccctaatgctttcgatgtggtgaccaatgccaagcggaccctcagggagctgaagatcctcaagcactttaaacacgacaacatcatcgccatcaaggacatcctgaggcccaccgtgccctatggcgaattcaaatctgtgtaagaagcgggatgggagagggagccagacttgggacttttctgaaggctgcaaccatgttgccgaagttctggaaaggcagctgaatctaatctgaagcaggctgggaaaattcccgcagttctaggaccagttctttagagttttgccagggacaactgttattcctcaagaagtgtacagatgattttacagttttatagaatcttagtatataggatgtcaaatgtaggac

SEQ ID NO: 1243713 - DNA, 4001 bp, Homo sapiens
ctgtcgtgctgttacttgccaggctggagggcacggtacagtggaggtggggtgcacacaatccccctacccccagtgggggccaccagccttcagccagaagaggggctggtggggaggctggcgagctgtcccttctgccagggcggccccagcctcagcgccccgtgcacctgagccgggtgggcagcagctcccatgcaggggcaggaagacaagcttgataaccacagggacagcagaagagatatttttaaatcacccatcgctcaggcaagtgctttttctccttctctttccagttacaaatctagaggagaaaaaagaaagggagaaaaagaaggaagggcaacagagagaaaagggcagcctcgccaaaggcccaggcagggagggaagcgggtgtgggccaacccgggaagtgctggggagacccctccactgggcggctcccccattccaatctcctggcgctgcaaatgctggaagcccgttagcaattaagcaatttcaagtttgtttttttctagaaaatgtacgtttttctttgagtgccctccctttttccgacgttttcctttctagccccgtctctgccatccgttttaatccacacactaattgtaatcccattaaagcagatataattttattagtattcacagttcatcaagctaccaataataactgttactgccaattttgtttttaaaagcgacaaacatttctgatgtttagaacaaactgtaaacaaaagccacccatgtaccagggtgacccggcgggtccctagcgcagccctgcgcgcttcccccgaatctacccgcgccgcctggtgacctctagggcttcaggcgtggtagctgcccctaccctgacctccctcgacactcatatcaaagccaccgggaagagggctgccctggaggcctgggcccgctctgccaaggactgatcctctcgggcagggagtcagaggggaccgcccgagaggatccgtccctgcgaggcccagcacggcgccccacgctctcctcttggagcaaatccgcctcgctctcctcttggagcaaatccgccgcactctcgcctgcaccgaaatcctgagcgccgccccgcgccacccccagcccgcgcccgcgctgccctcctccccgggccgcaggctgagaggctgggccgcactctggccacgctttgtccggctttagcgggataccagaggcactcgttaaggcaaatgcatccctgcaaacccattctcgccctgacactttaaggctttatatagaaacaggatttgctcgtcttacaccagcagtccctattaacgctcgcccggcgcacacaccactctaatccgcgaggccgcggcgtaccctggtcccctccccccgccacaacagccgttttgtttccgcagaaagcgcctcgttgtcccagccccggaacgtcttagggaggtgaatgcagaatgcagaaaagaggtttccgtggaatttagatctgcaggagggggcgggggagggtggcgaggcgcggaaaggctttaatttcagccggctccggggctgcccctccgagacccccgggggagggtggccagggaagggcctctctaagccgcggcgacgcagcttggggggctggcgggacgcgcggccccgctcagcgcccaggcagccaccgcggccggggccgggaaatgaaaccaaagcttctctgctcccgggagcggaggggtgggcgccctgttccgctctcgaacgctcccgtcccgcgcccgccccggccgagcactgacctgtgtgcgaagccatgggcaacggcgacgggaagtactttcccggctggaagtgtgcggggggctgcgcggcgggcccagccggggcgagacgcgcggcggcagcggcgctgcggtggcccaggctcccgcgctccgacagcagatgcggcggcggcgcaaagtcgcggccatccatgccgggccccggccccggtccgccgccgcttcctcggagcagcgcggccggggcccgggggcggctcggcgcgcgggcggcgcagaggcggcggcgtccggggtcacaggcggtggtggcggcggggccggtcagcacgcgggaggactgggcttctcggcgggcggccgcgcaccgagccagcggccgctgtgcgggtccatggtctgtggaggcaaaagcagaggagacacgggtgactggggggctcggctcgcccgggggtccccgccccgcccgctcacccactccccccaccccccacccccgccggcccgagcgagcggcggccaggccgggtggcggggccggggcgctcggtgtctccccgccgcacgcgcgcgcagcccagcacccggggccccgcgcgcgcacgcaccgtcccggccacgcttggcccggggcagccgggggaacccagccgcactgctcgccgcctcccgttctcgtccccgcgggtccctgcagctagggcgccgcggcgaagaggctgctggctctgctgggtgataaaaacccaaatctgcgaagccatcacgcacactcgcacacacacacacacacacacacactcacacgcacaccctctcccctcccccgctgcccaaaggtgtctcggaggaaaaggcctggggtccacactagctctccccctctccccacctcatgccgaggtccagcttttactgcattccgcttaaccgaataaccatgctaattaagcgagtaattttattgattgtaactcaagagttttttttttttttaataaccttccttttctccccactcccatccccctcatgcatctttcggcccattcttctgaatccaccgtggtcccccctccccagccccagcgggaccagctcctgtccccagcatcgcgctaggaccccaggccggctcctcagagccccggaggcccgcaaccgccaccggcatcacctgggccgccacgccgcagtgcccggcctgctgtcccggagccgggagcttcctgttgaggctgtaacaatcaccccgccccccaatcaaattcgcccaggatcttcctctgcggattgggggcttgggggtgtgtgtggggggggtgctttcagagtcagaatgctctctctcaacggcccaaatcggccctgggatttcttccttcagcgcctgccggggaccgcgagcagaggccggtctccgctccgggcagtaccgggcggcctgggtacgcggggtctgcggcgcccagctcggccctctagccggggaaggtgggcccggcccagcacaaccttctgccagcagaccctgcccggacctcggccacctaaaataaccctcacctccattttcttccacccccacccaacgcggagcatccactcaggcgaaattggggacaattttagactctgggtgcggagggtcggagccagtgatagaagctgcgtgcaccaccgtgctcccaggcgtccctccgaaggcgctccctggacgcacttcacatattactcctcatcttctaaatacgtattgttttaatgtttatcacctccaacaaaagggagatggataggcttgatattcctaattaggaactttgcggaaaaccttgtgtttttgtagccattccaccatgacaacaaagcgattaagatgttttccatctactgaatacctttttaaattgcgatattttatggtccgggttctaaaacgtcttatttgcagactattttgtgtttgatttaatctataaccgaaaacataatgtattaagtgaatacatatttgctcagctgataagcttttttaatatttattcggagagcttttgcattgtaaataaatgggtctacacaaagagttctctttgtctggcaactacatacaaaggcgtttggggctcccttccctctggggatcgccagctctctccccgggtctaacaaatagctcggctcccaagccccgatcccggcctgc

SEQ ID NO: 1243714 - DNA, 4001 bp, Homo sapiens
gcgtccacaggggctcaaagtccccaaacactcagtcctaagagttttcctgccagcagatttcacttagacctgcagataaattacagcttcacctaggtgaaggcctactgcccggttaggagagttttattaaggacgatcacggggtcggtcccccagagcaaaaccactccatgtactcaccccctgccaactctcaccacgaaagttcctgctttctggtttcagcgcagaaggagaaaaaataggaaaaaggttccgctggtacttctcttccaccctctgcaatcacaaacaagtcgtaatggagctaatgactaataatttaataaacctccctcccttgacaacatgtgcttccacagagcaacaaggccagaaccgtatgccacagactctgtgaaaccaaacctaacaaccccagggcctgtgcctttcccaagccgactcctcaggtcaccctgaatcctgtttcccagtggctccgacgtggctttaggactcatctagtcgaccgcacacccgccttcagaaaccttccagactgacgcggccccaacttcacaagctttattgaaagctgtattcaagtgcaatcggccccctgcactccagctggaaccagaggggccacccctgaagcctccatctggctctcccaagcctgagagctaagagggcttcccaggcccctggccaggcacgccttggccgcctaccacaatcagaaacagttactctgccgggcagggtgcaagccggttaggaaacatgaaccagcgactgccgggtaaatacccactccactcatcgcccagcctgtcactgaacctgcagacagttttgaaacaaagcacatctgtaagagatcgcccaggacccagggacacccagagcaggggtttctcctctgagaaaatgctccccggcagctgccgggctcaggcgtgggggtctggaccgagaacggatgctgaagaaagagaaaaccaagggcctgtttgtcggtatcccagccacaaaaacgactggggagggggcggcaggggaggcttccagcggtgctctgcggcccttggatgtgaacctgtcatttcgcagacgagaacgtggatgccactcttaacacatctgaagcaaaggcaggcacgtcagcctcctacacaattagtcttctctctccgcggttacataagatgatagattatccgtccacccatccagcctgcccgcgctccgacctcccaccttaggccccagcatgggcgccgggcaggagttgtgggaagggaaagcctgttgagaatgaagtgcccgaggctcgcgcaaccgcgcctggaggagccccacggtgccaccgcgccgaccgcggccttcagacagcccccatgccgtcctggccgccgcaacccctgggcccgccgcccccgccgccccggccctgcccgggtgtgctacgaccccgaccggtccgagggcttccggggcccggcgcgcggctccgttcccgccgacgccaaggcgagcgcgcgggggccgagcagggccgtcggagcggggagtgctccccgggcctggggctggggactgaccgggccgcggcgcgcatgggatgggggggcccgggcgggggtggccacctgtgagcggccggcgccgggctcaccaccccagcagcccgggtcccgggtggccgcgccgggaagacccccaaagtcccagcctcctggcccggcgcgcggccccggggccgccctggtcgggctcgggcgcgcgggcggcgcgcgacccaggcgcacacggagcgggctcagctcggcgccggggggcgctcaccttatagacattttccgtgagccggtgcatctcctctgagcgagacagagacatggtcctgggtcccggctgcaccacagaccggagcgggggacgcaagcggcggcagcagcggcggtaacggcagcaggacggagacgaaagcggacccgaaccacagagcccggcgtccggcggcggccacctttatagccgcctcaggccccgccccgcggcagtccccgcccctgcgtcccgcccccgttgcgcccgcatcaccgcccccgaccacccgcccccgcccggcgctgccgctgctaggcaaccgccaggccccgcccccgcaccgccctttccattggtgggttccggagaagggggaggggggcgggatcggaggtggggcctagtggccgactccaggcagcgattggtctgcggcggcgtcgatcctgggggaggagaggggaggcgcggcgcgggctggggccctgggagcagcctgagggggcccgggcaacagccgggctgggggcggggaggcgggggcggggtggcgcaggaagaaggagcagaaggtgcggggaggagagcggggggcgccggcggcagcgcgcgtggaggcggcacttcgcgaagtggcacttcggggcgggcggcccgccgggtcgcggcctggcgctgcggggcggggagcggctcggacgcaggacgccgcgggccgggcttacaggtgggagaggccccgaccccgccgcttcgcaggtaagcccgccgggcgggcggcgaccccccggccggcccctcggggcagagaggagaaccctgggggagggggtgctgcaggaggaccctggagagagctcggccctggagtgggggacgacttggagaaggaggatttcgggggagcatcgtgaggagaggacttggagggaggatcctgcagaaggtgaactctggggaggaccccagacaggcagacagcgcttgggggcttggggccgggattctggagaggggaggaccctgggagaggagggttggggaagaggatcttggaggagggccctgggaaggaggatctggagaggggacaggggagtgtcctgctggaaggcctggggacagggcgacccttagggacggggaggaccctcctgccgtcagaagattctcgttggaggcagtttactgagagagagaggtctcgggaaggaagggtcgagggcagtaggaaacgaggggcccggaggactctcatgcggtggaaagccctagggggtgggggaaccttgtaggaggaatggaggagtcagagctgcctccaatttttaggaagggtcctgcttaagggtcctcccaaggggagattctgccggggaagctggccgagttggcacacaggtctcccggtacaattcccgtggagaaatatttacataaattaggctaacatagaggaattatttgttttacgttgtgaaacaccagatctgagcgtttccgtttaatgaaacctctcagtctcccagcctcccatccctgcaaaatcattcattcattcattccttcaacgagtcaggcccctgggggagacgcagttgtgctggctggccggcagatccccagactggcacgggctcaggccgatggaaagaccagggaagtaagattcaggaagcattgcctccctcccaccacagccccgcgcctcctctcctccggctgaatttccttccagctactggccctggctgcttcctttttctttattgtctccagtgtttgggggtagatccctgtgtatttattttctaggattcttttggtggtaaatgacagaaagctcgctcaaactggccctaacaaatgagggcatttacctgaaggtaggagcatctccactgaccctgacccccttcttctaggccagcttcctgctgtgttccctgcacccaccgatctcacacgcagccctaggacagacgtccactggcctgagttgggtctggggccaacacggagcaggtgggggtagagcagctctgctcgcctggaggaaagttgaatggctggaaccaagatgacagatggaggctggcaggcaaacacgggaggcctcctcactccaagaggggagtcagcctggggacagttcttctccaggccctgctgctccc

SEQ ID NO: 1243715 - DNA, 4001 bp, Homo sapiens
aacaatccactaatttgttaaacctggagtttgaaaacactgctcttcaggatttagcatagtgctcttcacgtactctgtaaatgtgctgaatacgtcaacttaactctccaattcttcatttggtcttggcaattattattattcatcccataaagccaacagttaaaagatttttacaaaagtaaccactgttcataaagaaaacctaaatgttagtattctgagtaatcttttcttcagctattgggtttatctgaaatgtgcttacgtgacagcctgggggcgaaccacaactccaccagtacaacgactgggtcttcttggggaatctgtagccatagcttcattcataaaacctgtttccagaacaaacaaacaaacaaaaaacagaaaaacatggatcgttgttgggggtagggaggaagatttatgattactcactagagatcccttgtcaaaaatgcctcaaatgtaggaaactttcccagaaattcctgttacaccagaaagggaaaaaaggaggaagtaggtttttaatttttttcaaattataatgaggggtttggggggttattattatttttgagatagagtctcgctctgtcgcccaggctggagttcagtggcacgatctctgctcatggcaatctccgcctcccaggctcaagcaattctcctgcctcagcctcctgagtagctgggattacaggcgagcgccaccatgccgagctaaattttatatttttttgtagcgacggggtttcaccatgttgccaaggctggtctcgaactcctgagctcaagcaatccatccgccttagcctcccaaagtgctgggattataggcttgagccaccgcgcccatcctgttttgttttttaataggaccaggtctcagaaccacaaaacaatgtaaggaagactcctgctgtaccccttggtctgttgttaacataaattacaagggtgagagaaccagatcatgggatgggaatttactgcaattttatgttgagatagtgaaaatacacatggtacaatatttcaagaccaaacggaacaagtgacatgatatcactctaccttccaattaaacctgttgggaatctatgagtaaatcacaatttaaatcacattcgtaaccccctgctactataacaaataagtcaagtaattatttgactagtagcaagtagtcaaataactaacataaactaatacgttgttacagccctttaccctttcccgtcacatcagtaaatcctgatcctagaatgtttcatgaccctctgaatcactgagattttaagagcatggagtcggcttggttaaggttaaaagaggactgacagcaatatcaaagatctcttacagggctcagggaagcccacaacctggaactcatcttgaaggcaccgaaaaccatttttaagtagggagcattcacacctgatgtgaaaactctaaacctgtgcgccccacctcctacaaccaaaacaccctctgccccaaggagcagagccaccacctcctcagaggatacctgcacctccagcccctcagccctctcattctcatcccattcttgctttctcgaaccacagtctcccaagccctgccctttaagggccctgtctcctggggacgaccctcgccagccactcaggccccagtctcctgaaagacactcgtacggcgctgcccacttaacctccaacacggagccaccgctgcccccggccgccctccggccccttgcactgttcccctccccctccagtatcgacacctctctcctgtcgaattcctgccagcccgacccagtcccctcacgccgccagtccctcgtcctccccaagcctccccaaagccaaagccctgccagccctctcaccggccgccccgccggttaacgctagtctccagctctaggctcactgtttggagtctccccgagtgattgacggcagccacttcctaccacgcctcagcggaaccaccccctctagccaatcccagaagcaaaccggctatggccgggcaccgcccttggaggtcagcttcgccaaccagcaagtaggaaagaggcggacccgccttctgaatgtgtccaatccgctggggctggagggaaaacacaacagcatgtaagttcgggtgaagccgaggtgtcaggttcggttgcaaacgcaggcagctggggaataattacgaacatgtacattttttttggaagacagaaccttcgtggctttgaaaagaaaagcaacatgatccagactcctgtcccgctcacgtgagcgtttcaggttggagccggaggacagggagactggtctgtttacatcgaattctcgcgacagctggttccaagctcggagcacgtggacatggcagctgccaatcacttttagctggccactcacccgtcccacacccgccttctgcccagcccttggcgatgtgtttaccttccgggagcctaggctggctcgcgccggcgatcagccgaggaggggttgatctgaataaggggcacggccggtaatctcaacaatttgagctaggtttgtagaccacttcttgcttcagtttccatctcccttattgttgaagatcgagatctcgccattgtcatttcatcagttcatttattaatataagtagaataatactgactgacttcttgaacactcagcacaggccttcgtatacttcatatacaatactctaatgtattatcaaatttaatgccaatgacaggtccgtgagggtatagcttattaacaggcgtggtgggctgggcgtggtggctcacgcctgcaatcccaacattttgggaagcctaggcgggaagatcgcttgaggccaggagttctagaacagcctggacaacatgaagaaaccccgtctctactaaaaatagccaggtgtggtggccaatgcctgtaatcctagctactggggaggctgaggcggaagaattgcttgaacccaggaggcggagattgcagtgagcctatagatcacgccattgccctccagcactttagcctgggtgacagagagtccctctcaagacagatagatagatagatagatagatagatagatagatagatagatacatacatacatacatacatacatacatacatacatacatacataaaattttaaaaaattttaaaaaaagaaatgaaagaaaaggccgggcacggtggctcacacctgtaatcccagcactttgggaggctgagaggggcagatcacttgaggtcaggaggtcaagaccagccttgccaactttgtgaaactctgtctctactaaaaatacaaaaatcagcgggttttgatggtgcacgcctgtaatcccaactactcaggaggctgaggcaggagaatcgcttgaatccgagatgtgaaggttgcagtgagccgagatcgtgcaactgcactccagcctctgggcgacagagcaaaactctcgctcaaaaaaaaaaaaagaagaagaagaagaagaagaatatatttggaaatattgaaataacttgataatgtgggattgaaataacttgataatgtggaattgtaacattgaaaaggaggcctagcatgactaactccattttgctcctaaactccccactcccacccatcggtgatatctaagttaactgcttttgcttatctctgcacatagactaagctaaccaagggaggaatttatagtttaactttaaagcaaggatgataatagtcccttcccaaaactaacccccaaggagaaaaggagggtgtacacacaagtaacaatgttgagagtttgagaaagtattgtgacctgaccagtaacagagaggcttcaggcctcgaggaacccttgctggcgcccagatgtctacggtcatcagtcaccccttgattcaaaccctctcttcttccccctgcccttaacacaaaaagagcctgaaatgtgtactaacttaagatggttc

SEQ ID NO: 1243716 - DNA, 4001 bp, Homo sapiens
aaaagagattgtacggttgaggggtgggggttctctcctgggaaatttggagccaaaggcctgccctctcagggtgagccaatattgttgaccaatgagccacatccattgtactgcccaagtgccaccctgctgaataaacctggtctctggccagctccttaaggtgagctagtgtctctgaaacccaccacctatctcccttcctcctgaccatcaaggcccaatgactctgtcttctagctgaggccagctctgacaaattcttgaggttctagactctgtacctgctctggggaccaggaatgggtccttcttcactgctgctgctgctgctgctgctgctgctggaggcctcgtctccactggggagcctggcttgggggcaaggttgaccagaacttctctccccgaccaggctccctgcttgggaggcctgagagtttagcacgatgtacttgtactttttccagttgcaggccttggggtcagggctggctggactgggggggccttgactgcagcttcgagattcagtaggtgggtctgggtgtccttcggagcgcctgggactacctggtggaggggccgttgggggtgttgggggttctgcttccagggggcgcagggagatgcccagaggttcatagctggggaaagtgtgatgaacgttagtgccatttcctaaactctgcctttgcccttaacacctcacccacagagaacgccgagccagggtccctcacctggcctggatgaagcggtggcatgcctggaccacgtgctccatctgcaaataggtggcggccgctaggactgctggtgcagtggctggagagaggcgcaggcgcgaagtgtacatgaagtccaatagaggggcgaagcctctcgcttcgggacccccgggcagagagagcacgtccaccccgactcccgcacggccccggaaaattgaatagaagaagccactagagagagagcagataagtcctttgggggctggggaaccaagggagacatgcgcagcttcaggaagccccgccccctgaaaaagtcccgcctcctcactatcaccccgcccccaattctgggacgctccgcctcctgcttctgaaagacttggcttcggattccctctcaacggccctgtggtcccacccctttcccatttggccccgccccaggccccacccctcgaacctgcaggcgatgagaactgccttgtgtgctctgaggggttgcccgccaaccagcagcgtgacgtcagtgaggatcccgcgcaggcgcagctcgttgaggttgcccagcacgtcggaggagtggcgagtgaactcgcggacgtagcccagcgctccctccggggcggcgggggaacccatagcgacacaggcctgtagaggccgtggaaagtgctctggatccaggcagtcctaagacgccttccctcctctgtttgccttttccttccgaggtgcaactagagccaggacttccagcccctagccccggcacacgcagcctccctcctaattcttcttgttcattctgccctctacgacaccctcgctcccttgcctcttccagatcccacagcgcttggagccagttgaaggttccacaccgcggcgtcgttggcgagcgtggggaatcccgcgcccatcgccctgggttcgacccccagtgcccctccagcaccgccactcccctctgcgcgcctgtgtctcaggtgtccaaccctgcctcgagatctcacggcctgccgtccacacacctccaaatcccagccgaggctcccttccccgaactacggaattctgcgactcctatctagtccccaatccctagtttagcccaatttctgggactcaggctcgctgatggcaagctccacacaagctcctaccctcttgggggacccaggagtctggctccctcagtctcttgttcttacccccgtcctgcaggggccgcggcttctcttcttaaggggggcggggtctctctcccctcttggcctcggctcctttatctggccgggatgtcgggggcgggggtggaggtggggtgaacgcctgggtctgtatccttccttcctccctcgctctccagatggcgagtccagggcggggtctccgtctcgagggcgggacctcagaaacaaggggtggtcgtaacgtagggggtcttgggtcactgcaagtggacacgaggacggggatattggaattggggaggaggttagggatatcgaggttggcaatacgggagtctgagtcgtcggaaggcctgggccagtgaaaattggtgtgttggcttttgggagggtttgccaggagccaacctttgctgcaggacaaagtgcatacggcaaccccctctccctctcttgtactgtgttaagggagaaaagggggagcccaacgagacagcaggtttgggcagacgacagtgggctcccgtagggtctcagacggggagggtgtggtgtgaatgacaggctactctacccgggcctacaaaaaggggggctctggccgggcggggtacggagagggcggatatgatttctagttggtttccttccattgtcctgcgaccggacggctccgccagctgcttcccctcgaggaggtggggaaagccccgaggtgggggtggaggggcgagagacgctcgggagacctaggcgtccggcctctctcgctcccgactctcttctgggtccttgtagggatccagagagatggactcccgcccaaagcccgcttgctttcccccaatcccagctcacgagggcctcgggcacccgcccgtcggctacgcttggaggctggcgggacgccggggtccagcgcggcaagtaggcaaggctcggcaatgtgcggctccttccacgagggggcggccgagcactggcctcgcctcgcccctcgtctccacccggcctggggtgcgctcagacccgggcgcaggatccatttggtctgggcggctgaaacctttagcctcctcccctttgcgcgggtttattttgcacctctgtctcctaggaggggactagggctgggcggagggagctagagttaggagaccgaggggactttcccctcaggctggggttcctacccgaggtgagaaatcgcgggctttaggagccaggggaatgggtgggacaagaagcgggacctgagcctgggaactccgggttttcttttcgaattaagctagacactgctacccagatgtctttggaggtgacttttaattgaacattaaaattgggtggggtaaacgagaagggaaaacaaggaggagggagagagggcaggagggggcttaaccaccctaatttgaagtccctgatctgagagatgggcatggatcacaccctcatattttgtttcgggagacattgcgggcaggcaaggcaaagctcatttggagaaggggtgctagagctgaatccagctgcaaggcagaagctccccggatttgggctggggagagtgtacagttggccaggaatggccgaccatggtccacggggctggatatcaggcccggggccctccccttcagaccggagtgtgtctttatttgaatgcatgaaagaacagctgagaaaccgggaactgggaaattcaggacgatgaggtggctttgacatgtgagggttatttaggtctctgcccagcttggagatgagaattagactaggggctctccctttggcatcaggatggagtattatttgatcagttgtggggtgtctgtttattatggggtgttgatttgattgtgagcaccggtggctgcattcagcctttgaggcctatatggtaagtttcaggtatggggctgacttggaagttacattagttctgggggttctgacacccacaatttggagattgtgctcacctgtgtcatcttggactatcagcagaaccaaagtactcatgctgatttgggggtgcagtctattttggggtgccatctaa

SEQ ID NO: 1243717 - DNA, 4001 bp, Homo sapiens
cagcaaattcctaagtgtttctgtggtttgtcatatttgaactttataaattctttatgaggcagtttaacgttttacagaaaaaatcagaaaccaaggcttggagaaatgaagtaacttgcaaaaagttgttcagctagtaaatgacagccaggatttaaacccaagcaggctgactccaggcccataagcttatttaagctgcctattcagtcttctcttttactgtctgacttaatctgaattcttctgactttgcgggattttggggttttttattttttttaattatagagacagggtcttactgtgttgcccaggctggtctcaaactcctgctcaagtgatccacctgcctcagcctcccatagtgctgggatcacaggtgtgaaccaccactcctggcctttttaattaatttattttttgagacagggtcttgcactgttgcccaagctgcagtgcagtggcatgatcatagcttcctgcagctttgacctcctgggctcaagtgatcctcctgcctcagcctccaccacccaccacacccagcaatttttttttttttttagagacaagatctctgctaggttgctcaggttggtcttgaactcctgggctcaagcgatcctcccacctcagcctcccaaagcactgagattacaggcgtgagccatcacatccagcaaattcttcagactttaagactctactccatttaccagctgttggaccttaggtaagtcacttaacctctctgtgcctcggttcttcatctgaaaaatgatgtaatgacggtataccccgtacgggttgttacagggactaaatgaagtaatacgtgtaatgcacttggtattactatatagtaagtcctcaaaaaataccatttattattatatatacatattccttttctctgaaacagcaggagcagaaaataaggatctttcttttgctactgaaagctctctttttttgagacggagcctcgctctgttgcccaggctggagtgcagtggtgcgatctcagctcactgcaaactccacctcaccggttcaagcgattctcctgcctcaacctcccgagtagctgggactacaggcacgtgccatcacgcccggctaatttttgtatttttagtagagaggggtttcgccatgttggccaggctggtctcgaactcctgacctcaggtgatctgcccgcctcggtctcccaaaatgctgggattacaggcgtgagccaccgcgcccggtcggaaagctctcagaagtccacaatgtcagaatgctttatgtttccaaggagaaaacagggagccagatgaagtgactttcctaggttcacacgatgagtttgtggcagactacacagccaccataagaattatatcaccaaagctgcccaccttccacattcttgaccaccctctttccaagggtctcgctgacctgtgagttcctggatggtgacacggtccaggatcttgaaactcgtgtccagtttcaggggctggctgcagcgctggcacacgaagctcacctgcatggtgctgttgttggacgtcttagacccttccatccctgaggccgtggaaaagaggcaacattagggagaagcgacgcccttgacctccggcccggggttaccacatgccttggtgacgatggtaaagggagggaagtcccaacctgcgccgttccctctaggaatggtatgatacggggaggacctgcttccgggacagcctgagcaaaggcagtttagagcccagggtcagggaagggactccaataagagccgtgagggttcccagactcccttctaaggtcccacctcagcccccgatgctcttcacctcgggagcccggagcccgtcacccaagtccggtctaccgcggaggcactgtggcctcgggtcggccccggagcgaggcctccagaactaccatcgctctgtcttcagcgacttcccggtagccgccggaaaacttccgcccgagaccggacgtgacgctacgacggcagcaggagctcctggtccacaggctcacaggcccggcagcggcccccagaggccgggctgggaaaagcagcgggcttcagcggatgaacaaggttaccacgggaagtgtaggagccaaggccgcagagaatggggaggctccgctattctctaaattcagggggcggcgggcgcggtggctcacgcctgtaatctcagcacttggggaggccgaggagggcggatcacgtgaggtcaggagttcgagaccagcctggccaacacagtgaaaccccgtctctactaaaaatacaaaaactagccgggcgtggtggggcacgcctataatcccagcttaatcccagctactcgggaggctgaggcaggagaatcgcttgaacctgggaggtggaggttgcagtgagccgagatcgggccactgcactccagcctgggcgacagggcaaggctccatctcagaacaacaacagcaacaacaaaaggccgggcatggtggctcacgcttgtaattccagcactttgggaggccgaggcgggcggatcacaaggtcaggagttcgagaccagcctggccaaaatggttaaatcccgtctctactaaaaaatacaattagctgggcatggtggcgtgcgcctgtaatcccagctactcaggaggctggggtaggaaaatcgcttgacccccggaggcggaggttgcagtgagtcgagatcatgccactgcactccagcctgggcgacagaaggaaactccatctcaaaccccccccccccacacacacacacaaaaccaacaaaaaaagaaagtgatattcaaataaaagcttgaagaaggtgaggaaggaattcttacctgcatcttaaggaagagcattctaggccaagggaacagcaagagcacagagggtacctgtttggggattagcagaggctggtgtggctagaagatgggcaacgaaaagagatacagaaaatggggtgagggaggtaagagtgttgagctaccacctaggctcttatagggattgtaaagctctggctttcactttgaatgagatgagatgactgggtcttgagcagagggacttacttcatttttaaaaacaactttatggggtataatttacataccataagactcacactttttaaatgtacagttcaataatttttagtaaatttacacagttgcccaactatcaccataatccagttttagaacatttcccatctccccttgcaatcccccactgtggcctcccaaagtgctgagattacaggtgtgagccaatgtgcctggccaaaagtttttcatttcaataaagtccaatgtttatgcttttggtgtaaaagaaaccactgcttaacccaaaattgtatgtagtattgtctattttatttttattttgagacagtgtcttactctgttacccaggctggagtgaagcggaacaaacaaacatggctcactgcagatttgacttcctggctcaagcaatcctcttgcttcaacctccagtgtagcagggaccacaggtgatcactaccatgcccagctaatttttaaaattttttgtagagatgtggtctcacactgcactccagcctcggtgacagagcgagacgccatctcaaaaaaaaaaagagatggggtctcactttgttgcccaggcttctgctttttaaatttaacatttttctatgttgctacacagttattgtagttatcatggctacattacactacactaaatgtactgccttagtgtatttttttaccgctggaaattctactatttcccctgtgggtgattacaataatcctgcaatgaagagctggctacttatgatagagactcataactgggactacagaattaagagtgtgtcagctatttaatgtctcttccttaacactgggaatcattttccaaagtgcttgcacataactatattctgcttccagtaatg

SEQ ID NO: 1243718 - DNA, 4001 bp, Homo sapiens
ctgagctagctgtggggaacccttccctctcctgttggcaagagcccagcgctcccccagcacctctgggctctggcccagcaggcagcccttgcaatattagacccttaccctgagccgggccagacaccagctcatctcagatgcagggcagctctctggacaaaactctcggggcagctggctgtgtctctcactagctcagcaggcttggcctgaggcccctctgccctcactcaaccccctccccagaatccttcctgggttccaagtcggcccctcattatgggggccctggcccacggttccctgggagctcttcctgcctgtcgctcggggtacatgcacgcaggacttaccggcccccaatcctagccctgcccttggcctccttccctgagacctggccagagtcccccttcactgtggctgcttccaggcagctctgcagggaggtccagagacggggctgaccccatccttagactcccaggccccgtgacccctctcctgatatcctcttccaccccaggggactcagggaggaggggtctctggatgtctctttcctccccttgggctcccacagtgctcagccacacctggggtcttgccatgaatgagttcccccaggcgcctacctgtgggccttaggccccgcccagcattccaaggagagcccccagccctcaggcgttcctgccaccctgggccacggggcccactggagtcgtggtatcggagagaaatgagtttttccttttatttggctgctgcccctgcctgcctctcccggatcctgcctctcccggatcaggcttgggcagcagcgcaggcagggaaggggactccgcactcatgtgcccacgagaccacagcaggccccacccgcattcccacgctcccacacctcctgcctcaaagccctcactctcctaaaagcatcgagaacacacagggctcggaggcgcaggagtgcgaaggcggcattccaagacgagttcgagtccaagatgagttcaggatcctgagcctttctggcaactgcctccctaggctgggatgtgggggcgcagccccaggccccggagctccttctctctgccccaggctgggatgtgggggcgcaaccccgggtcccggagctccttctctctggcgagctccttctcttccacgccaggtctcagccggtccagttctgctctgtccaagacgcctttgcagtcccgggttttatagtccagctgccagcccggcctccctgcagcccagccggtgcctcgaggccggtcaggagcgcggatggcccatcccgggggcggatcgcaggtagccccgcggccagggaggcggcccggcagaggaagcccccggacagcggcgccagcttcccccggaggcctgtgctaggcccggcccctcggccaccgcactgggccgtgccaggggcgcgtgcggggggcacgaggcgcagcggggcgcggacggcaccgaggggcgggcggcgtctgggcgcgcgaggctgggccctgcaggcggcggggggctggcgcctgtgtccccggtgtccccgcgcgcggccgggccgtggcactccaggtgtccgcagggcccgcggggcgcggggctggcgcgcaggaccagggagagcgcggcgatgcggtggatggccctgcgcagcgtggcgatcttggagagcctcttgccgcccaggtcgtgccgcagcgcccggcgcagcgcgttgaaggcctcgttgtagtctaggatgcgcttgcgctcccgcacgttggcggccatgcgccgcgccttggaccgcaccggccgcgcgcgcctcctgcccgccggctcctccgcctcgccccggctgcaggaagcgccgttcgcccccagcacccccgaatcgcccccgggctcggggcaggggccccccaagtcctccgcagagtcctcggcccccttccgcgccgtgaggcctagtcctggcgcgccccgcagcatggccttcccgggcactcgccctctgccccagccccggccctctgccctctgccctctgcccactgccttggcccggctcgcgacgcggacggtccccggctcctggggctggacactcccgagacaggccccttccagctgggctttatggcaccacgcggcgccccgccctcccgtccatccatctccctcctcctgctttattatcggcctccaggtaggtcggcgggggaggaaccgaggggaagaaggaaagcaaggagggaagcttgcaggttcttgtaagcggggaccagacgggcagcccggccacgctgccccggggaccttgccctgcctagctctggggccgctgtggggtgtctgggttccacattcttcctccccattcccagataaggtgctaagtttggcttctagcaggagagctgataggaataaaaagaggcagagggccgggcactggggctcacgcctgtcatcccagcagtttgggaggccgaggcgggcggatcacttgagttcaggagttcgagaccagcctggccaacagagtatataaaaccccgtctactaaaaacacaaaaattagccgggcgtggtggcaggcgcctgtaatcccagttactcgggaggctgaggcaggagaatggcttgagcccaggagctggaggttgcagtgagccgagatcgcaccactgcactctagcctgggagacagaacgagactccgtctcagaaaaacaacaacaaaaacaacaacaaaaccttgaaagttcttgtcaagtcccgtgggcaaccacagagatgtcactgaggaaaagcatgagtgtcccggcaggactcatatgggaggcgcagggccctgcaggtaaagctgacccagagcttccggctttttcagctatggagggcggctggctgcaattggggttcgggttttggttgggcctgactctccctccactgccctttgactccccttctgcaggcagagctgggatgagtcagcagcagagggtgacggggaagatccctttgcagccctgggtccacatcaggggcatctttggggtccagagccctcgggcagccccatcttgtgacacagccctgccaggttatgaactcaatgagcagcctctgtcctcttcccccagggatttgcatttgaaagagggtctcagaaaaaagatgatgtttattcccaaagaaagacccccagtagaatttccggcatccacagctgagttatttggagcgcctgaaggccactcattcccagtcacaatccaaatgcctctaagatgccaaggcctatggcattggaatgggtgtgtggttcacatccatctcgccaaaagagcattgccaataaccccattatttcaaactgtgaatttctccataaaagaaaataataaggcattaggaagcagagtgtatgtatttacttctgtgattgtctgccttgcccactaggatgaaagcatcctaaggacatctgtatttcccaggttctatgtcccccaaatctgcaatatatgtcgaattataaaacagctagaggccgggcgcagtggctcacgcctgtaatcccagtactttgggaggccgaggtgggcggatcacttgaggtcaggagttcaagaccagcctggccaacacggtgaaaccccgtctctactaaaatacaacaattagctggacgtggtggcggggagcctgtagtcccagctactcgggaggctgaggcagagaatcgcttgaaccagggaggcggaggttgcagtgagccgagatcccgccactgcgctccagcctggcggacagagcgagactccgtctcaaaaacaacaaaaaataaaccagaaaaaaaaaaaaggtcagtaaaagcaaagaaaatgcccacgcagcgcgcgtttcccggtggcgtttcccggccgctcccgcccttccccgcgcacgtcaggaaacggccccacgcgaagaaccccgag

SEQ ID NO: 1243719 - DNA, 4001 bp, Homo sapiens
gctcactgcaagctccgcctcctgggttcacgccattctcctgcctcagcctcccgagtagctgggactacaggcgcccaccaccacgcccggctaattttttgtatttttagtggagacggggtttcaccgtattagccaagatggtctcgatctcctgacctcgtgatccgcccgcctcggcctcccaaagtgctggtattacaggcgtaagccaccgtgcccggcccactgtaaggattaagggcagagaagggcattattgccccgggttccccaagggaccccctagctcacactctcattttctgctaggggagtctccctgtataactgactatcaccgttaccagaactgcattacaatgaaaacatggccacacaaagtccaaaaagacagccagttgtaactctaatctgaaaatatcataacacttattcattttcaagaagaataccactgatcttttcccagtgattacggggatgcagtataaccaccatagcaaacatactaagaaaaaaaacagctactctcttctggccaaaaagaaaaacaactggggtgattctccaggggaaaaaaattaaagctgtggaagcaactgaatccgacagaaaaaaaggtgagaaaagaatatggcattacagtgtggaaagacagataccatccgagtacagaatttcattgtcattaactaggcatcttgaagaaaaaaatccagaacaacactgaagtatatgctttctttcttttttttttttcaattttttatttttatgacggagtctcgctctgtcgccgaggctggagtgcattggcacaatctcggctcactgcaacctccgcctcccaggttcaagcgattctcctgccttagcctcccgagtagctgggattacgggcgtgcgctaccatgcccggctaatttttgtatttttagtagagacggggtttcgccaagttggccaggcaggtcttgaactcctgacctcaggtgatccgcccgcctcagcctccgaaagtgtgaagtgcacactttcaaagggtaatttttgtgctgtgtaggttatatttcaattaaactgttttttaaaaaatctcaaaaaaagcacttggacgttcctgggagttcacaacaacagggtctgctgatgtattctgttgaacatgaaaggcatcaggcatcttacgtccaccccaaggcattttggtcaaatgagatttaattaggttgtaagcatcaccaaggcaccagcatatagagaggtatccgttcacaacagctgtttaagaagcaatgagggtggaaagcaaccctcccatactaagtgtctttgcaactcaaatcttttgacaactcagttcaaaacaaagcccatcgaggctggccagagaagacttacatggggtcgtcatctggctcccagccttccagctccttgaagcagaagaaacactgggccaagtctggctcgttctcagtggggcagtggatgaagccagcctcggccatctgcaagggacagcacagctcgtgagtggacgtggcagcccggaaccccgaggcccagccacaaaggcctcgatggggacaaagcagggaggggaggccggcctggacccaaggggcccagccacagtggcctcgctggggacaggacggggaggggagggcggcttgtacccccgaggcccagtcacagtggcctcgctagggacagggcaaggcgggcgtgggggaccccaggaggccgggcagtctcacccgctccggggtgcaggcgcagccctccaagaagggccagttcttgaatgtagagatgcggtggtccttgagaaagggctgccaggcagggggcaacgtcggggcacccatgccgccgccgccacctctgccaacgggtcccgcgattcaaatctggcggttaatggcgcgccgcggggcatgtcgggagcgcacgccctcttaggcggtccaccccccgcggccttctgggagtagaggcggggcggcgcggggtgtgccgggagttgtagtcctcccgccgcgtggctctgcccgtggtcgcggtgcacccagcgacgccgcgccagctcgtccctgcccacacctagcgccccctcgactgctttcaaagaacgcgtgcaggccgggtgcagtggctcacgcctgtaatcccaacactttgagaggcctaggcaggagcatcacttgagtcctggagttcaagaccagcctggccatcacggtgaaaccttgtctctactaaaaatacaaaaattagctgggcgtggtggtgcatgcctgtaatcccaactactcgggaggctgaggcaggagaatcgcttgaacccgggaggcagagggtgcagtgagctgagattgtgccattgcactccagcctaggcaacaagagcaaaactcagtctaaaaaaaaaaaaaaagtcagacaggagagctttacagggtgccacctctgcaaaaagcatctactccagacgggcatgaaggacaaatgaacaggggagggatggagtgcagcagacatcgctgtcccggcgagtacatcgttgactgcacgacctgggtttccaggagggccaccttctggagtcaggggccagggactgggccactaccgtgataagaagacaagggagctggggaaagcccagtggagggtgggggcctgtgctcagggcaaactcctcctttcccttcgcaaagcagggcgtcccaccaacagtaagtcctgcagcctattaaaaaaaaaatcagtgtgtcctctgctttggaacagggtgttctggagtcacttctggagctgggcatcacatccactcacttctctggttctatggccagagataagaggcctggccttattagccctccagccccacgcaggcctggtgcctccactgtctttttcattttggggtttatttatttatttatttatttttgcaacctctccccacccctcccaccccgcccccattctttaatacagtaactttttattttgatgtttatttatttatttgaaactgagtctcgctctatcgcccaggctggagtgcagtggcatgatctcagctcactgcaacctcctccccgccacgggttcaagcgattctcctgcctcagcctcccgagtagctgagattaaaggcatgcaccaccacaccaggctaatttttgtatttttagtagagatggggtttcaccatgtttgccaggctggtctcaaactcctgacctcaagtgatctgcctgcctcggcctcccaaagtgctgggattacagatgtgagccactgcgcccggcccgatgtcaatttaaataaaagataattgcaagaatagtacaaagaatactcatatacccttcacccagattttctgtttatgttttgcctgtttcctttaacattcactctctgcttcttcctccctttctctcctcctctccctctcttaccccttccctctctctactccccgctctctctctgtctcctgttttcctttctctctccctctccccaacctactttctctcccctagtctctctcccctcatatatgtgaacacacacacatccctgtatgtgtatatatcacatgcatgtatatgtatgtatatgggtggtttacctgaaccgtttgtaagttgaaggcattaccatactaccccgaaatacttcattctcttacacaaccacaacacaatcatcaaaatcaggaaacttaacttcgctgcagttatcaaatccagttgactttggcaggtcgcccctgggtcctgctgattggctcgctaaccgggccctggcaccaccatggcctctgctggggtggcccccaggcacagaccaaggacgcaccacctccactggcaaccgcagcagttgcctgccctcaggagggaggaaaggaacaactccttttcactttttttttttttttttgagacagagtcttgctctgtcgc

SEQ ID NO: 1243720 - DNA, 4001 bp, Homo sapiens
acctctcttctatatgctatatatttctagtagaggggatctggatgcactggtgatgtgaaaactgcatgaaaataaactacacaactcacatgctatttggatcttttgtatgtaaaagtgacactgcaaaatgtgtaagacctgacctgttccctaacgggtcactgcaatctaaactatgtaggaccactgtgacattactaactggatcatctgtagcctgagagcccacaccactccaagcactttcttctaaagcaaaacattaattattgtaaggtcttgactttttccttaacatttaaaaaatcaactttattcaggtataatgtacatacaataaaatgtactcacgttaaatgtgtgctttgtgagttctaaccgactctaaacaagcactgatgtgcttcctgtccgtatagatagactggggggtcgtttttaagtatagaaagactttaaaaaatccgtttagtacaattttgttgtgagaatgtgctccttatttagattgctggatatccaatctttcactatacctgttttttctgagagtggtgctagaaagcagatagcaaaacgagacttcttgaccagcaaggcatgagaacagaacttttttctgtattacaaactgatctactggtgggaactgagcccatcagcacattagcttcagttgtaaccaagaagcatatttaaaagtaacatctgatgacattttaatgtaattacattgtatcttttctatttcatagtatagggccttcagggcatttctggggagtcctccaaagatatgaacattttcacatgttctgttttgtgaccaagaccatacatctccaagacacgggctacaaaccacacagcattggaacataatatagtcaattacactcaaacgtatactcatggacatgtcacttttgtactctaaccgcatgtactaacaagccacagaacagcaaaacaaaccacatgggtaatgttcttagacctgcctgtacctgtgcctcattctttacgaatttacgaccagttctttcagtacgaatttaagaccactcttaaataagacaccaaaatgggacgctgtcaggaaggtcaaggaacgtatgggagaagtggaagcccacacctgagctcttctggttggtgattggcttgccctcctggggcacggcgtgctggaacacatgctgcgcgcgctgcaccgtggcccgcttcagacagatgtccagcaggtcgtgggtggtcccgacattctgggcaagtacgaactgggggtcggaattcagtttctgtatcagagcagctaccttctccgaattcagtcctgttgggagaccaaacaggattttaacgcaaaaagagggggaaagggctgatctggggctcccgcgtcccgaatctaacttcgtaagcgcatcctggggtgcccgctgcagcggggaaacccataagcggcatcctcctccaaggagctgtctccctccaggccgatccagcctgccccgaaagctccctccccgccatcgccaagggtcccagcccccggccttccccgccgccgggcctcacggggaccgcggagctcctccagaggaccgcggcgggggacggcggcacctcacccgagctgctcatggcgcccacgctgcccggcggggtaacggtagcttccagggtccttgggcgagcgccgggattgcgctgcggctcgctgcctagggggcccgacctgtctctcgcacccggagcgccggaaaaaggaaaccggctcggcggcggcggcggcggcggcggcggggaggctgaggctgggagaaacggggtccgcggagggacaaaactcccccctcgcgttgctgagtcagcgccgtcggggctggccccgcccgggggagggccgacgggggcggcctagctgacgcgctgggtccgccagcgcccgggggctgaggccgcgcctgcccccgcgcaggaccgcacagatggtctgcgcgccagggcggcgccggcgccttctccccctaggttcccgcctccgggccgcgcgggcgccctcccgggatcaggcccgctccaaggagggaggctgacgggttccctgtgggcccagacccccagtactctagcatcggggaatcgtccccaggaagccttgtgagaagccaaaagggagctcgaggcgggagggaggagctgagaggtcccataattaagcgtcgggcttaggacgggtcgatatgtcacaaggaatgcacccgaaggctcttcctataggcttcgtttgctgaccaatcactgcattctcaatggcaacttgttgcttggattctcatcagaagcaaataattgtctttgagggggaatgggaaccaagctcttccccacccactccaaagctactaccagagttctacaaatagacatctgctcatttcaagaacactacccatctggtcttcacggagtccacgagtggctcctgtatagtccagcatgtcccgttgggtttaactcaggaggatgacagaggctagccgtatgcatcaatattgtttcgccgagttctctacaaaactaactgatgctccccctctaggctttcaagataactcaacagtttcccaaagttttgagattgtaaaaaccttgtttttgttgattccgtgtttcatgccctgaaatctcagcccttagtaagatgctgggatagaacccacagagagtaaaacaaaaacactgaaaccctgtatctgctattcaaaacgatgaggttgagtgtgtgtgtgtgtaacctagaatctaggtcttcttagattgaaaatcatcgcagttctaaggaactctgatatctggaaaaatccatactcaggcaccaatcagtcatttgagaaagcacggtttctatgtccctagagagactcggctaaaaattggggctataacatagcaactatcttaagtgggcccatcaaccatcctattctgaggttctttcaatatctgaaaaagaagaggctgaaaattatacagaaagaaatcactggtcctttcacaaaatgatgttcaagcatcctgcccaattcaagtcataaatttttattcagtatctaacatgtactaggcactggacaaactgctgatgacatagagacgaacaaagcttaatcttgccgttaagaaactcaatgtagtaggaaagagatgcaaaacaacttttagactatctgtagtagcataccaatagtgctgtagactgtagaagcaatgaggagagcactgtcaattagggccaaagggtgcctgaaaatagaagtgacaagagagcatgatcttgaagagtggatgagatttttacaagtcaaagaacaggagaagggcattcaaggcaccagcgaaggcgcagtgaataaaatcatgttcaagaaagggtgcatcataatcggatgtggctaagagcaaggcatgttttgggagcagaggcaaggtgtaggactggaaaagttttgtaggtttgggccaagatataaagggttttatgttcaatgcctgagcatctggactttatcttatggttaattagaagacaaaatgggttttgaaacaaaggaaaaatatgctcaagtctgtgtaaaaaaagaaacctggtggcagtggggagagtaatttggaggggaggggctctggagatagggaaactggttagaaggttcttccagtagtgaacttgggagaggacaaaagccttacattgcggaaagggaagaggcattgataatcttgaagttttcagcggaataagaagatggaaggtggtgtcattaaccaagagagggcatacagaaaaataggcatatttgcatatttgcaagtgtgcagatctgaactgagtttgggccatagcaaaattaggatgccccacaggacacccaggaagagaagttcaggacgtagatgaaaagatgtctagagattagatgagacac

SEQ ID NO: 1243721 - DNA, 4001 bp, Homo sapiens
ttctactaccctagtctctctgagaaagacatgacacaccttacttcaacgaaaaaaaaggtcttttttcctcacaaatattttctcataaactttattttttaaaggcttttaaaaccagattctaatttaattaatctagatttgcaaaattataaaggaaaagtcttgccggttgttgctttggttatgttaatttcacaatttagtaaattgtgactatgtacaaagcagccttttgcggggggccgggggtgtttcaccaaatgcatctcggcaccagcctagagaaactttctgtgagaaaacagaagaggggttaccatggagaaattcattacggatttcgggagggctttttcctcagaaatagagtgaaaagaaaaagtcgttgtgtaataaatctgatactgatgccgtgtgacttagaagttgttccagaagttcatcttcggcaattatgtctagatgatcaactacatatcttctgcaacaggtgacacgaaactgcatttcccaagcaaggcaaagcgatcaaatgagttaagacgcgcgttcctgtagttttgtacttttatttttgatttaaccaaaataattctgaatcggatgaataaccaaatttggttgggtcttgtttggctttctgcgttgctttttaatcagccatttaacagcaactgttgcacgggcccattagcactcgaagaataaaaacaaacacacaggaccagataaggttcccctactaacccaaatgatccgtttccttaacacaattttaaaaccacagctaggggtgtgaaaacgcatttttttgtgcgtgtttgtgtaccacaatctgtccaaatccttaattcccttttaagtaacagatatataataaaaatccgaaagaaaccacattagaaatgcaaagaggtttgcaaaacaagaggcttctttcattccagaaaaccacaccaaaacaaggggagaaaaatgaatgcaatggatatgtgtttgccaaagtttcaatcctgcccggtggagacactgcactggcacaaattttgaagaggaaaaaaagggggttgggggggggagagagagcgagcgagtgtggcctgcaaactgcaacaatgcaatctccattttgaacaatgcgcctctttcctcttgtaaatctagttttttgccacttgatgtgccgtcgcatttcccctctgtttgggggggaggcggggttggggggagatcggagcaggatgcacagcacacgagtgagcaaggggggagggcagaggaggtggggaaggagtctgcagcaactgggctgggtgggtacctggagtgctgctgtaggtactatggctcctgaagctgctttccgtgcagtaactggcgtcgtcgtcgtcgtcttccatctcctccggataatcggagtcatcgtcgtcctcttccatctcatcctcctcgtcgtcctcagaatcctgggtctcctcggcgtcgccgtcctcctcctcctcctcctcggagaccatgtcctcctcttcctcctcctcctcgctctcgtggtcatcgtacaccactttgttgacggccctccgggccgcggtggtccgggccaggtggccgccgccgcccccgccccccgtcctgccgcccccgcctcctcgccccccccggcccggggcgctggtgctggggggggccggcggcggcggcggcggcttcctccggctactgctgccccccctgggcgagctcagccgcgtcttgggcgccacctcagcctgggcggcggcccacctgccccggctgctgccgcggtgccgcgagcggagccccccgatgggtccggacgtgggcggcggcggcggtggcggcggggccggggcgcagcgctccgcagcgggagccgcgggctgcttgggcggcctgccccgccggcccctcatgtcggagccgaggcggggggagaaggaaagcgaagggggaggggcgggcgcagggggggcggtggggagcgccggggccgggtggggaggcccgcggggccgggcgggaggggcccggccgacggaagcgggtggagggagaaggctcaatccgaattgctggggccccactccggatcgccttcagccgccatcttgtttcttccctctcgctcggtgactgggggaaccgacagcggccgcaggcccagagcgcggtcacgtgagctgcgccgccgacgagcctgggacggagcgaagcggcgcggcggccgctagggggagcgcgggagcgtcgagtcgggggcggggagccctgggcgcctgggctcggcacagcgcggtgcggctggactccgggcgcgggtggcgcggcaaaactccgggcgcaggtggcgcggctgagaggggcgcgcagctcgcgaaatgcccggcgtcaaaggccttcggagaccaaagtctccgcggaccgctggctggagcccaaagccggccggacctcctccccgcgtctcccctttcgcggctcggagaggaaggcaagggagcccccaaatatcattcccttccctccccctatggaaactgatgctgaaagagccagcgagagaaagaaaaaaaaaagtcgcggagaggggcggcccaagcgaccgagggcaccgggcagcgccagcgacagagggaaattagtcgaggggacagagagacaagccccctgaacttaggaaactctgaagcatggagctggagtccagaaaatgactccaatgacaactgctccggatctgtgccaggagccacgccccgggctgccacgcccggagggaggggcgccctaagacctgtagcgtggaatccgcactgggaaagcctcagtaaactccagaacgcaactactgcacgttccaatgtcccgccaccttcccagtgccccagctaggacttcgatcacctcagcaagaacttacctctcctttgcagtggaaaagagggaatcctgcctaaaacctacttcacggtgttaaatgtttgtattatcgggaaataaccttaatttattgacctgacaagtcactaggtttcagcttagcccaaaggacgaatcatgatgacatttcaggcaccctcaaaccttatcacagcgactcaaccctgagtggttgaggtcagctctttagataagagaaaggtgttataaacatatgaatatttattgagagaagtgacaaccgaaaagtaatttaaagaaaaatagttggccgggcgtggtagctcacacctgcaatcccagtcctttgagaggccaaggccggatgatagcttgaggtcaagagttcaagaccagcctgggcaacatagcaggacctcgtctttagaaaaaatttgaaaaattagccgggcatggtggtgtgcacctgtggtcccagctagcgagaggctgaggtgggaggattgcttgagcctgggaggtggatgttgcagtgagccgtgattgcaccactgcactccagcttgggtgacagagcaagaccctgtctcaattttttttaaaaaagatgctgggcgcggtggctcacgcctgtaatcccagcactttgggaggctgaggagggcggatcaccagggcaggagtttgagaccagcctggccaatatggtgaaaccccatctctactaaaaatgcaaaagttctgtactaaaaatacaaaagttagccaggcgtggtggtgcgtgcctgtagtcccagctactccagaggctgaggcagaagaatcgcttgagcctgggaggtggaggttgcagtgagccgagatcgcaccactgcactccagcctggcaacaaagcaagactccgtctcaaaaaaataaaaataaaaatatctaacagaattctgcataccaaatggcttatttcagtcttgttaggaaaatggaacacatatgtgaaatgaaaattaaaatacaagcactaattgccagagaaatgcattcaatacaatttggtcgagctctaagggtgaca

SEQ ID NO: 1243722 - DNA, 4001 bp, Homo sapiens
ggattacaggcacatgccactacgcccagctaatttttgtatttttagtggagagggggtttcaccatgttggccaggatggtctcgatctcctgacctcgtgatcctaccaccttggcctcccaaagtgctgggattacaggcataagccaccgccctcggcctcatccatgattttattttgccatttcaagtgatggagcttgttttagagctggaagaaaagccaaaatgccagttaatctaaactagattcctgccccagtgcagaaccaatcaagacagagtccctgtctttcccggaccacaggatttgtgttgaaaaggagaggagtgggagaggcagagtggatggagaacaaggaatcattttctatatttttaaagttcttcagttaagaaaatcagcaattacaatagcctaatcttactagacatgtcttttcttccctagtatgtaaggtcaattctgttcatttgcataggagataatcataggaatcccaaattaatacactcttgtgctgacttaccagatgggacactctaagattttctgcatagcattaatgacattttgtacttcttcaacgcgaagagcagataaatccatttctttctgttccaatgaactttaacacattagaaaaacatatatatatatctttttaaaaggtttataaaatgacaacttcattttatcattttaaaataaagtaaatttaagatttggaaggttttagaataatacaaaccaaagaactaatgacaacgtcctttatttttaaagattctagaagttgctttttgtaattagacaacataaattctgaattttttcacatattgctgccaaccccttgggtcttttcctttctccaagaaagagaaagctacagaggagtgactgaccgggtaggtggtggtagccttagctttctccaatgtttctggttgttttctttttcttgcataaaaccaaaatcaacaacgaccaaaccaacaccaatcaaggcctccccgcccctaacctttcccagtgacctgctctcatctctggatcctcctcaagcacatccctgccggcagcatctgttactactgacgctcctctacttccctcttgcgctttctcaatggcgcaaatggatccagttcttaagttctccctcccacaaaatcctgtctcctccccttcccagacatattcctggcacctcttcttccacaaggtcccatcctctcatacataccagccggtgttttttgttttgttttgttttgttttgttttgagacagtctcgctctgtcgcccaggctggagtgcaatggcgcgatctcggctcactgcaacctccgcctcccgggttctagcgattctcctgcctcagcctcctgagtagctggagcggcaccacgcccggctaatttttgtatttttagtagagacggagtttcaccacgttggtcaggctggtctggaactcctgacctcatgaccagccgacgtttttaaagacatagtgtccccctcaaggcatattccagttcctatcacgaggattcccccacggacactcagtgcccccttcctgatcctcagcgcttccctcgcgacctacaaactgcccccctccccagggttcacaacgccttacgcctctcaggttccgcccctaccccccgtcaaagaatacccatctgtcagcttcggaaatccactctcccacgccagtaccccagagcatcacttgggccccctgtccctttcccgggactctactacctttacccagagcagagggtgaaggcctcctgagcgcaggggcccagttatctgagaaaccccacagcctgtcccccgtccaggaagtctcagcgagctcacgccgcgcagtcgcagttttaatttatctgtaattcccgcgcttttccgttgccacggaaaccaaggggctaccgctaagcagcagcctctcagaatacgaaatcaaggtacaatcagaggatgggagggacagaaagagccaagcgtctctcggggctctggattggccacccagtctgcccccggatgacgtaaaaggaaagagacggaagaggaagaattctacctgagtttgccataaagtgcctgccctctagcctctactcttccagttgcggcttattgcatcacagtaattgctgtacgaaggtcagaatcgctacctattgtccaaagcagtcgtaagaagaggtcccaatcccccactctttccgccctaatggaggtctccagtttcggtaaatataagtaataaggattgttgggggggtggagggaaataattatttccagcatgcgttgcggaatgaaaggtcttcgccacagtgttccttagaaactgtagtcttatggagaggaacatccaataccagagcgggcacaattctcacggaaatccagtggatagattggagacctgtgcgcgcttgtacttgtcaacagttatggactggagtgttatgttttcgtattttgaaagcagaaactaggccttaaaaagatacgtacaactctttagggagactacaattcccatccagccccaggagtctggggcaagtagtcttgtaaggtcagtggcctgcggggacgcagtgagcgccgaatttgcctggggcaggggaaatgcgctctggcccatgtctgcgcactcgtagttccacccctcagccccagtgtttgttatttttcgggttcagcttgcttttgccccgtctccgtcgacgcaatcgccaccagtcaatggggtggtcgttttgagggacaagtggtaagagccaatcttcttggcgaaaacgcggagaaacgggactagttactgtctttgtccgccatgttagattcaccccacagagatagcggcagagctggcagcggacggtctttgcattgccgcctccccagggggcgggaagctggtaaggaagcagcctgggttagctaggggtggggtcacgtcacactaagagggtttggagaagttcaagggaggaatcctgcaaagaagaggggcgactttttccgtgtctccggacagctaatcgttttagtgacaggatgagagagcccttcgtgttctgagggaccgagtgggcgaaaagcgccggagagttggagagtctgtggttcagaatgcgaggtgacaacgtgctagcagccctcgctcgctctcggcgcctcctcggccttggcgtccattctggccgtgctggaggagcccttcagcccgccactgcgctgtgggggcccctctctgggctggccgaagccagagccggctccctctgcttgcggggaagtgtggagggagaggcgggtgtgggaactggggctgcgcgcagcgctcgccagccagcgcgagttccaggtgggcgcgggctcagcgggccccgcacccccggccccgggcagtcaggggcctagcacccgggccagcagctgcagagggtgcgccgggtcccccagcactgccggcccgcctgcaccccgcttgaattctcaccgggccccagccgccctgcacagggcaaggctcaggacctgcagcccgccatgcccgagccccctcccaacccctgtgagctccagcgtggcctgagcctccccgacgggcaccgccccctgctcctcagcgcccggtcccatcgactgcccaagggctgagaggagtgcaggcgcccggcacagccctgcgcaggatccactaggtgaagccagctgggctcctgagtcagatggggacttggaaaacttttatgtctagcctgaggattttatatgcaccagtcagcactctgtgtctagcttggggtttggggatgcaccaatcagcactctgtatctagctaatctggtgggcacttggagaacttctgtgtctagctaaaggattgtaaatgcaccaatcagtgctctgtgtctagctcaaggtttgcaaatgcaccaatcagc

SEQ ID NO: 1243723 - DNA, 4001 bp, Homo sapiens
tgattctcctgcctcagcctcctgagtagctgggattacaggcacatgccactacgcccagctaatttttgtatttttagtggagagggggtttcaccatgttggccaggatggtctcgatctcctgacctcgtgatcctaccaccttggcctcccaaagtgctgggattacaggcataagccaccgccctcggcctcatccatgattttattttgccatttcaagtgatggagcttgttttagagctggaagaaaagccaaaatgccagttaatctaaactagattcctgccccagtgcagaaccaatcaagacagagtccctgtctttcccggaccacaggatttgtgttgaaaaggagaggagtgggagaggcagagtggatggagaacaaggaatcattttctatatttttaaagttcttcagttaagaaaatcagcaattacaatagcctaatcttactagacatgtcttttcttccctagtatgtaaggtcaattctgttcatttgcataggagataatcataggaatcccaaattaatacactcttgtgctgacttaccagatgggacactctaagattttctgcatagcattaatgacattttgtacttcttcaacgcgaagagcagataaatccatttctttctgttccaatgaactttaacacattagaaaaacatatatatatatctttttaaaaggtttataaaatgacaacttcattttatcattttaaaataaagtaaatttaagatttggaaggttttagaataatacaaaccaaagaactaatgacaacgtcctttatttttaaagattctagaagttgctttttgtaattagacaacataaattctgaattttttcacatattgctgccaaccccttgggtcttttcctttctccaagaaagagaaagctacagaggagtgactgaccgggtaggtggtggtagccttagctttctccaatgtttctggttgttttctttttcttgcataaaaccaaaatcaacaacgaccaaaccaacaccaatcaaggcctccccgcccctaacctttcccagtgacctgctctcatctctggatcctcctcaagcacatccctgccggcagcatctgttactactgacgctcctctacttccctcttgcgctttctcaatggcgcaaatggatccagttcttaagttctccctcccacaaaatcctgtctcctccccttcccagacatattcctggcacctcttcttccacaaggtcccatcctctcatacataccagccggtgttttttgttttgttttgttttgttttgttttgagacagtctcgctctgtcgcccaggctggagtgcaatggcgcgatctcggctcactgcaacctccgcctcccgggttctagcgattctcctgcctcagcctcctgagtagctggagcggcaccacgcccggctaatttttgtatttttagtagagacggagtttcaccacgttggtcaggctggtctggaactcctgacctcatgaccagccgacgtttttaaagacatagtgtccccctcaaggcatattccagttcctatcacgaggattcccccacggacactcagtgcccccttcctgatcctcagcgcttccctcgcgacctacaaactgcccccctccccagggttcacaacgccttacgcctctcaggttccgcccctaccccccgtcaaagaatacccatctgtcagcttcggaaatccactctcccacgccagtaccccagagcatcacttgggccccctgtccctttcccgggactctactacctttacccagagcagagggtgaaggcctcctgagcgcaggggcccagttatctgagaaaccccacagcctgtcccccgtccaggaagtctcagcgagctcacgccgcgcagtcgcagttttaatttatctgtaattcccgcgcttttccgttgccacggaaaccaaggggctaccgctaagcagcagcctctcagaatacgaaatcaaggtacaatcagaggatgggagggacagaaagagccaagcgtctctcggggctctggattggccacccagtctgcccccggatgacgtaaaaggaaagagacggaagaggaagaattctacctgagtttgccataaagtgcctgccctctagcctctactcttccagttgcggcttattgcatcacagtaattgctgtacgaaggtcagaatcgctacctattgtccaaagcagtcgtaagaagaggtcccaatcccccactctttccgccctaatggaggtctccagtttcggtaaatataagtaataaggattgttgggggggtggagggaaataattatttccagcatgcgttgcggaatgaaaggtcttcgccacagtgttccttagaaactgtagtcttatggagaggaacatccaataccagagcgggcacaattctcacggaaatccagtggatagattggagacctgtgcgcgcttgtacttgtcaacagttatggactggagtgttatgttttcgtattttgaaagcagaaactaggccttaaaaagatacgtacaactctttagggagactacaattcccatccagccccaggagtctggggcaagtagtcttgtaaggtcagtggcctgcggggacgcagtgagcgccgaatttgcctggggcaggggaaatgcgctctggcccatgtctgcgcactcgtagttccacccctcagccccagtgtttgttatttttcgggttcagcttgcttttgccccgtctccgtcgacgcaatcgccaccagtcaatggggtggtcgttttgagggacaagtggtaagagccaatcttcttggcgaaaacgcggagaaacgggactagttactgtctttgtccgccatgttagattcaccccacagagatagcggcagagctggcagcggacggtctttgcattgccgcctccccagggggcgggaagctggtaaggaagcagcctgggttagctaggggtggggtcacgtcacactaagagggtttggagaagttcaagggaggaatcctgcaaagaagaggggcgactttttccgtgtctccggacagctaatcgttttagtgacaggatgagagagcccttcgtgttctgagggaccgagtgggcgaaaagcgccggagagttggagagtctgtggttcagaatgcgaggtgacaacgtgctagcagccctcgctcgctctcggcgcctcctcggccttggcgtccattctggccgtgctggaggagcccttcagcccgccactgcgctgtgggggcccctctctgggctggccgaagccagagccggctccctctgcttgcggggaagtgtggagggagaggcgggtgtgggaactggggctgcgcgcagcgctcgccagccagcgcgagttccaggtgggcgcgggctcagcgggccccgcacccccggccccgggcagtcaggggcctagcacccgggccagcagctgcagagggtgcgccgggtcccccagcactgccggcccgcctgcaccccgcttgaattctcaccgggccccagccgccctgcacagggcaaggctcaggacctgcagcccgccatgcccgagccccctcccaacccctgtgagctccagcgtggcctgagcctccccgacgggcaccgccccctgctcctcagcgcccggtcccatcgactgcccaagggctgagaggagtgcaggcgcccggcacagccctgcgcaggatccactaggtgaagccagctgggctcctgagtcagatggggacttggaaaacttttatgtctagcctgaggattttatatgcaccagtcagcactctgtgtctagcttggggtttggggatgcaccaatcagcactctgtatctagctaatctggtgggcacttggagaacttctgtgtctagctaaaggattgtaaatgcaccaatcagtgctctgtgt

SEQ ID NO: 1243724 - DNA, 4001 bp, Homo sapiens
ttataaatcttgtatcgctctgaaaacacaacatacattttccttaatctgattaacttgacttcaaatatgaaaaacaactttcataaagcagaaaagaatttacccttttttattgtgggtaagaggcaatggtacaacttttcaacttattttttgaatgttactcactactaaccatcaccatatttaaaaaaattaaagaactaatttagtttagtttattatttatttgacaaatgtttattgagtggcaactaggtcccaagtaccgttctaactactgaacatacagatgtatgtaaacaaaacaaaaatcccatcctggagtttacattctgtgggactagagataaaaaatggatacattacatagaatgtcagctagtaatcagtgttatggagaagcagcaggaatagaagataaagtgtgtgctgggggtgtggtaattttaaataggggtgtctggaaatgaaaaggtggtatttcaatcaagatttttagaccatggctgggtgcaatggctcaggcctgtaatcccagcaccttgagaggccaagggagggtagatcacttgaggtcaggagtttgagaccagcatggccaacatagcaaaaccctatctctacaacagaaaaatacaagaatggctggacgcagtggcttatgcctgtaatcctagcactttgggaggcccaggcgggtggatcacaaggtcaggagatcaagactatcctggctaacacggtgaaatcccgcctctactaaaaaagaaaaaaaaatacaaaaaattagccgggcgtggtagtgggtgcttgtagtcccagctattcaggaggctcaggcagaagaatggcatgaacccgggaggcagagtttgcagtgagctgagatcgcgccactgcactccagcctgggcaacagagcaagactccatctcaaaaaaagaaaaaaaaatacaaaaattagctgggcatggtggtgcacacctatcgtccctgctactctggaggctgaggtgggaggattgcttgagcctgacgaggttgaggctgcagtgagctgtgatagcaccactgcactccagcctctcgacagagatcctatataaaaaaaaaacctctgcatttcattgtatgtaaataagtatgtaatttcattgtatgtacagagccagtttcaaacaaaggttcttccaaatacctatcctctcaacgacaccgatcatccatgtttttttttttttttttttttttttgagatggagtttagctctgtcgctggagttcagtggtgccatattggctcacagcaacatctgcctcctggttcaagtgattctcctgcctcagcctcctgagtagctgggattacaggcacatgccactacgcccagctaatttttgtatttttagtggagagggggtttcaccatgttggccaggatggtctcgatctcctgacctcgtgatcctaccaccttggcctcccaaagtgctgggattacaggcataagccaccgccctcggcctcatccatgattttattttgccatttcaagtgatggagcttgttttagagctggaagaaaagccaaaatgccagttaatctaaactagattcctgccccagtgcagaaccaatcaagacagagtccctgtctttcccggaccacaggatttgtgttgaaaaggagaggagtgggagaggcagagtggatggagaacaaggaatcattttctatatttttaaagttcttcagttaagaaaatcagcaattacaatagcctaatcttactagacatgtcttttcttccctagtatgtaaggtcaattctgttcatttgcataggagataatcataggaatcccaaattaatacactcttgtgctgacttaccagatgggacactctaagattttctgcatagcattaatgacattttgtacttcttcaacgcgaagagcagataaatccatttctttctgttccaatgaactttaacacattagaaaaacatatatatatatctttttaaaaggtttataaaatgacaacttcattttatcattttaaaataaagtaaatttaagatttggaaggttttagaataatacaaaccaaagaactaatgacaacgtcctttatttttaaagattctagaagttgctttttgtaattagacaacataaattctgaattttttcacatattgctgccaaccccttgggtcttttcctttctccaagaaagagaaagctacagaggagtgactgaccgggtaggtggtggtagccttagctttctccaatgtttctggttgttttctttttcttgcataaaaccaaaatcaacaacgaccaaaccaacaccaatcaaggcctccccgcccctaacctttcccagtgacctgctctcatctctggatcctcctcaagcacatccctgccggcagcatctgttactactgacgctcctctacttccctcttgcgctttctcaatggcgcaaatggatccagttcttaagttctccctcccacaaaatcctgtctcctccccttcccagacatattcctggcacctcttcttccacaaggtcccatcctctcatacataccagccggtgttttttgttttgttttgttttgttttgttttgagacagtctcgctctgtcgcccaggctggagtgcaatggcgcgatctcggctcactgcaacctccgcctcccgggttctagcgattctcctgcctcagcctcctgagtagctggagcggcaccacgcccggctaatttttgtatttttagtagagacggagtttcaccacgttggtcaggctggtctggaactcctgacctcatgaccagccgacgtttttaaagacatagtgtccccctcaaggcatattccagttcctatcacgaggattcccccacggacactcagtgcccccttcctgatcctcagcgcttccctcgcgacctacaaactgcccccctccccagggttcacaacgccttacgcctctcaggttccgcccctaccccccgtcaaagaatacccatctgtcagcttcggaaatccactctcccacgccagtaccccagagcatcacttgggccccctgtccctttcccgggactctactacctttacccagagcagagggtgaaggcctcctgagcgcaggggcccagttatctgagaaaccccacagcctgtcccccgtccaggaagtctcagcgagctcacgccgcgcagtcgcagttttaatttatctgtaattcccgcgcttttccgttgccacggaaaccaaggggctaccgctaagcagcagcctctcagaatacgaaatcaaggtacaatcagaggatgggagggacagaaagagccaagcgtctctcggggctctggattggccacccagtctgcccccggatgacgtaaaaggaaagagacggaagaggaagaattctacctgagtttgccataaagtgcctgccctctagcctctactcttccagttgcggcttattgcatcacagtaattgctgtacgaaggtcagaatcgctacctattgtccaaagcagtcgtaagaagaggtcccaatcccccactctttccgccctaatggaggtctccagtttcggtaaatataagtaataaggattgttgggggggtggagggaaataattatttccagcatgcgttgcggaatgaaaggtcttcgccacagtgttccttagaaactgtagtcttatggagaggaacatccaataccagagcgggcacaattctcacggaaatccagtggatagattggagacctgtgcgcgcttgtacttgtcaacagttatggactggagtgttatgttttcgtattttgaaagcagaaactaggccttaaaaagatacgtacaactctttagggagactacaattcccatccagccccaggagtctggggcaagtagtcttgtaaggtcagtggcct

SEQ ID NO: 1243725 - DNA, 4001 bp, Homo sapiens
agattcctaactacaacagaaatgaaaatgtcaaatattgagacacgccttacaaagaaaaccagagaaccaaaactaagggagaaatctggaaacagaaactggaattaataaaagtataaacaaaacaaatggaaacaaaataatttcctagtcttataaatcacagcggtcaagagcatgtcttagagtctaacaaatctagatttgtatccttcactctgccaggtattagttgtgtgacttcgggaaagttagttaccttctctaagccacagtgactgcatgtaccccataggattgtggtaatgattaagtgaaataatgtgcaaatatgataaagtacataccagattaaacatgagctcttgtaacagttagatcagatgtaatcaacctacagaaacaaataagttcctgaggcctctctctctacaactccgtagcatcactctttctccagttcttcccctttgtgttacccctttctgcagtcctccagttagaagaaaaaagctgttgaccagaagtcaggaagcataggttctataccaggttttggtatactgcctggtatgttatctttgactcaggtatgttatctttgacatatctttttacttctctagtctaagatccttacctgtgataacccctaatttaatttaaaggctgttataagaaagagaatgccttggcacatagtaggcactcaaaaatgttatttgaagatcagtagagtattatagaaacaggatgggctttggagtaaggcaatcctaagtttgaattccactgtgtgaatcacttaacttctcagagcttgtttctccatatatggaattgaaatactactacttacctgacagggtttttatgaaaattagccagggcagaatgtacctaacccaggatctgatacagatgaggatcactttaatcctcacctcttctaaaccacttttcttaacctaggatccacggatgtaattcagagacaatgacctcttgaaattgcaagcataagtttctgtacatgattgcatttttctgaagaaaaagtccatagatttctcttcccgtaaatatatctcaaggaaatcaaaatagcgggggaaattacatgcactgttattaaataaggaattatttgcagtcgtgggaaaaaattgtaaattcaacctggggacgaagagatggttaaaatagcaattcaatagattatgaagccaataataacattcaccactgcttgtgtgctccaaaagaagaaccattattctagggtattttccagctctaacattttgcgattctatctgtaaagctctgagaatgaggtatggtggaatctaacctcttaatatgaatcaacaactcaacgctggcctagttactcagatataatctagaaatcagcccgtcctgtaccccggctgtggcaacaatagtgtcaaaatggggtagcttcccccaaacattgcataaaggataaacacacccctctgcctcccgccaagaattaacgcagcgcccgggctaagaacaggcctgcgctcaaaggaggtaaggataggctccctcctcaggttttctgccccgtatctccctcctcccccagccagttgagatccccgagaccctggtgatccagtcaccacccatgggcccgcaggctgtgcagaagaactcaagccctttccgtggacttccctccgacttgcctgtctggagggaaaccgaagcaacgctctgagctccgattcactgaagaaaaggaaaggaaaccgacttctgagagcaaataaagcggagccctggaagagaagaaagggcacgagcccttcctcctccctcttcctgggggtgctgctacttccccggccttgtgtgcaggactggggccgccgttacctttcctcgacccaccagacccctcaaccacacaacccgagacgaattcccgcctcccgccccctcgactcccagcgcccaatagcccagcgagctcgaccaatcacccgccaaggccaggaatcaaccagtcccggtgcgaggtgagggggcgagaacttcggcatccaatggaagtctccgaaaaaaaaaaaaaaaaacaagggctcaaggtacgcggcggaaggttgtcgccactccagcaaatccctagtgtttgtttaaagtagaaagtcgtctcagtttgacttttgaaaccggcgatagagtctatgcagcaaattccttggaaactggaagtctcattcttcacgtccgtagaccagcggaaaggaagtatctttaagctttgccaagttctttgagcatttatcagtgccactcaatttaaattacccagctttgcagtagccaggatagcgaagactcaggcgggaattgccagactgctgagccaaacttaagtaagaaggctctgtgacatcgggctacaatctatctttcataatattcaaggctttcccggatgctaaaataagccagagacaagctctcagggtctccagtatcagatcacttctacttccattaaggcttatccgccttccatccctcctaagaccagtttattatttgccagtagtactttaatttactcaaagaaaaggaggttcatcatgatcttgccaaatcatgttatttttttaaaaaatctgtataacctaaacttggctcaaataataatgtctccaaaaggcaaaacctcatactgtttctcaaattcaagtaactagtttggggaaggagtttgctgggaagaaagagcaggagggggctagttgatttgtttgcctcattgtcaattgtgatatatcttaccaaaaatgacaaaacttgtagtcataaaaataaactctaccctttgacctagtaatctgagctccagatatttatcctaaagacgtaatctaaacgaaagaaaatgtgataccgcaattgacaataatatctattggtaatactgaaaaaaattatgaacttcccagtctagtaatatggaggtggttatgacagatgaattcaatacattatgaagccaataaacttataaaaattaaacttgcaagaaaaaatcccatataaggttaagtgaaaaaaggcaaagcaaaccccaaactgggtgttagggattcagtaatgtgaaaatacatatgaatgagcaaagatgaagtaatttactgttaagacaatgaaaggaaggataatgtttaaaaataaatccttaaaaataccttcaaattgtcatttctcttttataatttttaaaacatcaactcttggccgggcgcagtggctcacgcctgtaatcccagcactttgggaggccgaggcaggcggatcaccaggtcaggagaccaagaccatcctggctaacacggtgaaaccccgtctctactaaaaatacaaaaaattagccgggcgtggtggcgggcgcctgtagtcccagctactcgggagactgaggcaggagaatggcgtgaacccaggaggcggagcttgcagtgagccgagatggcgccactgcactccagcctgggagacagagcgagactccgtctcaaaaaaaaaaaaaatcaactcttttgagtaactgctctagtataactactctcattttcctctcctaaattactaagagtttcaactggctctcaccttgcattgccatttaatgtatgtggcataacagaaagggatacacgtaggccctggagccatacagacctcgaatacagtcccttgaaccgttcccttcaggttaactctagtggaatgaaacacaaaaactacaggttcgtttgataaagaatatgaatgtttataaaccaatattcaaaatagctgcacacatctgttttcacttgaataaaaaaacacattgtgacaaattttataaccttaacttaaaatacatgaatattaacatttactaatatatttacacattttatttacatcatcaacaaatctgatgaaaaagagcatat

SEQ ID NO: 1243726 - DNA, 4001 bp, Homo sapiens
aagggatgcaggggtcactgtcatcccagtgatgtccggggaaatggacataacaacctctaagggcctgggcttccctgaccctgtaggtggaggagccgggggctgaggaagggatgaagccatcccctagtcttccgcgtccccacctgatgaacttgtcgaagacagcggcgcagtcctgtggctcctgcagcaccgcctcgctctggttacttagcagctccaggaacagctcactgtgcagtcccagcagcaggcggtgggcgtggaatacccggacctcatcggtgcccgcagcctgcacccgcagaaccacatcgctggcgttgccctgccgcagcagctcctgcaagcgctggagcaccgcctgggagtggttgatggaggtgccagctgcctccccgccaacatcggctctctgtgctgcagcaggaaggaacacagcatagcctgagaaggtgcccgggcccagaacctcagtcaggggtggagagggaccagctggagacatatgcatgggtgtgagcagagggcaaggtgggcctaggcgggttgtatgtgcatacctgtttgtgcccacgaggcgcgtggatgcatcggtgcacatacaaacgcaccctgggtgggaaggtcatgccaatgcaaaccccaagaggatgctcttggaagggggtgcattcaggcagggggaggttgtgctcaggtttaggacaacatgcccagaactcatctccatgctgccagccccccaggcaagggttgaggaaactcgtggtcccacccttctcacttcctaaagaattatccatctaaccccttggagcagtagtcagaagtggtgcattcactaacaaatatttattgagcacttactatatgctagacattctcctaagagcttgggatgtggcagtggacaaagcaagccaagttcttatgctcataaaagcacgaattgacatatcaaacgggtaagacacacacaaataagcactccagttttaaaggagccagccagggaaccagtgtcaaggcaggctccagccccgcaaaggcccttgaacggaatgggcctggggtactgggagcagagagagcattagggaggccacagcagtagcaggagagaggggcgggtgtgagacgaggctgcgggtgtggaagggaagctgttttccaggcccagccctgccctcttgggtcctgatctctgagacagaagccgattttctggggtggccagcaggggacaggagaaagtgcgaagggccagctggtgctggaatagaacttcctgggtaactgagcattgaggctggccaggccggccctttgcttatgctccaggatgccccgacagtcagatggggatatgcactcagttatagaaactgtcagcagctttcccaagccgagaacagcgaggggagcctcgcagagggaggcgggcgggggcctgattgcagcagatgggccgcagccacatgtgcacgcacagcacatgcaggcccgtggtgcacacaggagagaaggctcacacaggagcagagcatctgtgcatgagagagggaggccgagggacaaagggagggtgaaagagaagcgggtagtatgtttcccagcacggccttccccagctgtcactttgaaggacctgaatgctgatggcgtccccattcagcctctgcccaggacaatgggcaatggagggtcctcttgtccttaagagccctgcccacctgcctgccaggcccctccttccttcagacagatgagtccgtggagctgtccggtccaccccgtgctctccccagcagctggacaccgccccctcctggccggccgcgtgcagccagggctgggacgacctgccgctccaccctgccccgcacctggcccactgcccgctcacctgcatgggtgaccaggcccaccaaggtcagcatggcccagaagctgccccaggacccaggcttggagtagcctctcctaggcatctttatgctcagcccccaagtccactggagggacggtgaagcccagaccactctgctcacatccctcttccttatataggatccggcacaaggggacggcaccccccttcctgcttggcctccctcccccactcagcctcctccatggattggtggaaactggccccagctgttgcccaggcaaccacttaagccagagagcggcagccccgggggctattgtgctgcctgtgggcccccaaggggaacagatccggaaccctcctcccccaatctccttaccacccagcagggctagccgtgcctctccctggaaagtttcaggctctctgcagaataggcgaggggctccaggaccactggcagccattggcctgagggtccccagttccctcccccaaccccaggcctcggccctggcacagagcacacttggcagcgtcgtgcctggagcaccatggtgagccggctgcaaaggaagggcctggaagaggaaaggagaggcggctgaggctcccacccctcccccactcccattttggggtggggcagctcctcagagagaagctcagagatctctcgaataggggcccatgggcaactgatgtcagtttcatattctttgttgaagaaggttcctggaatgctgtggggagggtgatgggctggcaggaaagttctgtggggactgtgactgtcgcctcccccaggggcaagctgagccaggtggcagggctgggcatagagcagatgcaccctgccccgtgcaccactgcatgggtgacccctgcccagagcggggctggccaccttctagctctgcgctccagccagcccaaggctggggactgtctgccctgctatttcctgacttgaattctccttccccaagtggcctcaggtctctgggttcacctccttggaaggcttgttttaccagcttctgtcttatttcccactgtaatttttccttttccaggctaaggaggcatgctgcagacctggtgtttcactcccaatgtaaggaaactgaggcagggagctaggttgcagtctcagttgggttagtgcagaggagtgctcttctaaaaacaaaggcaacagagagaggaaagtgagtctggagctcagcaaaagcgcgcgcgcatgtgtgtgtgtgtgtgtgtgtgtagggtggcatgctgtgagtcctcacctttgcagggagccagcagggtctgccccagttcttcgtgggagggactcctttgagcttggctaaccgaagtgggtgactcccaagggatctgactccgaggcagggctctaggttggggatgaattaaatcttcctctccctggctctctggatcccaggggccagctcgatgcattgatttctgcctctggctggcacagagacccagcagctccaccccctctctggagccgcagagagagcaagaactgggtctggcacctgcctcgtccgggttggcagagttggagctctccagcccagcggaaacccctccagctgccctgagtttcatgcctggctcccctcgtccaaatccactatcccttgcccactggctgcccgcctgcccttcccatgggctgtaccatgtcctggctcaacccagcaagtccaagtctccatgcagcagggcagccctggtccctgagggcatcccagcttccaagcacagtgctttcgataggaatgttattgatgataagagaacccgctactcagaaaactgtcgtttgatatttgtgcctctcaactccagcctccttcagcctctgcatcagtcattctttgttttgttttgcttttctagaggcagaatctctcagtcaccaaggctggagtgcagtgacacaatcatagctcactgcagcctcaaactcctaggcccaagcgatcctcctgcctcagcctcccaagtagctgggacaaaggcagtgccaccacgcctagctaattttgtgtcagtcattcttgaagggtagcca

SEQ ID NO: 1243727 - DNA, 4001 bp, Homo sapiens
tggcatgggaaaggaccgaggacagcacctcagaaacccacgtcacccagccagagccttccctgtggaagcatccaccatccatggtccaaggagacatggagatgaaacggtttcccctatgtcccaggccttcagagaggagcagaggaggcctaggagaaggaactgtccagtcctccctgtccacatagacacccccaaacctggcaccctcctgctcctccctgatccttcccattcctacccatcttctcctccagggacatgcgagctcgagctcccactcccatccctccagactcccctgccctcccccaaagtcctgttccttccctcttctacaggagcctgctcacacccaccccaaccctgcctcagcccagcaccaagccccctcccctcaatctacttcctctgcactgattctctgtgcacctccacactccccctgtatcccccagcccctaaggacagacagactcatggaagaagagacacagacagacacactgtcaggaggaggcacagagagggacggggcagcagcagggccagatctagacagacaggcaaagagggtcagaaggacagacaaatgacgaaagaaatggagcccctcagatttctgctcgatgaagagaggacagatagccacagagatggacccacagacaggccaagagaggacaggtgggcattggggatgcatacctcgcctcacctcctggccaggctggaggacatggtgagagacccccaccttgcagaccccagccctccacagatcccttaccttcaggaaagcctccacttcctcatcctctggcctctggcaggcgggtccagagctggatgcttgctggcccaggctgggcagacaagcctctgctccttcagggtcagttccccccacgggcctggagctcccgtctcctttgggcttggaactctcctcagacctcagttcttgaagctgcagagctgccggaggagtatcagcgatgcttggggctgcactgctaggttcaccccctcgacctggagtccagctatgccaggtgggcagtgcccatggctccatggctccagggtccccaggccgtgggagggttgtcagttgctccatggtactgccaaggggccccagaacccgggccgggggacatcacccagccaggtggggggactggcgagggtcatgccaggccagcccctctcccctctgagctcttgcttcaccgacgctccatccaaggttggctgagctcttccccacccacaaaggaggctgcagaaggcgccagggctgctggagctggagccaggggtatgtgagctatgtttgctggtagctgtgtgtgtgcgcgagtatgtggaggagcgagggtgtccctgtgggggtagggaggatgtgcagaggccaccgacagctgcgcctgggtgagggtgcgtgtgtgtgtctccaggtctgtccgtgcaggtcaatgctgtctcatgtgttgggaagatgggtgcccccacttctgtgtgttgaggggggtggtgctgtgtgtcactgtctgcccatttcagagttgccagttgtttgtgtgtgtgtgtgtgggtgtctgtattgcagggctgtggcagtatgtgatgctgtccctggttgtatctgagtgtgtcagtgtcgtgcagctgtgtgcatcggtgtcgttgtgtgtctgtcagtgtctgtgggtctggccgtctgtcgcaacccctcagcccggccagaggcttcaggagctgctgggggtgatccccagtggtccgctgtggtcctttatctccggctctgctctctgctgctgctctttcgcttgctgggtggctgggctggtcctaaggaggcctgggtcgatgggctgcttgcctcatagtctcagcccctgctggcctctgctctggggactgcaggggtcccttacagtccaggagcctcgagatggtgggctccgaggagggctgagcctcagaattgggtgggggggtgagccgggaagagccagccctcccctcctcctcctcctcctcccctcccacccaccaataggaagtcggctgctggtttccatggtgatggcgctggactggtgggctgaaccggctgacagggtcggggacagaaggaagagcaggtttctcacggcatgtcagcccagggctcccacatgtggcctcccaccctcatcttcacacattctcacaccttccggagtacagaggcgagtggggtgcagatggtcctccctacatcgggtgagactgatagagacagaacgggggagggtatgacagagatccagccacagagaagggcagaactagaaaagatgggacttgagatgaaacaaagagagagacagaaaccaagagaaagaaaccgggaagacaagcaaagagacaggtagaaatagacggagaattccttctgcttcctcctggcagattgcacttggggggcaacctggctgtcccaggccaccagggaagcccacatggcctgttgggttggctttgtcccgaattgcctggaagttcatcttctgtctagccttagatcttgttgctaaataatttgggggacaaggacgtgagaatcccctcagccaggagtcagtctatatgcagtggcaggggtctagacagagtccccagagccaggggtgttgggagaagccccgagaggcagcccctctccactctgaacccgggactcattaggcaagccagtttcagccaaggtcgggggccctcgtgtggcacccccacagaatagcagcggtgatactgaaccctagagcccctgactgtgggctccacccaggcaagagccaatggaactggaggtagggggtgcatggggaggagtggacatcttcacttccctaaagcagtgtgtaggtcaacacgcacgccactgcatgatgtgttgctgtttaggtcagagtatatatgcatgccattatgcgcatgcgtgtgtatagtatgcatctatagaatagacattatctatttctgtatatgtgaaggggccattgtgtgtatatatgtgtgtgctattatgtgtctatgagtcacataataaaacgtaacaaaaacacattgggtgtatctgtatgtatgtttctgtgtcattgcatctatgtttgtttgccactgtgtctatgtgtgtgctgttatgtgcatgggaggctatcattgcatgagtttataaattacaacacatcatgatatatatagatatggatgctactatatggcacaatgtagtaattgattacacaatatatgacatgctcatatcgtcatgtaaatatgcataatgacatggtttgatttatatatatatatcaccatgtatctatgtattctatatttatcatgatatatgaacatgtctctatctatgtatgtgtatggagccaccgtgtttattatgcaaatgtcactgtatgtgtgtgctcttctatgtgtaagacacgccctatgtttctatcattgcatgtgtgtactactgaatatgtatgtgccctgggtgtgtgtaatccctgtgtgtgtcatgccagtcatgtcacatgtgtctgtgtgtgtgttactggcacactgaatggggcctctgtgtgtaaatgcatttgcatctcagtgtgtgctttgtatatgagtgtctgtgcccttgtctaagatgctgtgtatgtgccacagtggattttgcccaatttttatatgacctaggaccccctagactttcttagattaaaactggatgtaggcagctttcagtttgggtatgtaggggggcaggatagggccagagctagggtagaaggtgagaggatgccttacatccctgcccctttctgcagatggcccaggcccttctctcctccggctgtggcctggccaggcccagagccctcttctgatctcataggcagggccaaacccgtatcttctggaggagcgacagaggttct

SEQ ID NO: 1243728 - DNA, 4001 bp, Homo sapiens
gcccctgcttgcttttaactcctctcttccgttctgcttccatgtctatataattgcttctctctcactccagccacactggccttctttctgttccttgaacattcaaagctggttcccatccaccctttgtatttgctgttcttctgcctagaatgcacctgttccagatcactgttcattcacacatatctcagattacatgttaactaatcagcaaggccttccctgaccattttatcaaaagaagccacttacttccattctctatcacattacccatgtatttccttcatagtgctaatcacaatagaaaattgtcttgtttcatcattgcttgtctgccttttcaccagagtgtaagctccactagagctgggactttgccttttttactgctatagcccaagttcccagaatacagacagttcccaacttaagatggtttgacttatgatttttcgactttacaatggtacaaaagtgacattcagtagaaatagtactttaagtactcttacaaccattctttttcacttttagtacagtatgcaataaattacatgagatattcaacattttattataaaacaggctttctgttagatgattttgctcaactttaggtgttctgagcatgtttaaggtaggctaggctaagccatgatgtttagtaggttaggggtattaagtgcattttcaaattaccatattttcaacttacaatagtttcaacgggaggtaaccccatcgtaagtggaggaacatctagtgcctggcacagagccggttctcaataaatataactcttctccatcttcttcaaacctcaggccaggtttcagtgacctcctctcactttctaagattatttttgcttgctggtgggtttactgtcatttttaaccacatctaacctaccttaaaaaagtgtatggatgggggtgccaggtacaaagacttagcataaagaaaacgaccatttactttgaaacataaacaaaggccaattaataatttatgagtctgttccttgtccctcgagtttttagcaggcatggaatcattccacaggtcattatttcagtttggtctctgttcctaaggggtgaaggttttctgagggctgtggatcccaaactcacctggctcagaggctcaaacagcctctctttgtccatcaacccgatttagacagcatcctgggcctgaaaaccttctgtgctggcttcaagtgaaaatagttcactgggtcaaaagtaggctggtccaagacgcaggacggtcagtaaacgttggctgtgttcagaaactgcggcttggctgtttcttacattgatttatggtttgtttccatgaaaccgaaaatgattggtccacctggcagctggctggctggctggcaactggaggcctttctgtcctggctgagggccctggccccttggtggcctttgggaagcagcatctcatcgggccgttttttcgttctggcgggcggccggcttggcccgcggggtcgggctctccgcgcagtgcagagacgtctccaccctcagggacgaggctctgacgtggcgggaggtcgtttccgtgcgctgcgaggaggattccacgtgccgggaggacgcctcgaggatgcgagggagccgcttccccgagggggagagggagggcccctcgctgcggcgctgggaggtctccacccgccgggacgacgtctccacgcggtgggacgaggtctccacgcggaccgtggacgtctctgtgtagcgggtggtccccacccggggcgaagactgcttggcccctcgggctgaggccattctgccggcgtgagggggccagggaggcctcggggcaccctacagcccaatggtcaccgcaggcagaagagaggaaaactacggtactgccatagccgggagcgccacaacacgatgacgtggaagcaccatggtccttcgaaggctaaaacactggactcctgcccctcaggcgctcccacggcccgggccccgccccctcgctattttggagccagcgcgggtggagccatcccagggctggtcggggatgggcggagccgccccgccccatatcccacagtgccccgggaccggaagagggagccgtggtttccggaacttcgcccgcgtctctgggcttttgctctgtcaggctggtggcgttttggtgtcttcgtttgttatggccgctgctgtcgctatggagacaggtgagtagctctctgatcttggagtcttcgcagatggaactctccttgacccagacctcttccccgtggcctccttccaggccttactcttggcagggttaatatttggacagagaggagagaaggctcttgtagcgtctagaaagactaaggtactctttgcagttttcctgatttggtttgttcgcacatctttgctattcagacaccaccccaccagctccctggcgtgggtgagactaagggagaggacttgtgtgttaaaccgtgtcctccttgattggttttctgcttctcacatgagcttgcctaagtttgaaatatcgtcgccagacttgtgtatcattctgctactggtgcttctttttttttttttttttgagacagcgtctggctctgtcgcccaggctggggtgcagtggcgcgatctcggctcactgcaagctccgcctcctgggttcacgccattctcctgcctcagcctctcaagtagctgggactacaggagcccgccaccgctcccggctaattttttttgtatttttagtagagacggggtttcactgtgttagccaggatggtctcgatctcctgaccctggtgcttcttatatgcatgcgctgcatgatcttttaggctctccgcagtctcttgcatcctaagtttttctttactgattcagcccctagcgtttgcgaaacttaatcactgttaacagttgttacaacgcattattaaaataggggaagccacagttattacagcctaccttagtgatcactgttaaaattcctacatagtggcccacgagtggtaggaattctccgtttgtgttgctgttttctttgatgatttctctttaactttagagaaacttctaacttactccttttaatcagggctccgcttttcttagatttcgaaggaaggtttatctcctcccactcctagtttaggaagaccatctcaacattagtcaggtttctttattgctctttccttactacaaatcagtattatatacagtgacctttgttttccatgatttttgctgtcttgtctcctagatgatgctggaaatcgacttcggtttcagttggagttggaatttgtgcaatgtttagccaacccaaattaccttaattgtaagttgttaagcacctcattaaattgagtagctattaatgatttctgacagaagagttgcagttcaaaatagtatctacttttacacattctcagttgaatgacattacacttatgctggtatatagatataattgcgtactgggacttgtgttttgaatccaatgtgtgttggtggtgggggtgttatgtaaatagatcctttatattaggggtaacaaatcacagtttaaggattggtttgacctacagatttttttttttaatgcttttcagttcttgcccaaagaggttacttcaaagacaaagcttttgttaattatcttaaatacttgctttactggaaagacccagaatatgccaagtatctaaagtaagtttaatttttataatcctaagcatgtgtatactttattatataatagatttcttagtttcacattggcaaaaatgtatttggaatctctccacttctttttgttatcaccgtcttaatacaagacaccctcatctctaacttgtaacactgcagtaatctactccctggttatctgtgcttccacttttaccttcctgcccccatctccaccccaacccaaaccaagcaaaacagctt

SEQ ID NO: 1243729 - DNA, 4001 bp, Homo sapiens
aacttgaggctgaaactgtgttctctaaagatagcaggctgctccctcgccctttccaaccacaggcctcagtcttctccataagatgagcgaagtgcatgatgccaaatcacaccacaattgcaagcaattagaagcttagtgtctgccttcccctctagaaagttagttccatgaggacaagagctggttttgtcctgctcactgttgtacctacaatgcctgtgatgttggagatatgcaccatactactgtgaaagggagggacagagacagggagggaggaggagaaactgaatcacaaaggaaggtcacataagagctatggggtggggtgagatggggttgcagagagaagaattctatgtctgagtccctgcccaccctgaccagaacactgtgctatttccacagatggctgggagagatgcaacattgctgcccctcagaccctagcgtcaactgggaacatttgaggagaaaggaaatttgatccacaacacagggtaaggtgtgtcttgggctcagaaaagcaccttgtctcttccttctggccatgctcaggctccatgacccttctgatggggtgctgggcagggatggagggccctccctgcttccttcctcctcttcctgaagccctcctctgcctcaggaggtggatctttccccctttctcccccacacagagcctgattgctagcttgcttctcagggggttggtgaataagcccttgggtgacattaattgccatcaggcattaggggcctaatgagaataatcttctttgacgactccagcaccttctatccccagggcctccaagagctggccagctctcctcaggctgcacctccccccagctccagacagatgtaggggtgggggaagggccagagcagccctctacaggccccagtaccaagcgaggcagcaacagccagcagccagggaggaggaagccttccatgaaaaatgcaagcacattttccaaaaacaaaatgtcaccgtcctagatgaaaggaaactctcagggtcaagagggctagcatggagtcaggcagatggagggcacggtttgagtgccccagctggctttgctctgacctggccccacactctcactccagttgagtgcagaggtatggaagggtgaccctcaagatccatatcctccccagtagggatatgtccatgggattgaagaccctgtccctccagagcagggtaggattgaaattcaccctctggggattggagttgatacccaacgaagctataaaatcattgccatggatccgatgcctggttgacagatgaggtgtgaaggttgacttgccgggtctgatctaggttgcactctaatggaaagggcctgatggtgggaacagatatcactccagccacccctcccgctagtcagcaggtgcctgggtgagtatgcaagaggggcagttccccacccccacctcatgcctctttaaaggcttgctaaacaacctgtaggaaagcactgtcccctcctcttctccgtcttccttccccagcaacagaataaataggtttcccacagctgcgccccggacccatcccgcacgaagctgagccccagagcccccgcggcccgagaggagctgggcacagcagcgaggctgattcccagccagtgcccagcgaactctgggggtgggggtagggtgccccctacccgcgcctctggaagagcggctgcaaaacacctccggcgcccggtggggagcgtgcatcctttgaaaagggacatcagtgactgcggtggcgtctaccctggagaaacgcagctgagggaggtggaggctcctcccgccgcagctggccggccccattcgggtcccagcgctagccggcgttgggaaggaaaaatcaaacataaaataggggcgagcggaatcgcgaggtcggcccttggcccgagtctcattaaggagccgcgcgcgccgccaggctaggaatgcggaatggacacgtggacagaggagggggagctaggagtcggggagtctccgtggcgcgcgagctgtgggccgcgcgctcgggggccacgtgaccacggggaatctgggaggggtgggagtgagcgcgccaagctcggcgcccgcttctgcccgggtgggcgctgaatcccggacggaggaggagggcgggcgagcgcgagtgtgtgtgtctctctcgagtcatttacggcggagcagccggcgcgagcgccgaggaggcggcgacggcggcggcggctgcttcgtgcaactgtggcttcccccacctcctcttcctttttgctcctcgattcttcttcttcccccacacacgtccatggggagccggctcccctgccagcacctcctctcctctcggccccgtaggcaccagctgccgcttccctggccgcaagctgcgcaggtgccggctgccctggcccctggcgccgcgcccgcgtctcaccgcccgcagcccggactggcgcggcgatccgctcgcccaaactgactcggagggagcgggagccgatgcccggcagcatcgagacagcgggcgaacgggcgtccggggacagggtgggggcggcggggaggaggcgtcggagactctgaaccccagaaaagttcaaggtttgtgcaggttcccccagggaaggcgaggagcgaggcggggcagcgcgcctctctgccgagacagcgagaccttagcggggtggcccggagctgccgtgagctgcaggagcccctctgcatcttacagcgtttatggtcatcaagctggagtcgacgtcctgggcaggaagggctcggggcagggcgcattagccggctttctcgctccctcgcttctccaagccccatctacatggggcagcccgttctggccgcgccacccttgccccagccgccgagcggctgcctgggcaggaggcgctgagccggcctgtgtggagcctgggccctgatccagactggagaaagcgcgctggagcggaggagcgagccttgcgaggggacaaacatctggccgcccgcctcgggcatccggtctgggcgtcgcctagggtggtggcgaccggcgtcgccagtttcagcaccgcacggaaacttttccttctccagatggattaaagttgtctggattttctctttctttgagaaagacagcattcatttgcacctgacctgggatttttatgctgggctgctgcaggggcttggaggaagaaagcggcgctatccatgtgcggttactaccgaaaccgaggaaactggggattgcgttggaagtcggcaccctcgagtgagttcggattcgagctgggccgtgaggccgggagattcagcactgggctctaggtagcccccgggacgcccgcggccaccgggctccggactgcacgtgcagctccccccgcgcctcgcagatcctgcagggggcaccagctgggggaggtggaggctcctcccgcccggagctgcgcccccaccggctccgagggtgtagccgccagcgcctgggacgccccctccccgcaaagtgtccccgaattgcactctctggtcccggagctgcatctgagacagccgggcgccacggcagccctgagttggatgtgaccaagcccagcctggggccaagtcgtcgtcgactgttgctctctcggacccctcccgcccccgcctcggccatggccccggggatgtcgggccgcggcggcgccgccctgctctgcctctcagcgctactcgcccacggtaagtgtcgcggcgcggactgggggtgaggatgcggcaggcgccactggagggggtacggggaagactggggagaggagcacccacaccccctggactcgcagccgccactccgggtttggcgtctctggctgcagctcgagttaccgccagcccccgagccctccggcgagctcagctgaggggaccgagcccggcgccagaaaagggtggggggagggtgtcgc

SEQ ID NO: 1243730 - DNA, 4001 bp, Homo sapiens
tcacgaggtcaggagatcgagaccatactggctaacacagtgaaaccccgtatctactaaaaatacaaaaaaattagccgggcgtggtggcgggtgcctgtagtcccagctactcgggaggctgaggcaggagaatggcgtgaacctgggaggtggagcttgcagtgagcggagattgcgtcactgcactccagcctgggcgacagagcaagactccgtctcaaaaaaaaaaaaaaaaaattgttcctgggctgggcgctgtggcctgaaatcctagcactttgggaggccgaggcgggaggatggctggagcccagaagttcgagaccagcctggggaacatggtgaaacccggtctctaaaaacaatacaaaaattagccgggcatgatggcaggtgcctgtaatcccagctactggggaggctgagacggaagaactgcttgaaccagggagacagaggttgcagtgatccgagatcgcaccactgcactccagcctgggcaacagaaggagactccgtctcaaaaaacaaaacaaaacggctggacgcggtggctcatgcctgtaatcccagcactttgggaggccgaggtgcgcggatcacccgaggttgggagttcgagaccagcctgaccaacatggagaaaccctgtctctactaaaaatacaaaattagccaggcgtggtggcgcatgcctgtaatcccagctactccggaggctgaggcaggagaataacttgagccccggaggcagaggttgaggtgagccgagatcgcaccactgcactccagcctgggcaacaagagcaaaactccatctcaaaaacaaaaaacaaaaacaaaacaaacaaaaaaaacagccgggcgtggtggcgcgtgcctcaggaagctgaggcacaagaatcgcctgagcccggctggcggaggttgcagtgagccgagatggcgccactgcactccagcctaggagacagagcaagactctgtctcaaaaaaaaaaaaaaaaaaaaaaagttttccctggttttctcttccttaactgtggagccattaaacacctatgaatcggtggctcgagtaaatccatttgagaataaatcgtctaacagaggcagagtttactaaaggacctgcgatgtgtagcaatcgtagaaggaagcggagccagtcaacatcacgctgccgaagacgtcggttaacctgctgccggcgtcggcgccgaggttccaacagcgattcgcacctccggggaacgcgactttgggctgcagcacacgggaataggaaatatcagaaagtggtcacgagggtgacgccggagctgaaacggcccgacacctgttctacctcggctgttcggctcaattccgaaccctctcagaggacacgaatgtgggggcccgcgcttccagcctcgggattctcactctcccctcgggccccctgagtgctgaccccgaggggcgcccctccccggccaccgcctcagcgcgacggctgcctcccgggaatcgcggcgacccgcgctccgtccggcccgtccagtcagcccgcgccgcgccccccgcccgcccgccccgttcggcctccccaccgacgacccgcctctgccgccccgtctagggacgcgccccctcctcagcctctcctcctcgtcgcctcttgcaagtctggccgccccctggaccctgcccttcctcatccattacctcaagtccttcctccctcaggcctgaggggtgagggcgcgggcaggtgtctccgcgtctcacctccatggggcgccccccagcctctcctggactaggcacagctcctggggtacgggggtgatggggggggcgtccaggcccggctccctcagcccgcaccccgccgtctccgcagccgcctccgccgcccgggcgctgcctggagccagtgtgcgggtaagggaagtccgagcggggagggaggggcgggggcagaggccgttacctggcctgcctggggctcgcggctcggcacgcgacacggcacaggcgcgccccgccccgctgtgaggcccgcccctcccgtttcgcagcccgccattggtccgatgcccatccaatgggcgaccactccaggctccgttaccccccagagacaaggagaggaaggggcggttagcggaccacgctctctcgccgcttctgagcttttcccgctcaaagtaaatgtgttcgggattggcccggactggcaggcaccggcccgatgatttgctgatagggcagcggagaggccggtcgtggaaggttgaaagagctaaagagcgcagccctaccgggtgggagaggtgttggaggcacttggaagatttgagaagtcgctcagcaactggcttatcctccaaaacctagctgttgcgcacatttcatttgtccgacatttcatatttgttccttagtccctcccgtagcttcagaatccgttggagctgcccagagactgatatatcttgtaccggtttggggagggcgaggagcaacttgtggattgggtgttgctgggagacccctttttgagggagagctgccctgtgtcctaagcccgggctttcagtccgggttaaggcatttaagtgttaatgtgacttttgaacaaagttcgctgtgacctttttgttcgtttttgtttgtctgtgtaaaacagggtcttgctctgtcgcccaggctggagtgcagtggcgctatcatagctcgttgcagccttgaactcccgggttcaagcgaccctcccgcctcagcctcccgagtagctggggctgcaggcacgcggcgccaccactcctggctaattttttaatttttttgtaaagctgaagggcgggggggttgggtctccttatgttgcccaggctggtctcaaactcctggtctcgagcgatcctcccgcctcagcctcccgagtagttggggctacaggcgcgtgccaccactcccagctaattttttttttttttttttttttggtgagatggagtctcactgtcgccaggctagagtgcggtggcgcaaaggctcactgcaacctccgcctcccgggttcaagcgattctcccgcctcagcctcccgagtagctaggactacaggcccacgccaccacgccccgctaatttttgtatttttagtagagacgggaatttcaccatgttgtccaggatggtctcgatctcttgacctcgtgatccgcccgcctcggcctcccaaaattctgggattacaggcgtgagccacggcgcctggccctagctaattttttaatttttttgtagagctggggttggaggtggggatgggggtagggggttggatctccttatgttgctcaggctggtcttgaactgaactcttggcctgaagtgatcctccgcctcggcctcccaaagtgtgggattacaggtgagagcttacataaacaagccattccaggcacccaacaaaccattcacatagcagtcagattggggatgtgatggtctcagagaaatgctagtttttgtccctagacactgctaaaaaatcagatagttgaaatataaaagaagtaaacacagtaagcacctttaggctgtttttatatttaaaatcaaaacttgagaaatgagcacttaagtggaagatactgttttaactcagacacgaatggaagtaggaggatgagttttattgacccatattgtcctgatagttacttcaggtctctactcagctttgagttcagaaagctcaccaaggctgggcgcagtggcttgtgcctgtaatcccagcactttgggaggccgaggcaggaggattgcttgagcccaggagttgcccagccagggcaacataaggagacttcgtctctacaaaaaaattaacaattagttgggtgtggtggtgtgtgcctgtagtcccaggtacctgcacttgggaggctgagatgggaggatcgcctgagctggagagttggaggatgcagtgagccataa

SEQ ID NO: 1243731 - DNA, 4001 bp, Homo sapiens
aaggtgatggtattagggggtgggcctttgagagctgattaggtcaccctaatggaattagtgtccttatgaaagaagcctctttctccttctgccccgtgaggttacagtgaaaagatggttgtctatgaagcaggccctcctcagatgccgaatttactggcaccttgatctttggacttccttgcctctagaactatgagaaatttttgttgtttataagccaccagtttatagcaatttgctatagcgccctataatggactaagacacatggccaccattttataaaagtgcgcagtgcattcttgtgacacactgaataggactctgaaaagtctcttcgatgaaataaaagctctttaatgctagagaaaggtccccatttttaaagttttcattctgtgtaacatggtctgtttggttctccctcaagataacttcccttaagtacttctctgacttgggaaaacctcacactaaaacccaagaggaaagtcaattttgacttttcaaaactgaaatgaagacaaagaacattacctcttggaaaaatattcattccagcaatccaccttggcagggccgcgatgggcatttgcgattttctgacacagttgcttgttttcatactcgattttgttgattttcttttgttcaccctggtaagaaaccacacctcaccatggtgacaccatcagtgcactgccccaacacacaatgacttagtgttcccctcctctgagatcgtgggaaaggggtgcattgagggccacagtggagactggaagcagaacttaaaagactgggcggccgggcacggtggctcacgcctgtaatcccagcactttgggaggccgaggcaggcgggaggtaatgagactaagaccatcctggccaacatggtgaacccctgtctctactaaaaatatgaaaaattagctgggcatggtgccacatgcctgtaatcccagctactctggaggctgaggcgggagaattgcttgaatctgggaggcggaggttgcagtgagccgagattgtgcactccagcctaggcaacagagcgagactccgtatcaggggggaaaaaaacgactgggggtgacgcgtggggaggaggagtattaacaaatctttgagtagatgggtatttagaaggctctgggaaattgaacctctttaggaaacagactggaagtcaataaaatacatctgcacatctgcaagcagcaagaacaaatacctgtagtttgctcaattttaaaatgtgatttgtgtgcgccactggaggtttggtatcaacagtaggcttcgctagagaagggggataaaagggaacaatgttacatcacaggaattccagtagcggcctcagaaaaccagcactagacaatgtccttgactaatgaacaatttcgaattaggaccttaatgcgactcaagaagtttggtttgatttatcaaatgaacatctctggagagttttgagcagaaacaaaagaatagtgaaaataaaatttacagagataaatgtccttctaatccaatgaaagagcttctcttccaatctttttccaatattattagcctgtctattggcttctgaagtcttatcccctttctaacgtacttcggctttaaggagtttaaaggagtatttccatccagtgaactccctggtggaagatacattttgttattggtgctaatgccctcttccccaaactcagcagataaggccatatcatcccaaagctgtgacctggtctggtttcctgttgatctctttatggggtaccattccaaaatccctaatagcagtgtccagcccaaactgcccacatacctatttgtattctattcttgtgagatacgtagtggccaaagtccagtttctttctgaaggttgtgctttgcctgtgattagagacgataacagggtaggccagataatccagggaattgttcatcttctcttcctagtctcacttcagaaatgaggtacccagactcctctgtgaggtgcctagctgtccccatgacaagctgtcatagttacccagttatgacatcagggacaggtcccgggaagggagtaggagcagcagagcatggctggctgcctctgggcttgtgtttttaatgctaacctcggctcaagtcaagatgaaggtcaaggaactcgaaagctttccccgctgcttagaatgcagatgctgccagccaacaccagaaggaaagaagtggtgcaccgggaggggtgggcaggcacggggtggggtgagggatacagaaattccagccttggttacacatcttgggctatcagctaagtagtctccactgcaatagctcccctgaaggtgcaagaccacaagttttggaggaggagaaagttgaccctaatgataatcggatccaattccttttgcaaatgaggaaactgaagaccacagcagcagcaacgttactcaagaaccaagttggtggcagggctgggctcaggatgtggggttcctgaattcaaggccaaatttgcccttttgcaggaaggaaactgccagtttttcatggcagtaggggagggcagctttcctccagtacagagactatcttttgtacttagtgggagttcaggaaatgctgagtggcttatggtgggctggcatctgctccaggaagggctgcaggagtctgatttatctccaccccagcacagggtatagcacccactgggtgctcaacgcatttgttgatgaaggactaacacctattgagtgctcgccatgcagtgctgggtgccttctttgaatgtcacatttaacccttccagcaaccctagaattaggtaccattactatcccgctttttttttttttccctgcaaacaggctcaggttaagtaattcctcagaattccaaacctgactgcttttaagcacgacgatgactctcaatgaatgttgaaagcagatgcgccccagagtagggcttctcagactttgaccgtagggacctcctggggtccgtaaaatgtccactctgatccagcagggctgggctggggcggggattctgtcaagcgcccgggtggtgcctccactgcagggagccgctcacgagccgaacccggcggtccctgtaatcatgaaagactgaagcgacccctaggtgtacctccgccacgaaatgtttattgggccctgcatttaattcagggaaggaagttaccgcgcttgccagtttacaaagatacacaaacggcctggaccgggatggggcgaggacccctgagactccagggcggtggcgtcttccccccgggacgcgcccaggagtggcgcgcggggcccccgcgtcacggcgcccgcgctccgcagctcccggagcccggcgggcccgccccaggggcgggacggggcggctcccggcgcgagcccccgcccagctgatccgccgctctccgcctcgcttgctcctgccgggcgtgcagggccccgccgccgccatgtcgggctcgttcgagctctcggtgcaggatctcaacgacctgctctcggacggcagcggctgctacagcctcccgagccagccctgcaacgaggtcaccccgcggatctacgtgggcaacgcgtgagtccctttcgcgagcccggccccgccgtccctctcgggacgccccgcccacccgaggctggggtcggggtgtcgcgagtcttgggttgggggagcccgggcgcgatggcccctccgggagccacagcgggggcttgggaggggcctggagtcgacgcctacccccgcgcgtggggccaaggaactggaaccctgcctggccgggcgcggcccttccccgtggcggggtgcacggagcccgggtggcgcctgcccgggtcccagccgccacccgcttggggcttggccttgggcggggtcggggctaccatgttcacttaacaggtgaccctcggtcgcccggccggtctcctgcccgcgcg

SEQ ID NO: 1243732 - DNA, 4001 bp, Homo sapiens
gggtgggctcccggccctggctccgcagctctcagacgtacaatgccgaagaggtggagttcacttttgccgtagacaacgacggcaagaccatcaacaagatcgacatcgacacagaggcctatactggtgaagcccctgcctgctcagaaaaacccgcttctagacggggtccagagaggggacttccacggtgggcttgccccggaccaacgacactggaggatgacttccacaactgggtttagcttacccctgtcctgaaatcattctcgattgttactctagtcctgccttctggctttccataccctcaacgagaatgcccttttctgtccgtaattgcccccatcctgacggcccatgaccctggtgcagacagccgcagcctcctcttcagcccgctgtcagctcggcgggcgccccgctctgacagccagctgaccgtgcccccgtcccgcagagaacggcgagtgggccatcgacttctgcccgggggtgatccgccgccaccacggtggcgccaccgacggcccaggggagactgacgtcatctactcgctcatcatccgccggaagccgctcttctacgtcattaacatcatcgtgccctgtgtgctcatctcgggcctggtgctgctcgcctacttcctgccggcgcagggtaagcagtggccccgaacctacccccaaacccgggctcgctcccgggaggcggggcccgctctcactggctctccctccagccggcggccagaaatgcacggtctccatcaacgtcctgctcgcccagaccgtcttcttgttcctcattgcccagaaaatcccagagacttctctgagcgtgccgctcctgggcaggtgaagccggagcccccgcgggggtgtggccagtgtgaagggtgggggcgtggccaaaacccagagaccccgggaaaagctctggctgtctcgccccgccctgggctttattcggacgctgggtggggctggtacggggatggagtccctggtccgccgtcctcctcactgctgctggacgtcacctggaggtctcccgagtagctctcttgggggacagtccggctcagtgcctccctagccccgccgcctctggcccctaactcaccccgtgtcctgagctcaccggttctccggggattccgaggcctagctgctgttgcgactgtcgcaggaatgaggcagacccctgcagaccccgtccacacaggcatagccatgctccctggactaggagccgggcgctggcgcccaccgcagccccagcttgccgaaccccctgccctgcggcttgggctacccggctcagcgctgcacccggatccctgccgtctggggctgggcccgcgctgccgtctagtcgccgcgcctcctgctgcagccacagggctgagatctgcattgggggcacaggggttagcggggaggcagaggtccttgttcccgctacccgatcgccgcgtatcctaagccccccagtaccccacctctaacaaggtggtgccgaagctcacgaggctggctgtggcttctctcaacaccagccccagggtgggcttcggggcaggcagcatcccctgcatcttcggttcgggtggctccagggacttcagctctctgaacctctgctccagatattcatgggctgcggccacggagagttccagggaagacagaagcgggggctggagggccacctggagaaggagcagagcagtagagtagcagggcaggggtcacaggggcgaacaggagacctacccagaaggtctcgaggtgcagcccttggcgggcgtagcctcacctcggtggagctgtggaagtggtagatccacatcagggtgtccagggagctgggggtccccttcatggccgccacaagtggtaggacaggagaagggctgggggacgcgtctgtcgtcgtgtagggggcgcagctggagggcgtaaccagcccgtaccaggagaagccgtgtttgtgaggtcagcgcgcggcgccttcggtagctgggaggaggaacggtgatgtcatgccttccgggctcctcaggttccttattttcgtcatggtggtcgccacgctcattgtcatgaattgcgtcatcgtgctcaacgtgtcccagcggacgcccaccacccacgccatgtccccgcggctgcgccacgtaagcgcggagggggcggtgcagcccgggtcggggtggggcttcgtactaacctcgtcccctaagccccgcccctgccccaggttctcctggagctgctgccgcgcctcctgggctccccgccgccgcccgaggccccccgggccgcctcgcccccaaggcgggcgtcgtcggtgggcttattgctccgcgcggaggagctgatactgaaaaagccacggagcgagctcgtgtttgaggggcagaggcaccggcaggggacctggacgggtgagcacagtggccctggcccggggggccgcgcggggtgcctgccaggggggaggctcctaaggcccaccccggtgttttccccgccagctgccttctgccagagcctgggcgccgccgcccccgaggtccgctgctgtgtggatgccgtgaacttcgtggccgagagcacgagagatcaggaggccaccggcgaggtgggacaggagccagaggcgggtggagcgaggcagaggcccaccactgtctcccatgccgctggctcctgcagctgcctctttactgactgtgccgacccttccccaggaagtgtccgactgggtgcgcatggggaatgcccttgacaacatctgcttctgggccgctctggtgctcttcagcgtgggctccagcctcatcttcctcggggcctacttcaaccgagtgcctgatctcccctacgcgccgtgtatccagccttagctcgcaccgacttcaatttcccacccatctccagtaggaaattgattttgaaaaagtaggctgccgccaccacggcattatgatcccttccccctgctgatcaatctgcagtttgtgaacttcacaagaatggtgtgtgcccgttccctggcgtgtgtaggcctggccgcagtccaggggtcagcaggaggaaagggttcacataggctctcaggtgccagtcttccagaaagcaaggactgcccttcattcagccttgctgacctcccagcctttctaaggctcagccccacgggactctggtggctgccagcttgtgagctatctatctatattcatttcatagccaaacaggagacccctttgcaggacttgcacacagggaggctgtagccaggaaaccctcttcttccctggtctggctctgctggagcgggtgggaaccaaacaccttcagtgctggtggccctcaggcccacaggtttaaggctgaggctgccctgacccttccacagtcatttcttctaggttttcttggcccagcactgcccatcccaccccatgaggctcactcattgcagatcccagcccaccctgcccctttcttccccaccctggaggctctctctgcctagtctacagtactgacagaaagcaaggacatgcggcctgcatggtgggagctggttgaattgtctttattaacaaacaggatatccaaggccactacattgaggaggggtggggggggagggagaagggttacttgctgctcacactatatacagatgcaagcaaggggcgtggagagtgagggctccctgctccctccctccaccggggaagggcatgggctagaagaggagaggggggtcgggaatggggggaatgttttggctggcggggtcccccctccattccctggagtttgggggaaggggaatcattaaagtgctttcagaaaatgaagaaatggtccctgcccctggagtggctggtgaccccccaaaaatctagggcccagtgaccccccccagggtctggtacattcaaggggggagccggctcccctgacgtgcaaat

SEQ ID NO: 1243733 - DNA, 4001 bp, Homo sapiens
tatcaactgcacttgtattttgtagtttgatatctaatgcataagtctgatatgagcaccttttcccatttgtaggattcaggctcagtacttatgcatcatcaaggtgcatcacctccatctgtaacagctggcaacattaagtatctggtaatttccaggagctcctctcagaggtgtagctcaccttgcaaaggatctaaaacataaacaagacgacactgagcaaaagggatggtggatccagttccagtgagaaggccatctgtcatggaaaatgatagagtcgtaattgaggggagcccatgtcgccaatgagagaatcacattaaacagcaagaataaagggaaaaggacaaaatgaaagaggagaatgagctgagaggattctagtcatgatggtatcacagttagagaagagcaggttaaaacgatcaattcagataaaaaatattcaatggtgaagtcatacttgcactcaacatgaatgcagtgctgtttgttgtatagacacagcataatggagctctgtatggcgaaacatatgatgtcatccataaaaattgaccaggttactctatagatatgtctatattcatgtattcaataattattcatcaaatgcataatatatgcaagacatttttctgagagctgtggagaattaattatcaatctaacaaaactctgcctctgaagtagaaattatcaaagtttataaaaaagacacactcacattagtttgaaattttccgaataaatttcttttgtactctgggaagatcttacttaaagcaaattcatctgtaaagaatggagaagcttctgttctaccattgccaaggaaaattccagttagtatgaatgagggccccaatctcatatctgtgcacaagaaagaggaaaggaaagaatggagaggtcagaaaacagtggtgtggaaattaaaatcctcatttaaaaaatctaagaagaacatgagggaagcaattactctgcatgtttcccagctgattcacaggagattcatgattagagttggccagaggaggtgaaggcatggactctgttgtgcctcttcctggaattagatgatatggatgagcagttctccccttgatggagtccacatcatttcccctgccgtccctctcgctggaaatgtcccccagctaacacagggcttgctctgctgtggctgcaaagctgagctgctggcagggggcagattgctttccacagaggagaccagatatggtttctttgctgctaacctggtagctacacaggcagcaactcctttggaagagactccaccctaaaccctttaaggctgggcgaaagattaatgctgcagcttaaagtcaaagaaattccaagctccttgctccagagcagattaagtcagtaggagatccaaataatgagagccccgaggaactattctgaaaatcagaagaaactgaaagaaaaacttaaaataacatctcttttaaaggaaaagaaaaacaacagggaggtttaataaatttatatggcctctcactggattgtaaacatttgagatgataagtaaacagaagagggaatggtgcaaaagaggaaaaaaatagatggttcttacaactctgcagcatctgccaacccaaactacagtgcagaccagactggtgaatttctctggggacttcccagggtgtgaaagaagggaaatggggaaataataagacctgagtttcaagggaaagaaagaaaaaaattaaatctctaaaagtttgcttttctagtccctgaattaccatcagcaaatgctacgaaggtggatttaagggaagtatacatgctagagatgccgttgaagaagggaggaagcagtgcttgaccatctgaagctgaggagttctgaagatccttatccaacctcaaacttgctggtgctcatgtctctgtggttctgaagtagaactagccttcaatctcagtgtcatgcctttattcatttaggcctggagggaggacagaagaagaaccttgcctctgtaatttggacttccattattctgtcacaattgctgccttgttgttttgtgggtttttttttttttaatcattttttttttctggcagttgcacaagaatgtccaggaaccatatggcagaatgagttttcatttctgtgttctcctttattccaagttcaaaatgctgctcgtgaaacctaatcatagatcttaaaaaccctccttgtctctctcatttctccctctcactactgcctagggatttggctcaaggaaaccttggctaacagtcaactgaaagttgactctcagatggaaaggctgggaaatatcaaagacctgcaaatgttagtttgattcacttcaaggtcatcacatcaaccaacattttatcagcatctgcaatttctagatgttttgtaaagtgttgtgggaatacaaagatgataaaaacatagacatttgctcaaccaggggtagtggaaagtgcaaagactgaaatcagaggagagttgacctgactctgctgctataattatgactgttttccctctaaattcccttttcttagaatacggccccactagcagtccagggcagcatgaggggctcatatgaacagacttttattctgtgatactgccgtattcactgatccaacaccacaggttctcagctcaaggatgaggttgggcaagggtgaccatattccatctctatactataaatttaggcttggcttggtgactaaatgcctttaatccatgcactttgggaggctgaggcaggaagactgcttgagcctaggagttcaaggctgcagtgagctatgattgtgccactgcactccagtctggatgacagagagaaaatctatctcaaaataataaataaataaattataggcttacaatgttaggctttagaatgttagatttagcaccagaatttgctatgctgaagcaaagctaatggaaagctaagattgagaagaataaaaaataaaattattgtagagaaagccagtgtacacagaaatgaatacagcaaatatgcagagagaagcaaaaatatgtgacaactgagagggaataaaacaaagggtcagagcgggcagaaggcagggacagaagagagaaaagtgactaatgactgactaacatgagacgttgtatttcttgtaaagtatcttacgacatttctcatattctgaagacccttctttttaactttagcttatatattttttgtcctttgaaaccaaattaacattaattataacagatgttgacttgtgtggtctagaacagatcatacgatctcttgagttataacttggttaacttttaggatagtgacatattgtttcttaatcccagagtcaatgatgatacctgagacaatgctgtgatgattggcatttatctgctcagtacatggtctctgaatggtaatctccagccaaggcattagtgatggagagtatggagggatctaatcatgaagacagtgaaggctccgggaactctgggaaagataaaatggcagtggctatggtggagaagcacggtagggaagaagcttggtgtggcatggtttggctggggtgaaggactaaaggtggaaaacagaaacagagtatgtctggtgattttatgaccatgtttagggatttgaatttcaagttagttttggttttaatatctttaaggcatatccagttgataaggtatgtgtagggctggggaggtagaaggtaagatttattaacacaaagtccctcaatcttttacattcatgttaacccagttcaaaatccagagtgttttactctctataatttgcattttaaaaagattgggatttttttcaaatataaattgatattataccttccaatctatttttaaatattatcttcatcaattaagataagtctagtgaattctcctgccccataatccttctcctcatttaagg

SEQ ID NO: 1243734 - DNA, 4001 bp, Homo sapiens
ggtaagcagtgttgcctggaggagtcaatgcctgtcgcccggcccaagcatccatcatcaatgtcattagcttggagcacagagaagctggcagggaaggaatggagcaataggctcaaggataggactagctttggcactggcaggagagcagcccttaggcccagaatgaagaggtggtctttcctgcccaccccaacatcccatctcactaaattggggctgcacctgggcagtctgcttcttcacatacccaggaagaaagcagtaaacctttgaatgggttgtttgcaggtgtgcttgggggtctgtggcacttcactcagtggtgcccaacttggaaactcctttggtggtgatggtggtgataggcttgccttctctctctggaacttcagatcctcacagaaagggctagagtctattttaaaaccggacaataaaagatctagggaaggagagcacttaggctcaaaatccggtgttgtcagctggctttggggtgtttcaacttcaggattcagcaagggccaccatgaggagtcaggtccgtacctaggtaaggaccgaggaggcaagggcctaggggtcagttccagttctgcatggatggagggcttttgcgagagttctggatacctgggtgtaggtccttgggacatgtaagtaatttctgggggtttttgggtttgctgtttatagatgggctctggagtaacaaacatggatgacttgtgggagccctcagacactgatggaactgtcacatggtgagttggctctactgactgtacccctggggagatggtgaccctgcggccaacctcgctgtttcctcggattggggtcctcacgttggactccacctgtgatgatactaagacctttgcggagggcttggtttcaggataggcagaatacttatgaagagactcagggtctacccgtgcagaaactcggtgtacaccatcagaatctttaaggacagagagtttgagcaatgagtccaagttcatattcctatacaaggccttgggttttgaaggaattggaccgtaaggacctgtttctgattcttctacagggacccttctctgggctgtctgatagtctgcagagacacagctgcttccgtgctctaggagagagggactccttggagatctgatctcactagtagtcgtaattctttggatgggctcagtttgtactgcttcatcctttgggtaagacaaaatcctacggggaactctgactccttgggggttctggaccttggatggtgggtcatcttctaagatttgtgattgtaagttattcttctggtcttgaaaactcaactgatgagtagatttggcatctgggattgatgaagcatgatggccgacctcgcgccctgacttgctctcactgcctcttcgtgctgcttcctctctgggtggactaactttccattgtctgcttgaagcatgggaagccagtgtctgagtcttctggctctttagatggggagaggaatggcgggatgattctgttcttggtccagtctcgggtccccgaggagtgggtactgcatagtgtccaggtcctgactggagggagacagatcgagggtagtctgatgctgaatggggagtggtgggatgtgcagcttctgatcttcggtgggaagggttcagggagactgcagcacttcgatggcttgaggcaagaacgtacccatgtccctgctgaggggatgtgttagtagtaacctcagaccctctctgtgctgaaaccgctaccttggccccaggtttatttgtcttgaccatctgatagattgtgcccttctgagtagatcccgtattttactggctggcttgtattcaggatcctaatgatgcctgaatatttaccctgttttaaagctgctgtttcttgggctcccacaaaagtggctgttgttctaagagtgtctcaaataatccccttagctacctctctgtctggtgatgtcataaaggaaggagcttccttcctattaaacatcctagtgtacagccacaattcttcacagaatcccaaagaagtacctgaaaggaatctgtggatttgtctttggagttatatcaccaagcctttggcaagtttttaacaaaactgggatttccttgtacatagagaaggctccagaccctcctttactctcccgagattctagaaattctcaggactcatccagagaaggaatcagccagaagatcctatgaagacaagatcaaaccaaacacgctgtgttcgccccagttttaataaggtacgaagtacaaagttgccccaattttgtttgaaactgtactgtatacaagttaaaaaaaaaaaaaaaaagagagcttcagctttttccaggtctcatggattgtttcattgctcctggggtaaaaatccaggttgctcaaataataaaattctcacattcttgctccaggagagtttagtgttttattaataaaagggatttgccatgtgcggtggctcacgcctgtaatcccagcactttgggagaccgaggcgggtggattgcctgaggtcaggagtttgaggccagcatggccagcatgataaaaccccgtctttactaaaaatacaaaaaaattagccaggcatagtggcaggcacctataatcccagctactcaggaggctgaggcaggagaatcgcttgaacccgggagttggaggttgcagtgagctgagattgtgccactttactccagcctgggtgacaagagcaaaactccatctcaaaaaatatatataaataaaaacaaaataaaagggatttgggctgggtgcagtggctcacacctgtaatcccagcactttgggaggctgaggcgggtggatcacctgaggtcaggagtttgagaccagcctggccaacatggtgaaaccccatctctactaaaaatacaaatattagccaggcgtggtggtgcgtgcctgtaatcccagctacccgtgaggctgaggcacgagaatcgctggaacctgggaggcggaggctgcagtgagctgagatcgtgccactgcactccaggctgggtgacagagcaagactccatctcaaaaaaaaaaaaaaaaaagaaagaaagaaagaaagaaggaatttggagttaatcattggtttccatcataaatgactacaggtgtacctaggagaaattacctgccttccctgggacttggtttcttcacctggaaaccactgcctggtacatgggtgtcacacaacaaatgttaatgtcctttctcatgatcctgtcagctatccaatcagccggactccggttctctcttgaaaagtgactttccaatttggatgaccattttggaggagactctgtcacctttctctccctttcacatgctctttctctcattctctcttttagacatagactctaccatatccaaaattctattatgaactctgaagggtcattgagattataggatggtcagcttcatttttctttttttttttttatttgagatggagtttcaaataaactgtgcccaggctgttgcccaggctgcagtgcagtggcgtgatcttggctcactgcaacctctgcctcccgggttcaagtgattctcctgcctcagcctcccgagtagctgggattacaggcgcataccaccatgcctagctgattttcttttttttagtagagatggggtttcaccatgttagttaggctcgtgtcaaactcctgacctcagataatctacccacctcggcttcctaaagtgctgggattacaggtgtgagccaccgtgcccagccagttttaagtatttctaaaccctttctattccccaaaatgaaagcagctttggctaggtgtggtggcccagcctgtaatcccaacactttgggaaactgaggtgggcagatcactttagctcaagagttcgagaccagcctgggcaacatggtgagatcccatctccagc

SEQ ID NO: 1243735 - DNA, 4001 bp, Homo sapiens
taaacctcagatgggacctttaacccctaggcagcaactccacagccctcaccagccttctgtttctttatggggggacccccggcctcagggacactggagctgctgggaggaggggcagctggaggaggtgacaagacaccagatgccaccttcttgggccctttcttgggtgactcagctggaagggggatgccagaatcttcatataccttgcgtttcacagtggcctttatctgggccctgaagaaaagagagaagaggttaggaaaggagtcatcagagagactaacagaagaggggacgggaggggaaggggttctgggagtcccttcataagaatccaggtcggggccccaacccattggtagggttctcactttctcgaagttttacactcactcaggatggatggagtgtggagagtggagtccctgaactgagtagtgggaaaggcccatctcctaattctcttctgggagagacatcaggtagagcttggtgatttacaggtggattgagatttactgatcaactagttcagggtcaccatatccctggaaacactgcagtggggtcctcaaacatttatataaataaccaggggacttccatcatcaaatacaataacagcatctcaggcaacctaaattcacattcttggaaggattaccacagcattttaggaacttctgaccaactgtgacaattctattctttcagtcctcaaggggattctaaaaaactagtgacaaagtagggaagcagctgagctggaaaggagttctgaggacgatggaaccttgggtaaggaggaagaaggctgcccacccgcccttttctggcagccaccctccctcacactgtccgttccttgatgacacagctgatgtgattaagatcgtccccaaatcgcttcacagcagccctcagcatctctatttccgtctccgtccacttcgcactgtcagaaggggagaggggggatagcaaaaatgggagggggggtgtggagcccgcccacaggctatgcatcccacagccaaccagccgcctccttccgatttctgggaccccttccacggatgcataaagaggtcctccgtaaggggaggcggaaagctcttgaggccctgcgggaaccgggaggaccccaatcacaagaaatcacaaccacctccaccttagacacccctttccaccatcaacgttaaacggctgctgtacacagcacactgaaaccaactcgccaggaagggcttttcaaaacagacccaccaacacagcctgcagccgtctgggggaattccatgaactggggtggttgggagtggcggtggtttgtggtcgacccgttcgcagcagggagaactgtgaaacaggagtctgggctatgggcctgtctgtatttttatctgtcattcattccctcacccaacgatcatttattaacaccgactctgtgctgtgccacgcacaaagggaaactaatgtctgtccctgtgctagagagggtccgtgtctgtgaccgagtccaagcgcccgctctcagcgtccacgtcccagtccgggctcacgtaccccgcaggagaagagtcggccacgggatgcagctgcatcgtcagctccccgagcttcgtgaaggcggcgccggccgccgagaagatctctccgacctgggggcggggcagcgtcacggggggccggcgcccgccctccccgtcccgcccggagcccctagccccaccccaggctcggctcccgcccgccccccgcccggggcggaagagccgcgagccaagtggggggcccgccctcccgtggccgccagggagcgctgtccgcgagggaggtcgaacctttgtggacgctgacgtcatggccccgcgcgcctcctcacggagacgccgccgccgccgctacacgcgagccgggaccacggagagcagggagactgagcggctcgggcccccgcgcaggaagtcccgccctccccgcagcggataggctcaacccggcggctccccgccccatcagacgcagtcgcttagaccgctcggcgcgcccagtcgatggggaaagccttcgcctcacttccgcgccacacttcgctccacttccgctcagacatcgggactttccaggcagaggccgacctctagtctcagccccgtgctcgcccccactcaagcacagacacagggctgaagagagcagattctctttattgagatacgggacacagcgaagggtggagaaacggaacagccccccagcctcagccctctccacgggggccggatgccagagatgggagaagggattcagtctctcgcccgggaaacccagtcccgcagagggcgccggcaagggtgggacgcgacctgggtgacacggtgcagggagtctttaaatagaggaggggctggagcggggaaacgcgccggggccctagcgcaccatgtattccttgcgcttattgagccgaacttggcagaaagagaagcctccgaggaggaggtaaaggcctgcagcgatgaaacagttgtagctgacttgctcgtaaaggttgtatatgttctgggggccattcctgggggtgggaatgaagcaaaggggtcaaactttaataggagccaacattttctgagcactatgtgcccgacacctgtttaggcgctgttacgtgtattactttattcaatcttcttgaccatcctatggggtgagatctgtcatagccattttgcagaggtggactgagaagcacagaaaagtaaaatacctaaagaggtcacacctaaggtggtgggtttgggatggccgctgaggtctgactccctggctcctaaccacattctcaagaaagccgctctcctctccaagtcctctaacctaggggccctaagcaccgggcctcccagacgtaattctgaccctaggcctcgccacctcccacctgctcccagcccgcctcccccacccgaatacttactcaaaatctttctccgtgaagggaacgtcctcaatcaacacagcggaatggacattgaaaaatattccgagcattatctggaaaaggggaatgggtagactgttgaattcaggcacctgacctcatgttcacttcgtaaacccctcccatttccaatgttgctacaacacccgagcctgagattaaccaaaacgaggtggtggttactggattcggactcagccacctggaacagggcgtgaggtggtgacattgagacaagtggtcgaggcaagggtgggaatagtgaccaagccatctctcccaggaacccagattatcgtcctctctggaggcgtcatcatcacgggacagtgcggaagaggggagggagaaccggcacttcttcatatcatttcttcttgaagtggcggtgggtggattactgggaaaacaaggcccagctacacatttctggaacaagcactctcttttcctcccatgtcctccattcaactcaagcacctctcaggcaccccgctcttgtttctcctaccttgaggggtctccacctttaccagccctggctcctcccactccagggccctccgctccagttcccttttttctttttctttggggacggagtctcgctctgtcacccaggctggagtgcagtggcgcgatctcggctcactgcaccctccgcctcccggattcaagcgattctcctgcctcagcctcctgagtagctgggattacaggcgggcgccaccacgcccggctaatttttgtatttttattggagacggggtttcaccatgttggtcaggctggtctcgaacagttcccatttttcaatttcagtctgtctccttctccggggcctgtagatccccggcccctccggcctgcctgcggcccagagtttcctcgcctcccagccctcccagcccggagcccctcaggccctctccgatccttgccggggagtcccctcaccaacatgatcactccccaggcgctg

SEQ ID NO: 1243736 - DNA, 4001 bp, Homo sapiens
cgcctcggcctcccaaagtgctaggattacagacgtgagccaccgcgcctggccactgatcccattttaataggtggttatttacagaatattttattttctgaacgggatttccttcctccaagtgggccttgccttaaggaagcccagcatctccgctggtggggtgggcaggcgggtgggcttacagcacctctgtatgattagaaaaggtgccttatagttagggaaatggaaaaaggaccctctatgggcagaccaattgggaaaaggctgtccttagggtgagccaattaggaaaagacgcttcctccttcttccaggcttgacttcagccaccactgtcccctcttgctggtgcctttgttcagggcacagttactacaactacaagcagtagccccagcagaaagttcctgggctgacatggaaactaagctggcctcccctagaaggtgtccgccgcccattcagcaaacattcaccaggcttcatgcatcctgtgtctgtcacatctggatagctaggtttgtaaaggaaagaggggaggaaggcagggaagacacaactcgtggagtttgctatggaaaagtcaagaaacatttctaggcggggcacggtggctcatgcctgtaatcccagcactttgggaggccgaagcaggcggatcacctgaggtcgggagttcgagaccagcctgaccaacaaggagaaaccccgtctctactaaaaataccaaattagctgggcgtggcagtgcatgcctgtaatcccagctattcaggaggctgaggcaggagaatcgcttgaacccaggggtcggaggttgtggtttaccgagatcacgccactgcattccagcctgagcaacaagagcaaaactccgtctcaaaaaaagaaaaaaagaaagaaagaaaaagaaacgtttcttttgatcccagtccatcctatttaaagagcaaaggtactgctcatgattggtgttctagccttctggttgtaaaaggccaggcctagttcacagctagaaaagggttccagagatgtttcaagaggaaggggaggaggaaaaggagttgaaaacaaagggttggacattgagtgctgcgctatggaatctggactttgcctctcagcagtgaggagccgctgaacattcttgtagagggacgtgttccaagctgtgttttaggatgttccctctgacaagacagagggagaccccacttaggagtcattacagtggtccaggccggagaagacaaaggtctgaacaggagcaggtggagatgatgaagcagatgttaagactattctggagccagatgtggtggctcacacctgtaatcccagcactttgggaggccaagtcaggagaatcacttgtgcctgggaggttgagactgcagtgagctgtgacaacgccactgtactccagcctgggtgacagagcaagactgtttctaaaaaaaaaaaaacaaaaaacaggccaggcacagtggctcatgcctgtaatcccaggactttgggaggccaaggtgggtggatcacttgaggtcaggagttcgcgaccagcctggccaacatagtgaaaccccatctctactaaaaatacaaaatacaaaaattagctgggtgttgtggcatgctcctgtggtcccagctactcgggaggctgaggaacgagaatcacttgaacccgggaggcagaggctgcagtgagctgagatctcgccactgcactccagtctgggtgatagagcaagactctatctcaaaaaaaaaaaaaaaaaaaaaattcaggaaggcgaaaggagagggcttgcagctacatggatgggtaactgagaaaaggttggacttcatggtgatgggctggattgtccaagctagggtcaagaggtcctgtcctccagccccaccctgcctccagccccactcaccatgcttatccattcttcccaaggctgtgccctgctttccctgatcagagactgggatgtgagagggtgcccagaacccatagaactttgtctcatgtctagggcctctattaggtcacaaggggtggggctagaacctcacctgcccataaggctctgcccaggaataatttccttttccagagcctcccaaagcactaacaactcagatgtctcctaccttccctcttaggaaggcattaaaggggaagagaggatggctttggcccgcaataaactgggttcaaatcccagctctaccacataaatataaaagttatctgatgttcagcatggtatctctctgaccctcagtctcttcatctgtaagtcagagatagtaatacagtaccacgctttacctggcctatgggaagcactgaaagcactgggtttgtttgtatcattatattctgtcttcctcttcctgtcttatccttatccttcttcaccccatgctctccacttctcctatttccatttcattgccagtaccaaggaacacaagggaatggtgccaagtccagtaggaagtaggactcgggtaccaggctggtatagctcctggatattgtgtatttgttggggggcaggggtgagggagggagtaaaatcaaggagcttcaggaaaatcctttcctttcctggactcgaagtggagtgtgttggcacagagaggaatgtgtagatggacaatggacagattcagctctggaaagccctccatctgttgagatgaagttgctgacctcaaagagagcccagtctaatagtgatctgcgatcctccatccaagtctgagagtggagggcaatggagtcccttcctttgggcatctaagtttggtggaggcaagttgatgggctggagaacagagagcagacctggcccccaggaatctcgtagtcacaagggggcaaccctatcaagaactgtgaaggatctgaaatgttatcctatttgcaagctaccatgttaactagttgtagtttcatgggtgctgccagaaaacatgaggctccaagtcagagacaaaggactttattactcgtggcacagcaactttggcctgtttgcctcagcttcccttgcttcggtgtcctatgagtgacacaaatgagtgccagtggataccggtatatgcagaggtttgcattactacagaaatcccaagcttaggaaacctgaatcttttttgggggggcggtggggggtagcggacagagtctcaccgtcacccaggctggagtgcagtggcgcaatctcggctcactgcaacctctgcctcccgggttcaagcaattctcctgcctcagcctcccaagtggctgggactacaggcgcgtgtcaccacacctggctaattttttgtatttttagtaaagatggggttccactgtgttagccaggatggtctcgatctcctgacgtcgtaatctgcccgtctcggcctcccaaagtgctcagatgacaggcctgagccactgcgcccagccaggaaacctgaatcttttataattggtagtgagcaaacctgctgtttgctcagaaaggaggcactacgtctattttccaagattgctcacttatccaaaaacccttgaaaagtcagggcctctgctttcaagacatgcataaacacaaaaggctcaaggagaattgtctcccaacaagctcattctctttaaacttactgaaagccaccatggctcttgattgcacactctggttgatttaaagagaaagaatagtgagacctcacagaatgaccaaaagacttgagaactggataggaatcaaggaagggtggcgaataagaacacagtcaagatcgcattacaggaacaattcagtttggaggccactgctgggggtcacccatggacactggcaccatgagcaatctcactgagacactcactaagatttaatgcccctggcaggcacatctaaaccagtgagcctgttcaaagaccatcccaccaagacaccacaacagagtgtcccctggcatggtca

SEQ ID NO: 1243737 - DNA, 4001 bp, Homo sapiens
gagcaggaggatgaggataaaggtgagagggaatccaggagggaaggtccctaaaatccagaagaaagggtggaactcctcaattgtatcgtctgtgtcaaatgcagctaaatgactgagataaaagtcgtttcagcaaagtaccttggaggaaagctggaaaggagtgggtgcaagagaggacatgaggtgaggaagttgcatggagcagagaaacagaatggtaaatggagagaaacctggggttaaaaaaggtctatttgtttaatgcacagcattaaggaatgcttgtgtgtggacactagcaaaaaatcagtacagagaaccccagaattctggggtcatagcccgaaaggactcctcagctccaaatttacttgaagttacagcttccatctttaaattaaatgggattttttttttttttgccatctatttcatcatacaggatgtgacacagaatatatctgaaagtataactttcctggaagaacacatcttagtttttaatatctaaactgtatagcagctatttatctcacaaaacatttttcaggctgagtgcggttggtgactcacgcctgtgattccagcactttgggaggccaaggcaggaaaattgcttgagtctagaagttcgaggccagcctgggcaatgtggggagatgtagtttctacaaaaaatttagaaattaacaggcatggtggcacaaacctgtggtctcagctactggggaggctgaagcaggtggatcgctggaacccctttcgtggtgcagtttgggcaaaagagcaagaacctgtctcaaattttttggctgatggttgtagacataatgtttgagctttcaaaaattacaacattttaaactaaatagtttgctggaaaaaaccacatgttccttccagaaacaactggtagaccatcaggatcatgacagtcacttcaaaaagctttggtgtgttgacaaaggggaggttcacgtgtgatgttgctggtcgcacagctactgcatccaaggcaaatgcatgttaacaaccatatcaaatgtgggtgaccaagtggcaacatttaagcattttacatcctaacttatgtgcaacttaaacctactgccacactgtgagttaggaaattggtaggtttttttctattgacttgttgtgccctataatttttcctatttaaaataatgggaaacaagttttcagtttttttctcagaaaaagtctgacatttcaggcacagatatgtctgacagttattaccagcagaagagtttctagccttttcatcgtaaaattttaattacttaccttggaaattacttaacttcgttccttccaaatctggtagtaaaatgggtgctccagaaagctgtggcacggatattctgctgctttgctcgtctctgcacagacctggggcttgaggagcctgcagccacgaagtacaggacgtcatcagaatggaaaagcgatccagatggtcccgcaggcgcagtgctggggcgtaaagtgcagcctgtgcacggcgggtgggaggcgcgcgggctcgccggggctcgggactgtgttcttgcagccgagaggcccacacaggacaaggaggcctgacccaggctgttggagcccgcgaagagggggtgaaactccaaggggcgtaagggtgatcacacgtgcggccaagcttcccgtctgcatggcgaggggctgggcctttccgtcgtgatttttctcccattatgccgggcgcgtagcgggccctggggcggcgggaccggtgcgggcgttcagtcagcccggggtcctggaggccggcggggggattcgcagcagcccgagggacggatggatggcagaaaggagtctctacttccaggttcccagtgatcgctatgttccttacaagcagtaaactcacgacttcagacacccgccacggagctccgcgcgcagtcctcaaacagccagccacgccggccgggcgcacagcgcatgccccggggtcggggcggggcggaggagacggggcggggcggaggggacggggcggggcggaggggacgaggcggagccgggcggggttgaggggacggggcggggcttggcgggggcggagccgcccagcgctgaatccaaatcgtatctaagctattttctagctctgacatcgtatacatcactgcatacgtgaatagcatgccaaatactgtataaaccaatactggtttttttcttctcgggaggtactatataaataaagcacgtacacggtatctaatatcagaacattcaaatcccatattgaaaagattataaattgaccataatcctataattctgtttagcaacagtgcgttccttctcagtcttcacttttaaaatatctaagaggctcgatgtcttgaggctttttctttttaaacccaacatcctttttcacatttattagtttagtactttggttttactcaataaaaaggtggggttaaaaaaatctgaattattctgcaatgtttcaggcaacagaggctgaaaacaacactgttaaggcggggggacaattcttatactctgtgagtcttcttgtttaattttcattaaatttccagaataataagcgtaggatagctaacgtttgtctttgcgtcgtagattagttaacctttactgaattcacaatatggcatcagagatttaatctgcatttcctaattcttataaattaaagctgaagtttaagcttcattcgcacgtcacaaataccacttgccctgaataaataatgtttttagaagtgagcattcctgatctccctgtttgttaagaattgtcttcttttttcagctgctactctgctaagacaagagttagcccctgagctatgttatcagttcaaggctttgcagatagcgctgtatcgtgggggaaaaatgaacatggttttcaaaaaggaggagaacatttctataacgttgagacttttagtaatcagggctattgatgtcagatggctgttgggacaaatgacatcataaaaaatacaaaatttaaaattatgtttgtttatgtttgtttgttttcagatttcttagtagtaaaggggctgtgttttcactcaggcttatatgatgatgacatttctcagaccagcagctatctgctagcattctgtcctggacttggggtgcacctgtgacagtagctgggcttgtcatccagtgaatagctcatagttgactcctctccatcagtataagcatgggtgtgggtgactgcatggtagagggggccggggtagccagggaccagaggttagtgaaccattgggtaagatgtataactgttactcaggctcataatttttcaactttttcagatagtaataacaagaaagtccatccttaccagtgtcagtctctgttttaagtgttgttcatatattacctcatttaattatcacaccaaccctatgagactcagaatgtaaataggctactgaggtcacattgctggtggatcttaatctcaggccagcttggctcctaagtgtgtgttctcactctattgcctctagaacaggaaggaatatatggatactgtaaattgttaaagaacaagttgaaagaattttatttccggcaacatgggctgacaagaaccagaaaacaacaaaaacttctggaatacatatcaagaaccattttaaaaaatgtatcaatgagctgcaaaataattaagagttcgcaaaggcaaaaaaattaaaattaaaaagtgaaagtagaaacccaaagaagtaattagatgccatttttcacccttaagatagttgccaagtgtcatactgaaactctcttttcatagtctgggaagaggatggggcagcagaatagcagacaaagtttagatcctgtccaaggtaggacggttagcagaagacatcaaaagtaggacaccagccgggcgcggtggctcaagcctgtaatcgcagcactttg

SEQ ID NO: 1243738 - DNA, 4001 bp, Homo sapiens
ggggcaaagggaaggctgcctaggggagcaagggcagttctccaggactgtgcacatgggcgtaaacattttgtttttgtcttttgttttgagacagggtcttgccctattgcccagactggagtgcagtggcaagatcatagctcactgcagcctcaatctcctaggctcaagtgaccctcccacctcaacctcctgagtaactgggactacaggtgtgcaccaccgtgctcagctaattttctttttttttttttcttcctgagacggagtcttgctctgttgcccaggctgaagtccagcggcacgattttggctcactgcaacctccaccttccaggttcaagcaattctcctgccttagcctcccaagtagctgggattacaggccaagccacaatgcctggctatttttttttgtatttttagttgagacagggtttcaccatgttagccaggctggtcttgaactcctgaccttgtgatctgcccacctcagcctcccaaagtgctgggattacaggcgtgagccactgcgcccaggctaatttttaaatttttatagatacggggcctcactacattgcccaggccagtcttgaactcctgggctcaagtgatcctcccactgtggcctccaaagtgctgggattataggtgtcagccacaggctgggcatggtggctcactcctgtaatcccagcactttgtgacgccaaggcgggtggaccacctgaggccaggagttcaagaacagcctggccaacaaagtgaaacctcgtctctactaaaaatagaaataagttagctggggtggtggtgcccgcctgtaatcccagcttgttgggagtctaaggcaggagaattgcttgaacctgggaagtggaggttgcagtgagcggagatcgcaccactgcacttcagcctgggccacagagtgagactctgtctcaaaaaaacaaacaaacaaaaacaggtgtcagccacggcccctggcttgggcctaaggattttgcaatatcccaaaggtttcgcctgaccaatcttatgtcaaacataagagaaactaccataaatccaaacatgtctgcacagtggcattgtttctgcaaatgaagccagtagtttccctacctaatccaaggcccaaaaactagggtcccaggagagtaggatgccccagtccacggttccttctttctagccagcagggctgctgtagccagttcctgatgagtgtcaaacccagatcagaggtggtgcctaaccccagatgccagagccgcaggagctacagctggcgatacagttcccaagactctaagggtcagagtgaaaggggtgggcgggagacgacggttgcagtgagcagagatcacgccactgcactccagcctgggcgacagaacgagacttcgtccaaaaaaaaaaaaaaaaaaagtagaaagtgtggggcggggaggggaaagggatggacccaagcggtagtgacgtctgagcgcactggaaaggggggtttcccaggagggtaggaaggcaacaggagggaaactgaggcccgggggaggagaatgctttctcagggtctccggcgcgtccatgacaagccctgacgacagcccaggtctcccgactccgccgaacccccacccagaccccggtcctgcaacttgcgcgggcgaggggctggaaccccatgagcagttccggaggccagggggccctgcggcccgccagcccccaagctgggcgcggcattaccatagcgacggcgggtgggcctcggcggggaggttggcccggcaccccgagtccggggagtcgccggggccttggacacgacccaggtggaagtctcggactccgagggacagtgcttccgggctggggtcagagggatgagtctctgcgatatagggaaagtcgccaggagactggcggcaggcgccttaggccgcattcgaagacgccgccactggggcgtctccgccttcttaaaggggcaggcatatttctttcccgccgacacaaagggccttctcactgtagtcttccgctctggtcttaaaggggaaacggatgggctctcggtcgcccccaagcggctcctcttcccagtcggctggttcagcactggttcaggtgagatcaagcatcttggccccacgatgcctaatcctgcccccgcccctttcttttccgttcttttttttttttcttttttaaaccgaatctcgctctgtcgcccaggctggagtgcagtggcgcgatctcggctcactgcaacctccgcctcccgggttcaagcgattctcctgcctcagccttcgaagtagctgggattacaggcgtaagccatggcgcccggcctccctgcttgacttaatactgcttcagagcaagactgtggcttttcacctttgtgaaccagcatgtggcacattgaagacactcagaaaatgagtttgtttttgttttgagacttactttactcccttacccagcccggagtgcagcggcacagtcatggctcactgcatcctccacctcttgggcccaagcagtcctcccacctcagcctcctgagtagctgggatcacaggcacacaccaccaaacccagttaactttttttttttttgacacggagtctcacattgttgcccaggctggagtgcagtggcacgatcttggctcactgcaacctctgcctctcaggttcaagcgattctcctgcttcagcctaccaagtagctgggattacaagtgcccgccaccacgcccggctaattttttttttttttttttttttttgagacagtctcgctctgcaggacaggctgcagtgcagtggcatgatctcggctcactgcaacctcttcctcctaggctcaagcaattctcctgcctcagcctcccgagtagctgggataacaggcatgtgccatcatgcctggctaatttttgtatttttagtagagacagggtttcaccatgttggccaggctggtctcgaactcctgacctcaggtaatctgcccgcctctgcctcccaaagtgctgggattacagacgtgagccactgcgcccagccacgcccagctaattttttgtatttttagtagagacagggtttcaccatgttggccaggatggtctcgaactcctgacctcaggtaatctgcccgcctctgcctcccaaagtgctgggattacagacgtgaaccactgcgcccagccacgcccagctaactttttgtatttttagtagagacagggtttcactatgttgcccaggctggtcttgaacacctgacctcgtgatccacccgcattggcctcccgaagtgctgggattataaacgtgagccactgtgcctggcctaagcccagctaatttttttatgtttatttgttgtagagatgaaggctccctatgttgcccaggctgaacaagtgtttgttgaatgacttgatgccatttgtcaggagggagtgcgaatggctgggcaactcaatgctcacttccgcggtggctcttgcctgtaatctcagcactttgggaggcagaggcgggcggatcacaagggcaggagatcgagaccatcctggctaacatggtgaaaccccgtctctactaaaaatacaaaaaaattagccgggtgtggtggcgggcgcctgtagtcccagctacttgggaagctgaggcaggagaatggcatgaacccggaaggcggagcttgcagtgagccgagatcacgccactgcactccagcctgggcaacaaagcaagactccgtctaaaaaaaaaaaaaaaagaaattagccgggcatggtggcgggcgcctgtaatcccagctactcaggggactgaggcaggagaatggcttaaacctgggaggcggaggttgcagtgagctgggatcatgccactgcattccagcctgggcaacaaagtgagattctgtcgcaaaaaaaaaattaaaaaataaagaataatac

SEQ ID NO: 1243739 - DNA, 4001 bp, Homo sapiens
gtcaattatctgagctgtgtaaatcattgtctggcactacagttgaatcaccttgacactgagctcaggagcagcccatttaagaagcatcttgtaaataacaaagtgacaccttcgagattacagttgcagctatgcaagtcattcacagagtagctgagggctctcttctgaaggaggacccattacatgaaggtagacctttcatgtcttgttgccgacgtccaagtctcttgcggtccagaaatgccaggatggttgtttcaaatgcattgggtatgaattgcaccttgaatctgcccttccctttttcgattaaaccttttcacatagctgctgctgctccttagcagtccatcccctggacggaggcggcctctcaggacctggagcagagctgtagggagctgccgtctcttatggtagatgtggcccatcacaatatacctgctgcctggacaaaataaccagaacattaattcatagtgtcttttaaatgccatgaaacagaaaatgtaaggcctttaagaaacgcctaagctgcaatctattatcttgctgcacaagttgaaactgatattgagtctacaggcatctggtggaaacagcctagccacctttacaagataaccaaccaggccggtgtggtggctcacgcctttaatcccagcactttgggaggccgaggtgggcagctcacttgaggtcaggagtttgagaccagcctggccaacatggtgaaaccccgtctctactaaaaatacaaaaattggcagggcgtggtggcgcatgcctgtaaccccagctgcttgggaggctgaggcaggataatcgcttgaacccggcaggtggagggtgcagtgagccgagatcgaaccactgcactccagcctgggcgacagggcaagactcaatctcaaaaaaaaaaaaaaaaaaaaaaaaaaagcagtatgtaaccggaccacattacagaacaaaggtccttatcacaatctatcaggatttcccagagcacatgtctagaaagatgtgggagtgggtattccccgctaccaaccccacatacacacccaaaaaagcagcttttctaaactcggttctgtacagtcccttctggcaatggtgtttggtcgtccaccccatttgtcaacatctatttattgacagcccgctttgtgccaacccttgctgttctcacccttgagggtgggggctgacagggcttaaatcacagagtggccggaataatacctgtcgtctaaatcccattcatgtcattgtttcccatcgctcccaaaaaaaggctgggcgacctacagcccgggctgtggcacccacgttacaaacggtggtataaagtacatatgcagcgtcattcaggtcagtttcaataccaggtttaaactctggacacggcttattgcagctggaggagtccagggctaacatgtggactcggaagaagaagccgtcgggggtgaggtacaggcggttcatcttgtacagcccgtcccgatccaccagcagggtcaccagccggatgcccgcgcccagcacgtccacatcgtgcacgatcccgttcaccgctgcttccgaaaaacagtttggagaagagcattaccccgagttcctctcccagtcccccaggaggtggtttttagcaaccgcgaaacggcccgcacgggtcaggcgccctgggatctcgcgggcggattctccggggctcggaaaggctcgcggggcggcggggcggcggcgcggcggccgggctcaccgaattcgctctcgcagaacgcctcgcgttcgtccagatcggaccggcaggcgcgcgcgcagggctcagcgccgggctccgcgtccctctgcggcgggctgaggccgaagctgaggctgaagcgcggcggcggcgcgggcgcgggtcccggggccagcgcggcggcgcgcggccggttggggtgggcgtggccggcggagccctcggtggcgagcgcgggcggccgggcggcggggaagcgcagggcccgtgagcgcgcgcgtcgcggggcgtcctccgacgcgggctcgcggcgcggcgacgcgcggttctcggcttgcgccaggcgcgggcccggcgggccagcgggcgcgcgtgcggcctcccggaagctggcctggttgtcggccggcggtgggggcttccggcggcgcgggtcaggccaggcgcgggcggcgggagcgacctcggccgcgcgcggccgctgcggggcctcaaggagtggctgcgcgcggggccccggtgtctcctccgcgctcgggcagccgcgggagtccggctttctgctgtgcggcggcgaggctgtggggagagaagaggagaggcgggaaggcggtgggggaggagaagcagtgaggggaggccgtcggggaaagccgaggaagccgagaaggaagaagagggaaggggaggctgagacgggaggccgagaggggaagggaagccaggaggggaggaggccgctagtggggcaggggcgctgcagaagaagggctctgggagggggagaggagatagaggacaagggaggcttcgcaggcacctgcaagaggagagatgggagggaggcccggaggcctggaagtgaagcagggagaacccggacgcagcgtcgcggccaagcggggcacgcgcttcccaggccccaaaggaagaaggatacgagggtcttgacctctaagattatagcttttaaaattacaaccccctatttactctaagactaaacatgtcttacaacactggttagataacaaacttttttgcccttcctttaatatatacgtatatgtgtgtatgtgtgcgtgtgcgtgtgtgtgtgtgtgtgtgtgtgtatatatatatatatatataaaacatatataaacatccgcctctttgctatttacagtttgttgagaaagtaccaagagcaaaccccagggggaaaggtctcatattacaggttctcctaattctttaagcgcccctgacaacagaactatttggttttcccatccatgtttacactgtcatcccggtctctgcagaatcgagcatttgtaagtggatttttatctggcttcttggacaccacttactggtaaaccacagctaaggaaggttttaaaagcttggctgggaggcagagaggcccctggttaagtataaaagcacacgtcgcttacatttttttccccattagatgatggaggaaagactcctaaatggtatggcatgaaaacaaatttttaaaattattaatgattttccctagttctgcagacaggttggtgagtaaacctcagccagcttgggagctgggcacctttccataccagttacacaatttcacctccttgcttgcctgggtcccagtgccctccaaacaggcaagaactagcctttatttttctctccccttgcattaaagagatggatctgcccatttgcagctctggcaacacttcatttaaagttgatcagtcttgccaaatcgataatctgctttaaaatcagctttcacccagcaataatagctggttagagttcatgtttttgcaaagaggttgattctgactcattatgttgttaaacggttgtgccatgcacagctgaataaagttctggtggatatccaattcctgactgtcaactgttgacctcacaactgcttccccattgatataaccatctgttgtcatgggaaagattgtctgatatttgggttaaatgccactgaagtcattcaatttccatgtggaaaaataacccagagtaaattgccctgtgaggtacggaaactgtttttcccagagatagcgaagccgacagaacatccaaataaaagcaaaacaaaaacacgatcccccagagaacccctcatttcttcacgggctgagtaacttaatttcatttcgtgcatgaagtataagagtgtgtgcgtgttagttaaaccccggctcaggtgtcccaaggttgtgcgctg

SEQ ID NO: 1243740 - DNA, 4001 bp, Homo sapiens
gcaccagccccaagggagctgcgtgaacaacaccgaccctcattcccattcctttggcttattaatcactgcaaccccacacagactcagcctcagccttcgcagcagcagcactttaattccacaaaaactcagaaagccaaaactgattagaacactccacaacaggtgagcttcaaaaccagcaacattctacctgaaccctgagagcagtgagacgcctcccacctcaccccctccgccgtgcaacccattcctcctagctgcacgccggttctggctggggaagtggtatggtagagggccagagggcagaagcagaaggctctccatcagcaggggtgcatctttgcctgcggggtgtttggccaaggacggcacaagctcccacagcccctggcacctgagatgtggccactggagtcaggatagccacagtgggggctggggcttcctctgtccctttctcctgattacatgtgggagtcacgtcctcaccttcaagcagacctaaagccccgtgttcccagggctggtgctctagctagggaggagagttgggaagaacagggtagctacagatggccaactgaatacaagcagagcaacatcccttcccaccaggagagccgttagaacttccccacatacaccagcctaaggcccagcgagtgggcacgggccagctgaacgcatctggaagagcctccaacacacaggcctcccctcagtgggcacttcccaccaggactccctgaagagtccttagggtcctgctgggccctgccctggccaggaccggcctctcctgtcctcctggtcacttgcacagggcctccaacacctccagagtacgtcggatatcccggacttggcgcgccagcccctgaaccggctgcagagcccgctccagctcctcgcagcgcgccagcagggtgtacatgcccttgatgctcatgtccacggcttcacctaaggagtccacagcatcgcggtaggtctggatgcaacccacgctcagcgccgtcagctcctgcaccgcgccacccagaccgcgaagcagacggtccacccggcctcccagctcccgactcaaccgctccagatcccgcagcacctcggggtcgattgggggaatggccggtgtgggtgtgggtgcaggcgctgggcagggccgcgcaggggcagaaggcgggggtggaggcgcgccgctcagacggatcttgagttgcaggttgttggcgacaaagtgggtaaggtcgccgtggcggctcactgtgccttcgagctccaggggactggagatggtggcgcggcgtccgccgcccgcgccggactcggcactccctgaggacccggcgccaccgcacgcctcgctcagcccgtccaggctgcggctgtcctgaagacggctggagaacgagcggccggctctgctgcccgcggccgcctcctcgtcgttgtcttcctcctcctgctgctcaacatccatcccgccgcctggtccccctcgacggcagtccctcccggaggagggcttgccctcgggcggcgccgggttcttgtgccgggaggacagggaaggttcgtgctctgcacccggcgcccccctgcggctcccggccccagacagcgtcccttgagggccgggctcgttctccagagcctcccgttccggccggtggacgacgccgcagcttgacgtcttcggggacgtcctggggtggcggttcgcgcccccaacgttctcggtctcttcctccccggacacccggaggcctgcgggcggctcagaggacgttcggcccggcccgccgccaaagactagggcctgatgttccgctacagccagaaggtccgtctcgggcccgggccgcccccgagacgactccatactgcaggtgggggccgcaacggaggaattggttcgccccggctccggaggcagtggctgcgcctttaaggggcgttggtagaggcgagccgattggcagcggctgacaatggtaaggacaggaaaagcattttgattggtcgcggcgaccaggaagtcccggaagaagagctgttactgcacagcggaacacacgtgaacgccggcagggtggagagaaggaggtgacagctgctcccgtcgccccgccctttctgaaagctgatggggcagatcttaaagaccaaggtcctcaaattcctgagtcccgaggggtggggctcagatcctttctgcctgtaattgtaccccccccaacagtgattgcttagcaaaaataccaagtggggagcccacttggggttcctagagaggttcttaggatgaaaatggcatatccttcttggaccatcagggttgaacctagttgactaaaaagaaggaaaccagaagtccagcatgagcatgaatggtttgctctatctttcttggttaagagacctaaccactgaactgctcagagcgacccactgtggtcaaggcagcggcctctgggctttcctatgcgtttgtcactcttgttctgtgtctcttgcccctttcacactgaggggtctcgccccttggaggatggcgtgtgattttgccacgaggtaaaatattcaacaaatgaaatgatcacaaattttgatatgtgctatacaggaaataaagtgttatgattgagaatataactgagcaggcactagtttaggtaaggggtcaggaaaatacctctttggtgagacttttaactaaaaagaaccaaaaagacgcagccaccccccaggcagagagaagaaaacttgagctacctctcagagacaaagaagtcttgacgtattcaagaaactgaggtgagggggcaggagacattgggactaaaacaaaatcagcaagataaggggaaggatttcgagccaaggagctgaacaggcagcaggggccacgtcatgcagggggccttgtagttcctgttagggaatggagatttcctctaaatgcaatggtgcagcgacattggaaaggttgtacattgcaacacatagccaaagcttggagacatcagtatttttatttatttatttatttatttatttatttatttatttatgtatttagagacagagtcccactccgtcacccaggctggagtgcagtggcgcgatctcggctcactgcaacctccgcctcctgggttcacgcgattctcctaactcagtctcccgggtagctgggattacaagcgcccgccaccacgcccggctaattttgtatttttagtagagatggggtttcaccatgttggccaggctggtcttgaactactggcctcaagtgatccacccgcctcggcctcccaaagtgctagcatgacaggcgtgagccaccgtgcccggccagacatcagtatttaataaaaacagtttgctaactctccttagctgacaaaggatgtggttgttttttccatttggatagagagatgtcttgaggcagtgtcatgccagcattcagaagtgcaactccccagaacttcccagcactactatccccaggtgcctgccggggtcctagccagccaaccctaatgatagtagctcaatctttcaccacgcctgaggagtccacaattgtcagctgtctgtatcttatagtcacctgcagcttgacaaaacctgtcattcctttgctctaaaaaaaaaaacctaaaaagctcatatataattgggctgggtaggtagatattctttagaagatgggaggacttcccttgagaatgggaagctgagcacaggaagagagtgatgtgatgggattcatgtttagggattactggctgttgtagaaaatgtttgcaagggagacggtagaccagtgaggaggcggttccaagtaccaggtgatagtagctcagcctagcacgatgtggatggatgcattctagatgtatcttgaaggttttagcggacaaatgggctacccaccgtctctctgtgtaggggaagctcctcactcctcaactccc

SEQ ID NO: 1243741 - DNA, 4001 bp, Homo sapiens
cgaagaggtctgaggaccagggaggaggagacatgggaacccacgatcacccatcacgtggttcaaaacaagtacaaaggaaaatatggtgacctcagaaaagctcatagagtatattaaatacgctgggtgttagtgattaaaaggggacaaaacagacatgcattatctgtaaaaccaagtacaccagatagaatttgaatggatacaaagaaacaaaatagccattagatttcaaggtaatagaaaaaagagaaaatattttgtttcattttcatcctttttgaaagtcaggcttccggttctggggttctggggagggacgtggagagccttaccaaccagcagggaccaggaccggatgcctggagccctcttcagatggaggcgggagctggtgcgggtctccacctgcaggtacatcccgagagggcagcaccactctctacaggaggaggggtctgggaacagacagaggcagctgagcccttgggcctgcacacaggcaggcgcccacgccatcaggcccagtctggaggccaagagcaggtcccccaactaagtcacctgcagccccagacaccatcagccagtctcacctggtctctgtggttgggcacgtcactggatcccccagagaccccgtttcctgtgtaaggaaggcccttttccgttcacagcgacaccgactgcgcgggggctgtttcccgctcagactcacgagctacagctgcatcaccacctgccccgtcctgtctggaaaccttatgtcctgaggccgctagcccccagcagcctttaagcttctagcatctgtgggcaccccctctcccctgtgctggcctccaccaagaaaggaactgaaagtcccatcatggcttccggccgtactggctctcgcactggcatggaccaacgatctcagctctctctctgccctcctccacctgctgaaagttcagactgcacagtagagggtcccaaagcggccagaaccgacgagtcaccaaaggggctaatcttccacagcggagttccgcacgggcgcagcagccctgccacttcaccgtacgctcccaacactggccccagggaccccgttctggtagtttctcagggctttccctgtgaagtcaaatcaaatttctgacattaagtagggggttcaggctgggcgcggtggctcaggcctgtaatctcagcactttgggaggacgaggcgtgcggattgtttgagtcacggagttcaagaccagccagggcaacgtggcgaaaccccgtctccacagaaaatacataaaacagcccggtgtggtggtgtacgcctgtggtcctagttattcaggaggctgagctgggaggatcacctgaggccgggaggtggaggctgcagtgagcagaaatcgtgccactggactccagcctgggtgacagagtgagaccgtgtctcaaaaaaataaaaaatagtgggttcaaatcacacaaaccaatcctagatgctggtatatgactgggctccctcccgggcctcagttgcctcattgctcccgaaacacccggcattccacatccaaatgcacacacacacgcacactcgcggacacaagcacacgcgcgctggcaaagccgcccgcgccgctagtcgcaccgagcgctcgtttctttgtccggatcgggggcgctcccgccgccggggccaacctgcagcggaacaggcgcgaggccgcccgcgacgggcacggcgggacacggaacagccggcaggcgggcccaggacgcagacccctcccggagtgggcctaagggtgccgggacgcgcggcacggagcgggaaggaagtgcggagcccacccagcccagccgcctaccgagagcacagcggtccccgcgccgcagcagagagacgcgaaccggcgggggcggggccgcgcgcacttccgggattggagcggagccgagccgactttcgggggcggggccgcgcgcgcttccgggattgggggcggggccgcgcgcgcttacgggattggggcggggccgcaagcatttcctggatggggcggagccgagcggatttccgggatccgggcggagccgcaggaggaggcgggtggttcctgctaaagaagccagttttcttgaaaaaaagaaacgtgcggggaaacgtatccgacagcaaagaacttaccaaggactatgaacgtcttgctaacatagaagcgaaactgaagcggttctcattgccaaaaaagaagatttgagcatgaataagaacaggaattcgagtgaatttaaaatcctcagatgctccagtctgtaattcataataatgtattttttaactctgttcacctttggaggatgctggtaagctcaccccagtttgtggcctggttaataaaaggaaagcatcaagcatttgtcctgcctttatgaaatttacagcagagtaaccaaatactgcatgagaagaatttctcattatagaagttttcccgctaataaatgaagaagaaacagtaggattaaaacatcaccctatgaattaacggacctaggcaatgtcatcaatgactgctaattaacatcgcaaaaaggtcagttagatatcagaagtacacaacactatgaagtagtcttgccagaaaaaatttaacctgaatgtgaacaagcttctagagtgaattactggaaatgtggaagacaagactgtactaaaggattctacaaggatacagtcagcaattcgaaacctcaaccatctgaatggacccttccgcttggccaagagcattcccaagttatcctgaaaaactagctcaggcagtgatgggaagggggagacagacatacctcactccctcctcccttttggaattcaggcacacagctgaccagcattcacattaaaacagatcttgaggtggccaggtgcggtggctcacgcctgtaatcccagcactttgggaggccaaggtgggcagatcacgaggtcaggagattgagaccatcctggctaacacagtgaaacctcatctctactaaaaacacaaaaaaattagctgggcgtggtggcgggtgctcatagtcccagctactcgggaggctgaggcaggagaatggcgtgaacccgggaggcagagcttgcagtgagccgagatcgtgccactgctctccagcctgggcaacagagtgagactccatctcaataaaaaataacaaaacaaaacaaaaacagatcttgaagttgacaaagtagactctgtagcaatgacgccaaattccagcctgactctggtataggactacatgacagataggaagccttggaagaaatggaagtactttaccccacattaaatttcttcgacttattttgaaatagccctgcaaagctgtcccttgtgaagaaaatctacattctgtagcgaatccccgttcctttccaggtctttttcctgcttcagggagaactctgataagaagcacttacaatctattctctctgaagcctgctacctggagacttcctctgcttaatggaaatcttggtctccacaaacccttatcttaacctaaaaactcccttctgttgattctaggtctttagacagtaacttaaccttttcaaccaattgccagatagaaaatctttgaatctacctatgacctggaagcccccccacttcaagttgccacacctttctgaaccaaaccaatgtacatctacgtgtattgactgtcttatgtcttccaaaaatgtatgtagcctaaccaccttgggtacgtgttcttaggatctcctaagggctgtgtcgctggcccttggtcactcatatttggttcagaatctcttaaaatatttttcagtttgactctttttgacaacatgggaaatcctacaggcaaatgacctgatttttaaaatgatatatacaaagagaaggatatggatagaacctacaaatttgaaaaatgacaactttaagatcaggaactct

SEQ ID NO: 1243742 - DNA, 4001 bp, Homo sapiens
tgtaggaacagctgtggtcaggggttacagaccaccaggttcagagtaggggaaacagccaggaagctggttcaataatgcagtatagctgggcgtagtatcacacacttgtaatcccagctacctgggaggccgaggaaggaagagcgcttgagctcaggagtttgagaccagcctgggcaacataacgagacctcattactaaagaaaacaaaagcaaaacacagtatacgctattcacagtatttactagacacatctgctgtgtgaggctccataactgacacgggtgttactccagtagcacgtggtgaggcctgaagactgtgcacaaagaaattacaacacagcgtgtcatgcaaaacacacaggaggctgtggcgtgtcacaaaaaaggtgggccccagctgctgaggtacagccagcaccactcctcacacggtgtcccgtcaacacaagtgcagctgtccccaagggtacaggaccctactggtgggtagcgatggaggacgggaggctaagtggactgtgagtcctacgaagaggtctgaggaccagggaggaggagacatgggaacccacgatcacccatcacgtggttagtggactgtgagtcctacgaagaggtctgaggaccagggaggaggagacatgggaacccacgatcacccatcacgtggttagtggactgtgagtcctacgaagaggtctgaggaccagggaggaggagacatgggaacccacgatcacccatcacgtggttagtggactgtgagtcctacgaagaggtctgaggaccagggaggaggagacatgggaacccacgatcacccatcacgtggttagtggactgtgagtcctacgaagaggtctgaggaccagggaggaggagacatgggaacccacgatcacccatcacgtggttagtggactgtgagtcctacgaagaggtctgaggaccagggaggaggagacatgggaacccacgatcacccatcacgtggttagtggactgtgagtcctacgaagaggtctgaggaccagggaggaggagacatgggaacccacgatcacccatcacgtggttagtggactgtgagtcctacgaagaggtctgaggaccagggaggaggagacatgggaacccacgatcacccatcacgtggttcaaaacaagtacaaaggaaaatatggtgacctcagaaaagctcatagagtatattaaatacgctgggtgttagtgattaaaaggggacaaaacagacatgcattatctgtaaaaccaagtacaccagatagaatttgaatggatacaaagaaacaaaatagccattagatttcaaggtaatagaaaaaagagaaaatattttgtttcattttcatcctttttgaaagtcaggcttccggttctggggttctggggagggacgtggagagccttaccaaccagcagggaccaggaccggatgcctggagccctcttcagatggaggcgggagctggtgcgggtctccacctgcaggtacatcccgagagggcagcaccactctctacaggaggaggggtctgggaacagacagaggcagctgagcccttgggcctgcacacaggcaggcgcccacgccatcaggcccagtctggaggccaagagcaggtcccccaactaagtcacctgcagccccagacaccatcagccagtctcacctggtctctgtggttgggcacgtcactggatcccccagagaccccgtttcctgtgtaaggaaggcccttttccgttcacagcgacaccgactgcgcgggggctgtttcccgctcagactcacgagctacagctgcatcaccacctgccccgtcctgtctggaaaccttatgtcctgaggccgctagcccccagcagcctttaagcttctagcatctgtgggcaccccctctcccctgtgctggcctccaccaagaaaggaactgaaagtcccatcatggcttccggccgtactggctctcgcactggcatggaccaacgatctcagctctctctctgccctcctccacctgctgaaagttcagactgcacagtagagggtcccaaagcggccagaaccgacgagtcaccaaaggggctaatcttccacagcggagttccgcacgggcgcagcagccctgccacttcaccgtacgctcccaacactggccccagggaccccgttctggtagtttctcagggctttccctgtgaagtcaaatcaaatttctgacattaagtagggggttcaggctgggcgcggtggctcaggcctgtaatctcagcactttgggaggacgaggcgtgcggattgtttgagtcacggagttcaagaccagccagggcaacgtggcgaaaccccgtctccacagaaaatacataaaacagcccggtgtggtggtgtacgcctgtggtcctagttattcaggaggctgagctgggaggatcacctgaggccgggaggtggaggctgcagtgagcagaaatcgtgccactggactccagcctgggtgacagagtgagaccgtgtctcaaaaaaataaaaaatagtgggttcaaatcacacaaaccaatcctagatgctggtatatgactgggctccctcccgggcctcagttgcctcattgctcccgaaacacccggcattccacatccaaatgcacacacacacgcacactcgcggacacaagcacacgcgcgctggcaaagccgcccgcgccgctagtcgcaccgagcgctcgtttctttgtccggatcgggggcgctcccgccgccggggccaacctgcagcggaacaggcgcgaggccgcccgcgacgggcacggcgggacacggaacagccggcaggcgggcccaggacgcagacccctcccggagtgggcctaagggtgccgggacgcgcggcacggagcgggaaggaagtgcggagcccacccagcccagccgcctaccgagagcacagcggtccccgcgccgcagcagagagacgcgaaccggcgggggcggggccgcgcgcacttccgggattggagcggagccgagccgactttcgggggcggggccgcgcgcgcttccgggattgggggcggggccgcgcgcgcttacgggattggggcggggccgcaagcatttcctggatggggcggagccgagcggatttccgggatccgggcggagccgcaggaggaggcgggtggttcctgctaaagaagccagttttcttgaaaaaaagaaacgtgcggggaaacgtatccgacagcaaagaacttaccaaggactatgaacgtcttgctaacatagaagcgaaactgaagcggttctcattgccaaaaaagaagatttgagcatgaataagaacaggaattcgagtgaatttaaaatcctcagatgctccagtctgtaattcataataatgtattttttaactctgttcacctttggaggatgctggtaagctcaccccagtttgtggcctggttaataaaaggaaagcatcaagcatttgtcctgcctttatgaaatttacagcagagtaaccaaatactgcatgagaagaatttctcattatagaagttttcccgctaataaatgaagaagaaacagtaggattaaaacatcaccctatgaattaacggacctaggcaatgtcatcaatgactgctaattaacatcgcaaaaaggtcagttagatatcagaagtacacaacactatgaagtagtcttgccagaaaaaatttaacctgaatgtgaacaagcttctagagtgaattactggaaatgtggaagacaagactgtactaaaggattctacaaggatacagtcagcaattcgaaacctcaaccatctgaatggacccttccgcttggccaagagcattcccaagttatcctgaaaaactagctcaggcagtgatgggaagggggagacagacatacctcactccctcctcccttttggaattcaggcacacagctgacc

SEQ ID NO: 1243743 - DNA, 4001 bp, Homo sapiens
agttaattttcatttttcccctctttttttctgattaattttataaagtttctagggacggtttcaatatcattaaccctagttacagatgagaacaatgaggcatcaaaagatttaagcagctccttgggggaatgaacagggattcatttactcactcacttggcaaatgtttactgactgcatcagactgggcccatttctttgcatccctagcctctagcatcgtcatgtgatatggtttgaatgtgtgtcccctctaaatctcatgttgaaacgtgatccccaatgttggaggcagggtctgatgggaggtgtttgggtcatgggggtggatccttcatgaatgggcttggtgccctccctgccccaattaagtgagttctcactctgtcagttcatgtgagagctggttggtaacaagagcctgacacgccctcctctctctcttgcttgctctctcaccatgtgacaagcttgctccctcttcatcttctgtcatgcttgtaagcttcctgaggccctcaccagaagcagatgcttcgtgtacagcctgcaggactgtgagccaaataaacctcttttctttataaattgcctagcctcaagtattcctttataggaatgcaaaatggactaataaaccatgcatctaatgactattcagaaaaagtggatgatggtgatgatgagaaagaacctttgaccacaaaagtggggcaaagaaagctgaaaattaggccaggcccagtggctcacgcctgtaatcccaacattttaggaggctgaagtgggtggattgcttgagcccagaagttcaagaccagcctggccagcatggcaaaacccaatttctaccaaaaatacaaaaaaatcagctaagtgtggtggcacgtgcctgtaatcccatctacttgggaggctggggcaggagaattgctggaacccaggaggtggaggttgcagtgagccgagactgagccactgcactccagcctgggtgacagagcaaaactgggcacagtggctcacacctgtaatcccagcattttgggaggccgagatgggtggatcacctgaagtcaggagttcaagaccagcctggccaacatggcgaaaccccctctctaccaaaaatacaaaaattagccaggtgtggtaatgcatacctgtaatcccatctactcaggaggctgaggcaggataaattgctccaacccagggggcagaggttgcagtgggccaagatcatgccactgcagtccagcctaggtgacagagtgagactctgtctcaaaaaaaaaaaaagaacaaagaaaaaaagaaagctgaaaataagtggcaacaaagtgactgtgaaataacactagaagtcagaactggatttgcccctcacctttcaaaagcttctcagaaaagtatgaattctagtctgtgttcggggagaacaaggaagatcccgtccagaccactctgaagggaaaggccagggggagggaggtgcatggagaggagatgggacacaggctcctccaggtcctagagacaggactctggctgatcaactcctccaacacagcacacacaccacacaaccacacacagaccatgtgtatacatacacatactctcaagtcttcataaccaacaatgagaggcgacctcttccccatcatctcgccaggaacacaggtcatgcataaacttctgaatgaatgaaagttcttgtgctttaggcctcttgctatctcaggtaccctatcattgttcttctcttctttcctgaatttcatgttctctactttccaaaaccagcccctccgggaccctccttccctccctccctcacaccccacttcacctgctctagtggcttgtccccttcacccccttgcccatctgaggcctccatctcagcaggtgtgccggtaggctccagggtggcactccccacgtcccctctggcttctgacccactgcttctgtgacctagccgtctcagggagtgggcggtttggctccagaactcggagcaaagccacggcaaccgccaacacagaacccagccccccaccccgctcccatttcctcattcttaggggtggctgcagctggcccctccagctgggatctggactagggaacggagcaagatgtgcggggtcgagcgaagactttggcagagcgcacagcaggccaggagaggctggcgccccttctcccaagaatactgtcagatgctgatcctgacaccacctggtaaggctgttgaactcattttcctgcacgtgtgccattcctgcctgctgggttacgccgtggtgggggctccccgagaggaaagcacagtttgtaaaattcttttctgatttgggacagaggtctagggagagctgaaagggagaagggacacagtgagccagcactgcccctgcggcctccaggaagttgttaataataagccctccgtgctgggtgctgggtgctgggtactgggtgggatgtgtgtgttttgggggtgtataaagatccccgccagtgcctacgggctctgtaaccctccccgcggccttccctggggcaggtaccgcagcggtcccgcttcacacaggaggcgctgagacgcgggcaagtcccgtcgccggcctcgtgtgcgcagccaccaggcggggagccgggtgtcggcgaaagtcccgccaccccgactcttcctacccgcgagccctccagggacccgaggccgagggcggaaacgcggtgggcagagtccgggtgtagtctgagttggccgggcagggccgggaggtgctcaggaggccccgggaccctcgcccctggcgcggcagcagcgccccctcgcgtccctgggcggcacacggcggggtcccggcgacgagagaccgttgcccccgcagtttcctcactcgagccaccttttcttccctgaaactaggaattccttctcccggaccttccttcgtgtcctctgggcccgggcccagttgtccccactcagtgtggccctgttcttcgcctgccttcgcgacagtgcggtgggaccgccgtcggcccgggcctcccctgccacccagcggccacctcgggcacaggagaggggcatagcggcttcaagtaggggtagcccggaggcccggagctttggaggagcaccctttgagtccagaaactttttaacttgtcctctatgccagcatgttcagcaaacgtcttgttgttattgttgtcgttgttgttgttgtaaggggaggaataaaccttccacttatccgcctccaagatggaaggtctgttttctgatcattaattccagattattttgcgagtattaagaaggataattatattggcaagagcaaggggaaaggaacctttacatacgttcctactggcagtgagattggtaaacaatgtattttaaagtgtttaaatgtgcatgctctgtgactcaccaattctacttataggaggaattagtcctaaggagagaagatgatgaggactgttacaatagtgacaatttggaaacaattgcagtgtcactaatagaatacataaatcatggtatattcataaaaacatgaaatatgtcactatatatctattgacatggaaaacaggaactaaaaggtatgattccatttttgtacatatatatttatatatgcatagaaaaaagtcttgaaggatacacttcaaaatatcaaaggtaatttttcactttcttcacatattatctgtatttttaacaataacaattatgctttacttttacagtcaggaaagaggtttttttgtttgtttgtttgttgtttgtttttgagacggagttttgctcttattgcccaggctggagcaatggcgtgatctcggctcactgcaacttccgcctctcgggttcaagccattctcctgcctcagcctcccgagtagctgggattacaggcttgtgccaccgcgtctggctaattttgtatttttag

SEQ ID NO: 1243744 - DNA, 4001 bp, Homo sapiens
ggatcgggtccatccttccccctatatcaaaacgcttaaacacacagtttctttttctttctttttttttgagacggagtttcgctctgtcgccccggctggaatacattggtgcgatctcagctcactgcaacctccgcctcctgggttaagcaattctctgcctcaagcctcccaagtagctgggactacaggcactcaccacgatgcccagctaattttttgtatttttagtagagacggggtttcaccatcttgaccaggctgatcttgaattcctgaccccgtgatgcacctgcctcggcctcccaaagtgttggggttacaggcgtgagccacagcgcccggcctaaacacatagtttttaactgctcaaagctgcatccataggatgaccccagaccccctaaagtatcttcctgggaaagctgccaaaagaactcactgttggctattgccaacaccttacaagcagcccctgatgtccctttcttaaagagttaacaacaacaacaaaaaactaaacaattgtgaatccttcctctgtctctctgggatgtaatgtctcctacacatcaggagtatccttctcaagaacctgaaagccattcctccaacatgcaatcaccaggaagcaaagggcctatctcccagttactgtgggaggataggaccctgactcccataacagccatctaacaggcactgtcgcctaaccttacttacactgacccacccttcacaagtttcactttcctgactactgagttcctgctcatccccttcacattccctcctcctccctcttaaacacctagtcacttctgcacaaagttcagttccgttcacgaggtaccttcttccctattacaatagtatattattaaaatctgctttaccacttttactagtgtctagctttatcttctacagttaatacaaatatacgcacatacacatgcatatatatgcacacataataatatatacatacacacatacacgtatatatacatctatatgtgtattcttaatgaatgttatgtcttctctaatcgtttggaagatattatcaagtatttctttgcagttttcctatgatctctgcgtttcttttctgttcctttggtcccttgcttcggtgtgtgttttctttccatcttttatgctagaggaagtccgcaagcaacaagtggtcctcggctcccactcctatgtatgtatgtagtaggaaggaagccgctgagtgcagctgtgcgcgccggggcggtgcctgtgcctctctggattccgtgtttcttcgggggtgctgagcagcggtgcttccgcgtccgcgttctccgggtagctgatgtgctgcaggctgcagcccgcgtggtcgcggctcaggtccgtgttgggctggtaggactccagcggggagcgagcattcctccggaacctggggctggacgacagcagcaggaggcgtgctcccatctccggtagtccccggctcccgctgctcccctttctccccggcctcgggcgctggcgggcgcgggcgagggggtagcgcaggggaggcccgcccgccacggcagggggcggaaaccgcggccgggctcggggtcagcggcgacgagcgggcggctgccccgctcgccctcggcctccgcgcccgcccgccgctccgcagcggaggagccctcaggtttgcgttactgcggccgccacacctacctcagcccgccgcggccaggtcgggcggtgccgcgcaggccgcctccccccctcgcttcccagtcggcttacgcatccccggcggcggcggcgccggcatcggctagaggttcggctcaagtcgggggcactcgtgtctgcgccgagcggcgggcgtgagcgcggcccctgggccccgcgcggcgcggtgctgcgaggaggatcctcgtggccttgccccgccggcggctttccagaattttctacgattacgaagttttggcattcaaccctccatcctctcaaacgccccactgttactccgcccccttcccctaggccccgcccccagccgcagtgccctgcctcttccatccgtctccagcctcctccacggccccgccccctcaggccggtccgtctcccctcccacctcacacctccgccccgcccgtcagccctggctccgcccagccacggggctcgccgccacaggccccgcctccagctcgcggccccgcgcgccggatcggcgtgcgtgcggctggagccttaagcgtttcccccgcccggcttcatccctgctggcggcccagcgtcgttctcctcctgcgcgaggcggccaaggcctgctggcccggagccgcgcctccacccgcgcgaggtagggcttcgaggaccggcgcggcgcaggtctccggaggcctcccgagaggggctagggtcgccgggccgcgcgtgggagcgggtggggcccgggaggagacggcgccccggaggggagtgcgaggcctgggccgacggttacgggcgccgaccggcgttgcctggcctgaacgcccggcctttcggtggagggcagcttgcccctgtatgttgcgcccttccgtgggtcagaccggcggcaaggtgaggcggcggcggcagcagcagccgccttgggctcctggacgcgctcccgaggtggggcgggttggggagtggggattggagcgtgatggctggacgtcgccttctcggcgcggcaggtcccgggagacggggggacgaggcgcagtcccgccctcgggagagcggagccaccttcactgagggcgcccggtttggccccggaaaggcaggaagggggcggggaagggatggcgagctcggggtgcaccgcctgtttcttttctggttaggtatcgtccttggagaagatggaagcggagaggcggccggcgccgggctcgccctccgagggcctgtttgcggacgggcacctgatcttgtggacgctgtgctcggtcctgctgccggtgttcatcaccttctggtgtagcctccagcggtcgcgccggcagctgcaccgcagggacatcttccgcaagagcaagcacgggtggcgcgacacggacctgttcagccagcccacctactgctgcgtgtgcgcgcagcacattctgcagggcgccttctgcgactgctgcgggctccgcgtggacgagggctgcctcaggaaggccgacaagcgcttccagtgcaaggagattatgctcaagaatgacaccaaggtcctggacgccatgccccaccactggatccggggcaacgtgcccctgtgcagttactgtatggtttgcaagcagcagtgtggctgtcaacccaagctttgcgattacaggtatggtcttcgtggacactcactgtcccagaatgcgccgtgggaatcaggatttcatagagtggtgtagaggcctgctttaatctctgctgatgacctaaactcattttgaggaaacaagctaataaataaacatccctgagtttgtgcaagcgtggcagctttgcagtagtcatttgctgagacgatgcatccagcctccactcctcagccagcctgcccttttgggtaataaaacttggctcctaacgttaatacagaggtttctaagtggtgcctgcttcatggccactgtatattttagcttttgttcctatcgattatctccttattttaaataaggaaaaatgaaatatggacaaattaacttttcccttcagccgcaaaactgatgggtcacaggttttgtactatgaatgtgcagtgaaaacaagtgtcattccaaggcagcacttttatgtcttttgctaatatagctgttggtaccatagcgaaatatactcaaaaagaacactgaaaggaatattccttttgacgcttggtctttcaggacatgtagaatcttagataagtgaccttgattaagccaagaatattttaatgtcttttatatacacactggacaacacatttttgt

SEQ ID NO: 1243745 - DNA, 4001 bp, Homo sapiens
aaggggtgctgtggtacacgcggccacccccgccacaggcagcgcagagcacagggcctgggaggcagtactcccgcagctcgggcaccagcttcccggactcatcccagctggccttgatggccagcatccggccgtggtgaccaaaggccaccaggcagtcacagtgcacatcctcgtcaggcagaaaattctctgcagcttctgcagcctgtggctctgtcttcaaggcccctatgaagatgacgggctcctccaggtgatggaggatcttgacaagggcatttgggtcaccaggggctgacctggaggtgaccagggccttcaggatcacacagcagagctggccatcagggagaccacagaggaccacaggtgactgcaggagggtggcatcagctccaaagaggagcccgaagagggcgtcctccagcgtgaagcccccggagcccccgaggaggtcgtgcgggaccctggagcctgatggtgacacagagcacagcactggaaggaagtggggggctgcaggctttcctgggaccccggctgggggcgtgtaggaggacagctccacctcaccgatctggcctcctggccgggggtcctccccaggacagggctgctcaaacagctgcatcttccatcgggcagggccctgcaccagggtgaccagcacactgtccagcaaggtgaacgcgcacagcgcagcatcgggaaggatgcaggcatcggggtccacagggatcacgggggaaggctggtcaccgtcctcgctgtccctgtcatcctggctcgtagacctttgagaacagggacgcactggtcaggcctgggcagggtgggattcccacgttctcttcacaataacctggcatggagtagtctggctcaggggttcccgcagtgacccccaaggccgctcagcagtccatctgccacatggcctcccaccttccccacgaaggatactcttgacaagaagtaccaggcatccaaaaccagcgtgaaccgacacctgtcagcatagaaccgtcaggctgaggcccaggctgcaaagtgcacaggctgccccctctacagcctgggccgcggtcagcagctgctggctctgcactgaagacaggcctggctgcccggagctcgcttccttccaacccagatggtgtccactgatcactgactcggggtcacggtgcctttgctgtctcctccctccaataaagacccaacctcgggggcgtgtctcaccagacagcaccgggccaccagggcccaaaggacaggatcccgcgccccgccgtgggcttaaccatgtgaaccccacttactaaggactgtgagcaagacacttgcagaaagagtgctgggggcaggggctccagataatcgggcagggatggcggccgaggcttcagagctggcggcagcccgggtccccaagcgcgatgaggtggggctgctcgctctgaagcagtccgggggcagcaggagtgtgcgggagggaggccgcgggcccgccctcacctgctcctgcccgggtggtccagcgacaggcagtagaggcccctccgggcgcacagcgcgtacagcaacctgcgcggcgccagcagctccaggtgccacacctggtcggggaaccggaacgccgcctgcggaccggggcgcgggtcaggccgacgcgacgcgcgggcccgcggtcttcattttcacgcgaaccgccgcccccgcccggtccctcccgcccccgcgggccggcgctcacggtcagcagcccgccctcctggtcgtacacgtagacgagctcgctcccggtggacaggaagacctctgcctcatggcacagcacgcggggcttgcccgccgccaggcccccgagagggcagcagaagcccgccaggtagcggacccgcggcgcggcgccggccatcgtgcgcgcgggcccgtcagagtgagaagccccggccgcgcggcggcggctccgcctcggagcgctttacggcagcccgctgtgcggcgcgacctccgccgtaaagcggtcggcggtgccgggggcgggccggaaaggacgcgctgcagggactccgggagctggggcggtcgctggtacccacggggagcaggggagccttcctaggggccgcggcaccgtgccgcaggtcgaggttgacccggccgggctggtgggagccctcggcggcttcatggccccggctgctgcacgggttccccagggtggggaagcgggtcctggccgagcagaggttgctcttgggcggggcgtctccccggagcaagcgctcagctactcgggcttttgcgtaaacgcctcgattctctgggctctcggagagcagctgggtcctgccggagcgcactccagccggggtcggggtggggcagcgccggctcttgtcgtcctagggatgggtctctgccctgtgctctgcgagccgccccggccgcccccgcgttcagggcccagcggagtgagccagcttaggtggaagtgcgtccctccctccgtggctgaacacgtggggacagggagtacaccaatggggtttctgggttgggggcagaggacaagaaaatgactgtgagccagggcaagatacctccaccctctccctcctggcagctctccacttcctccaggagagaagtactgaccagagaacgcccgtggaggggcctgcagtacggacacctgctccatgcccggaagagagcggaaaccaggcacaccattcacaagtaaatgaccaaggaaccccgcccccggcccgcctccctccgtttaagaagccaatctgaagagcgctaaggccagacaccctcgagggagaatctaggggcagggctgcaaaactgggcttggaagttaggcagacatcgtggagtccgggtgcacctgctggagcacaaagcaccacttgcagacatcctgaccgcccccctttgaggttggggtggggactgaccccaaggcaacggggatgtctgattctgaatgttgggttagacagactcaagtgcggcacctggagtcagttccttgctcctctcttctcgccagggctgctctgaaggtgtttgggctggaaatgctgtctttgatgctggggagtggggagaggagggccaggtgcatctcatttggccttcagagtcaggaagtcagatgccgcatcgttgtgaatttccccacagggatcctccgctggtcttctgaccgaatttccccacaggaatccgcaggtcttctgactgctagttttaaccctctgaagccttgtgagtcactcgctcacacacaccaaccccatccagtcctcccaggccatctcttccatacggatggtaacatgccaagactgtcctagaggaaatgatcacgatcacgtggaggaggaaacggacgtgggagaaggcccgccaaaccagcagcctcaccccgcggtttactccgctgcccaccccactctgctccgggggctggcaggcttttggccccacgccaagcccagctcctatctgcaacaagatttatgatcagtagtcatgtgggggaccttaagcatggatcccaggggaaagggggtgagttagacacaagcgaagggctgaaggccggctctccatcagctgctgggctgtgccgtgccccacctgtacttggcgaagagtgatgagggctgaggcagcctctctgtccgtgggtgtggaagatgcacacactcctagcggaagccttcgagacagcagcgcagaccgctggacactgcgtttctatgcccaacttggaggtgttatcatctccctaagcacgaagtatatgaaggagtcaatttaggtcagactgaggggagaaaaaccatgaagcttcaggctgtgttgagggcgaggagggctgggccttgagggacctctcctcagagcagcacagcccaataaggagaacacagcaggaaggtgaggcagggacccaggaacccgacttc

SEQ ID NO: 1243746 - DNA, 4001 bp, Homo sapiens
caggctggccgaaggagtggcactcccacgctacagaccaccacagtgtttcctggactctgtttctctttattcctctccctccatgccctgccccacaccccacatccgcctgctggtcagttgagtttctcggtctggctcctgtgcagagagggcctcaaggtggaggtggaagccggtggcagtgagctggacctggctctgctcttctgcacctgccgcttcagctccaggctgtcgtacacctggtagttggcattgccccctggattccggctgagtgggacaaacatggtcgggggaggggcagggtccgcagcctggactttgggccagggctgggaggaatgggggaccagcactgagcttggagctggggtccgttgatgggaggcctcgtccaacaccgtgagggaggcagaggtagtcagaggacgccaggcgggcagagcctcagcccagtcagctgcccgacgccgcacctcacgggggtcctgggagctgtagcccaagggttccgtggatgggtggggactgcggtgggactggccataggcgtgaccaagcaggctctgctggtgggactgtggggagtggtgctcccggcagccctgggcctcaggccgggcgttccgggacaccgaggcaggggggcgctcaaagccctccgtgccacgacgccgctgatcccaggagtcatacagcatccagcccactgaggggtaagggctgtgccccacggggacccaagaggggttagggggcagccggtggggaggtggtggagacgaggcccactgctcagcctccacattgccccacagtcgggattgggaaccgtggcgcccataggactgcagcctcagctcagacctggcctctacacgcttgggcatgcagcgcagctcaggtgacaggtagagagagggtggtggcagactggccaggataccaccctggtggccccacagccccacattggagggcaggcccgctctctgataaaacccgccccagccgcgacgtgggtacttgggatacgggaagggcaggttgtcctcctcctccaggtaggaatccgggtcctcctgatcaaagaaaggcactcggtgtagttgtgacatcttttggctgcgatgtgggttacggaagactgagtggctatgggggatttgtctgtagttctgcggccgctgctggtggttgcagcagcgacggcgacaacggcggtggcggcggcggcggcgacgaacacagcgaagaagactgctactgtgatggttggagaaatggtggcaggagaaagaggagtactgcgtgggtcgggacatcttcacctgcacagggtccaggatgcagtggatgtggacatcctgagccttgtctgggggaccacttgggggactttcactggcctgaatttcatctggggaaggcaagagtccatgaagtcagggcaattgtcagaagagctcaaggttgggaacactggggcctgggtttctagggccattgtcaggggtggggatgggggtcccctacctctccagcagccacacttacttttctgagtagcccaatcaatcatcttgtctaaggcgttctggagtccatgccacatctggggcagggtggaagagagtgaaggccaggccctccgcgcccagcaccaccacccctgcccccgccccaatctagaccgcacctgcaggtggagatgtaggctgcagctggctcccacccttggccctgttcacccccagaggtagtccacaatcatcactgaccatagttgccacgttgatgccaatgttgacaagaacgatgaggcccagcagcaggagtaagatgtcctcggcatcgtgggggctttcttggtattgattgcaacatctcacggtgttatgccatagctggttttccatggagggggggtcctagggccacctgggccacccccctctgccccccacccccggccccaacccacactgcactcatgccaatccccggagataactacaagctggtaagggagccaggtcacaatgaggtgagctagcgagagtcacaatgtggaggtggcagcttttatccattctgctggccccttctaccgccatctccacccttggctcctacttggtggagcctggtccccacatatcccagatctcagtctgttcctctatctccacgaggtttgcttaaccccacagctggttcctgagctgaagatagggtagttagaggctgacacggtcgtcacagggttgaagcatgcatcagatatgtcctgtttcattgttcttttgagacattatggcaacttacatagcctgttggcgtgccttgccccatggttactttggggccagcatctagggtgactagatgggcgggtgacactgcgtcccctcaggcatcaccctgctgtaccagcccctccctactctgcccatttccctgtcaaaagtcctctagctcccatctctgcccaattcttcctggccagactccagccctaggtgttggtggtccttgagcccaccagccacttcgtcacactgacatctgactcactgaggtggctgcctctgctgggaaccaaccccagccatggtttctccaacctaaccacctacactcccaccaacccacccttactccaaggtgaaaaacggttaagctactacctgaagaaaacccgagctgggcgcggtggctcatgcctataatcccagcactttgggaggctgaggtggctggatcacctgaggtcaggagttccaacctggccaacatagtgaaaccccgtctgtattaaaaatacaaaaattagctgggtgtggtgatgcgcgcctgtagtcccagctactcgggaggctgaggcagaagaatcatttgaacccaggaggtggaggttgcagcaagctgagctctcgccattgtactccagcttgggtgacacatcgagaatctgtctccaaaaaaacaagaaaggaaggaaggaaggaaggaaggaaggaaggaaggaaggaaggaaggaaggaaggaaggaaggaaacttgctgggcgcagtggctcacgcctataatcccaggcaggtggaccacctgaggtcaggagtttgagaccagcctggccaacatggcgaaacctctactaaaaacacaaaaattagctgggcatgttggtgggcgcctgtaatcccagctacttgggaggctgaggcaggagaattgcttgaacctgagaggtggaggttgcagcgagccaagatcgcgccacagaagtccggcctgggtgacagagtgagactgtctcaaaacaaacaaacaacccaacaacaacaacaacaacaacaagaaaaccacatgaaattaacaaagcacaaaatacatgtaattgttaatataccaaaaagagtgtttgacttaaaacaggtgcatcactggggtctgtggtgccctggagactgcaagccatttgtttacacagtgaaccactcagcagaaagaaaggccagtgatcatatcccatccagcctccaaacacagagtagatgcagagtagattcagattccactgaatggaatccattgaaaatgatcagtaacgttagttgaatgagagaagtagggccatttgtaaacggtccgtctgctcacattccaggaatctgtctagagtggaaggtgaagtccagctccctcagcctgggctcacgcacacagctgcttgttctcaagtggtatgtgtgtgcatgtgcatatgatcccaattgtgtagcagaaaggcagggcctgagtttctctgtttctcagtttctgagttcacatggtgaactggggaaggtgggaggttctggtgggtcaggctggctctgcagcaatgggatggagcatctgaggccatgagcttgatcctcagtgtctgtgtaaccatgagcaagacccttagcttctctgaacttagtctcctcactggtgacatgg

SEQ ID NO: 1243747 - DNA, 4001 bp, Homo sapiens
gtctctcaagtttctcatctcacttccctccttattctgccttaattccatggtcagtcattataatcacacccctgcacacattcttatcttttttatctttcaactttattgaggtataattgatgatttaaaaatttcagggctggggccgggagcagtggctcacgcctgtaatctcagcactttgggaggccgaggcaggtggaccacaaggtcaagagatagagatcatcctggctaacacagtgaaaccccgtctctactaaaaaaaaatacaaaaaaattagccgggcgtggtggtgggtgcctgtagtcctagctactcgggaggctgaggcaggagaatggcgtgaacccgggaggcagagcttgcagtgagctgagatcgcaccactgcactccagactgggcaacagagggagactctgtctcaaaaaaaaaaaaaaatttttcagggctgggcaaggtggctcatgcctgtaatcccaacactttgcgaggcagaagtgggcggatcacttgagtccaggagttcaagaccagcctgggcaacatggtgaaaccccatctctaccagaaatacaaaaattagccaggcgtggtggtcagtagtcccagctactggggaggctgaggtgagaggatcacctgaggccggggaggttgacgctgcagcgagccaaagtcatgccactgcactccagcctgggcagcagagcaagaccctgtctcaatttaaaaggaaaaagaaaaaaaaaggatttctttttggctaatcaccaagcacactatcagtatgtggatttgtttgccccagccttgaatgaaccagccaatgaggaaatcaggatgaggttcctaggggataggaggaattgacggtttgactcagggaaagctcagtggaaatagagtatccactgacatgtacaggccagagatgcagggaagatgaaagcacatgcatgaattatgctgaagctctttttacctgaaatcatcaccagagggagtttctgcatttgtgccacttgggcttccgtcctcactgtcccctcgttgctgtgccaatctacaagccacaaaaccaatagtgctatcaattatgggctctaaaccaagaggagtatgggggcctggcaagcagggtaaggcaaggagtcaactaaaaatgctgcaaggtggaagtgcactgcctatcctcatgacaaggaaaacccatacagcagtgctgacaagagccccttctctctccaggccacttaacgggtggaggaaaggctaaatacccagaaggttcaaggaaactcctttaaaaaccaaacttgacaaggccaagaaggttccaggaaagtcagaaggaggaaaaagaggaatcaagaacagaggaaaaccagagggtggggatgggggtgtgtgtgacagaaatgggagaagtggggagataatgacagaaaggagaggggacgggaactgaaattattgagcatgcggggcactgcgctaaacaaagggcagccgcgagagtaagaggctgggatgatataggggcagatgaagggcacaggcatggttgggccaggcatacaagtccacgacgggggccaggaagagcagcgggaggcgaggagcgcccttcaggccagagaccttggctgggagaggagaagatggcttttaggagcggccgggccgctgggccgggggtggggtgcaaggccgggcggcgggccgggggcggggccgcaggggcgggcgggctggcaggccgagctgggcgccagcacctgcttccgcgatagctgtaaagacagtagtggctgctggacggcggctcgagtctccgctcctcggctgagcctccctcttcgctgctctctagttccttttcatctccatccatcgactcctgcaaagaggggagcattgcggcggcctctgagcggccctgtgtctccgccaaaccgctcccctgctcccgtgcagccgtcggtatcagggctcgtccggctcccggccctcgcacacctgcgttccgctggtttccccgggttcgcaggcaaggactggcctggaaagggagtctcttctccccacaggggctgacaggcgtactgagttcgcctttactgacaagcttttaccatttattttgaacttattttcctttgagacatctgggaaactttctatgtgataaaggtggcacaactacctagccacatggaaaagaataaggctactcgtctgcctccttgcgcgcgtgccagcacgcacagacacccgtttgatcaaaaagttaagaatttaaaatgaattttgttaaagtgaaaatatgggataattttgttaattcttgaagagggtctttccaaacataacaaaacacttagaagtcatacaggaaaacgtttaaaaaaatgactacgtaaaaactaaaaggccgggcacggtggctcacgcctgtaattccagtgctttgggagaccgacgcaggcggatcacttgaggtcagaagttcaagaccagcctgggcaacatggtgaaactgtgtctctactaaaagtacaaaaaaattagccacgtgtggtggttcacgcctgtaatgccagctacccttccagtctctgcccattacccagttctaacaccaattcacattttcaggtgtttgtttctgcaacaccccattctctggtaccagttttctgtctcagtccattttatgatgctataaaaggataccaaagactgggcaatttataattagctcttaaaggccccacttcttaatagtcttacaatggcaattacatttcaacatgaatttgggagtggacaaacactcaaaccatagcgccacgtgaaggaggaggcagactggagtgatgtatctacaaaccaaggaatgtcaaggattgatggtcatcaccagaagctaggagaggacatggaacagattctcccctagaggcttcaagagagtatgtccccaccagcacctccatgtcaacttccagcctccagaactgtgaaataatacatttccattgttttaagccaccgtgtgtgtgtgcatgcgtgtgttttgtgttttttttttttatttttagtagtgcaaactttattcataaataaaacttcataaagttaaaagcaggggcagttcctatttttaaaaaggaatagtggaaggcaacctgccatttcatttaaaattacaagttaggtttttcagatggataacagttgagatcgttaaatccccttcctgcttctcagattttcacaaaatagcacattaaatcctcagtcctaagcaattatggcagagattccaaattgcctctccatatcaaagtggatagcacagtttcttctcttgcaataaaggtactcatttgatgaacaagtgagtatagcagtcagattcttaaaagattgtattgcagaagttactgccatgtcttcattcgcaatgggtatcctcacctctatctcccattcagtaacattgtcagtttccttatctctcatttcaactacatttaaaagaggattctgattgcggacaacacatgacagaggcatttcagatcggcagtagtctcttgagatatacttgattttagttttaagcagaagaacttcctggagaggttgagttaccacagtcatgaggatggtagaaaaactcatagtagatatttggcaaaactaggttacaaggcagccatctcctagaaacacttcatcggggttcatatacaaattgtgaaatatcgtgggtttaatcctggcacagaaccaaaactgggtgcattgtacttgaatagccgaccagtccccagcacaggtccatatcaaggaattgagaaaaaagagcccatttaaccgcaaaatggtcttcatttgcccagactgaaagccaaatctcactcaggaaacagctgtatttttattttttatagagacagtgtatcactttgttgctcagg

SEQ ID NO: 1243748 - DNA, 4001 bp, Homo sapiens
cgttacctgttctctgactgggagatcgaatcctgagcttccaggtgttcctggggagagggaatcaatgtgcctccgggaacctatccctgagatggggctgtgggctggacagggaatgcctccattgtttatagggcccgggtccaggcccccttctcgtttcccgacaggggggtgccattctgatgaaattttgagtggcattgactagcccagttatttcctatattgcaatgagggcaaagtcctggcattttttctggggtggggggctgcattataagatcccttctgcccaaaggtctgacggtattcttttttgaagtgtccgatttttccacaattataacattttcccattttaggatttgctccttggccgtttttagatttgtccactactaaattagccattgcttgagccaacattgtagagcaatgaagttcagttcccacatcttgacaagctttgagaaaatttcccgagttttttgtacatctcacagatgccagtgcacatttacaatctgcatttgcattctcaaaagctagagttaaggttagcatttctgtagccgcagtatgaggaatctgatgcttcaccgcctcttgtaatcttgcaagaaaatgtgcattggccacccttacatgatatgtaaaaaagattgtactgggaccccttcctcaggaattgtggcccaggcatgtttagcagccaaggcacactgcttataagcagtgtctgggagtgccatgtgatgttccaggtctgaataaggacgattacctaacagcatatcctctgtaatgtctccgtgtccagcagcatgattctgtctagcctggtctgcacacagttcttgccaatttaaattccatgtcaggtatgcactagcagacaaacaagtgcaagccaaatgctttacatcaaagggtggaaggcgcatagcaccaaatatagattctagcaatcctaaagtaaatgggctttgtactccattattaactacactcgctttcaattccttcagcaacttaaactgtagtggggtgtgttcatgaataaactgctgaggattatttggatcgggccttatggaaataggaaaagcgcaaggtcctaagggctttccagctatagcagcagagcataaaattctttgtattggggtctctatttctgctactgaaggaggcagtacagacgtttctgctactggagggggtgacacaggccagttttcatcctccttctcctgtttattatttttaattggtactgtgggtgggacaaaatattttttcagatttttagacttggaatatgattcctgctgtctagcagaataagaagaagataatggcaggaggacagcacggactaaactccaagcagaaaaaacaaaaagatcaaatttaagacctttttggtgagcccgttttaatcctggtcctactctgtcccaaatttctacatcaagactgcctgtctgtggaaaccacgggttatgtatagtgaccttcttcagcatcttaattaatgtttgagaactaacctgagcaccagtttgtttaagtaaaactttaagcaaatgcacataatgttgcacctcaatagacaaattctgccccatgttacccttattcagaaaacttcccattcccagtacctctctagggcactgacctgatatcccagtacctctttagggcactgatcttgtatctgctgccgctcccagtacctctttagggcactgaccttttattggctgccggcagacttgttccagggtttctcgttcgtcttgtcagtttctctttctctgctccagcagaccttctttgctcacgttcctgtcccggccaccacttgtcgctgttggttgctaggggattgaacaaaggggggacgaatgcagaaatgaagacaaagacaaagagatctgttttgaaagaaggggtcagggagctccttgcttctagtgaacaagggccctgagcttctacagcccttcgtatttattaggtagaaagagaagggagggagaggtaatggttggtcagctgcttgatttattacaggtacacacaatagctttctttgtacaacaggcttcagatgttcctatagataatcacaaggaacacagcacttggggtgtgactgccctcagcaccccttcgggcagcagacaccgttgccagttttccaacatcctgctttcatgagaacagttttctgttcgctcatatagcctccagtgctatactgtgttggtcatgactctcattctttcggcctgtaacaaaagttaacattactgaccttgacaccaagtgttggaaacactctcgagtacctggagccctcataccctgcaggtgggaatgcacatgatgcaaccacctgggaaaagagtttgcagtttcttcagacatgaaatgtatgcccgccagagatgatccagcccctcagcacttccatatttagtcaaaataatagaaagttttatgttcacacagagacctgtatgtgaatgttcatagcagctttatttgtaatagcaaaaaactggaaacaattcaagtgagtggatttttttaaaaatgtgaaatacaggctgggcgtggtggttcacgcctgtaatcccagcactttgttaaggctgaggcaggtggatcacttgaggctaggagtttgagaccagcctagccaacatgacaaaaccccatctctactaaaaataaaaaaaaattagctggctatggtggcactaacctgtagtcccagatgcttgggagggtgaggcagagaattgcttgaacctgggaggcagtggttgcagtgagccaagatcatgccactgcactgcaacctgagtgacagagagagactctgtctcaaaaaaaaaaaaaaaaaaaaagtgaaatactcatgcaatggaatacaacttgcaataaaagggaatgttctactgatataccaatgataaaatagttatgctgagtgaaagaaaccagctcaaaagctgatttacactgtatgattccatttatattagattctggaaaatgccaactcatagatagtaagagaaaatggatcatcccttagctaaggctgtcacaacaaaataccacagactgggtggcgtaaacaacagaaacgtatttctcatagttctggaggctggaagtccgagatcaaggtgttggcaggttcagttgagcctgaggcctccctccctggcttgcaggtggctgccttcttgctaccccttcttgcggttgcccctctgtgctcgcatgccttggtgtctccctgtgtgtcctcatctcctcttcagagaacgataccagtcagatggcattaggacttaccctaacaaactcattttaacttaattgcctcttgaaaggtcctatctccaaatatagtcacattttgaggtactggggactagcatatcaacatataatttttaggggtccacagttcagtccctaacacctggggacagagtaagggggagggcgggcatggggattatgaatgtgttgactgtcctgatcatggtggtggtgttaccgggtatacacatacatcagagtttaacatattgttctctttaaatatttacagtttattatgtgtcagttataccttgatttaatcccagaaaaatgatataaaaagacaaatatgatgctgtgatctcttattattagattgctcctgaagcaaactttgaatatcaaaactcactacacacaccgtcagcgtgagtagggtgtggtccagcaggaattggcacacagcagaggctgggatgcatcagacatagccagacttcaacaggggtagggagggtgagattgggaagctgctggaagacaggaaacggccagagagggaagagcggaggtggagggcgctgggcctggctgcagagagccaggaatccggggctctccagaagtggctcagcgagggg

SEQ ID NO: 1243749 - DNA, 4001 bp, Homo sapiens
aactggcaggtaataagcagtagctgagcaatatattctcctggttcaaaaacccaaagaccttgtgacattaccactacttgaatttctccttcataatcagaatcaataactcctgggactaaggtaatgctctgtaaattaagacagcttttacccaaaattaatcccatatatcctgttggcaaaggtccccaaataccagtgggaatcttggtgggtttgtctcctcccactaacgttacctgttctctgactgggagatcgaatcctgagcttccaggtgttcctggggagagggaatcaatgtgcctccgggaacctatccctgagatggggctgtgggctggacagggaatgcctccattgtttatagggcccgggtccaggcccccttctcgtttcccgacaggggggtgccattctgatgaaattttgagtggcattgactagcccagttatttcctatattgcaatgagggcaaagtcctggcattttttctggggtggggggctgcattataagatcccttctgcccaaaggtctgacggtattcttttttgaagtgtccgatttttccacaattataacattttcccattttaggatttgctccttggccgtttttagatttgtccactactaaattagccattgcttgagccaacattgtagagcaatgaagttcagttcccacatcttgacaagctttgagaaaatttcccgagttttttgtacatctcacagatgccagtgcacatttacaatctgcatttgcattctcaaaagctagagttaaggttagcatttctgtagccgcagtatgaggaatctgatgcttcaccgcctcttgtaatcttgcaagaaaatgtgcattggccacccttacatgatatgtaaaaaagattgtactgggaccccttcctcaggaattgtggcccaggcatgtttagcagccaaggcacactgcttataagcagtgtctgggagtgccatgtgatgttccaggtctgaataaggacgattacctaacagcatatcctctgtaatgtctccgtgtccagcagcatgattctgtctagcctggtctgcacacagttcttgccaatttaaattccatgtcaggtatgcactagcagacaaacaagtgcaagccaaatgctttacatcaaagggtggaaggcgcatagcaccaaatatagattctagcaatcctaaagtaaatgggctttgtactccattattaactacactcgctttcaattccttcagcaacttaaactgtagtggggtgtgttcatgaataaactgctgaggattatttggatcgggccttatggaaataggaaaagcgcaaggtcctaagggctttccagctatagcagcagagcataaaattctttgtattggggtctctatttctgctactgaaggaggcagtacagacgtttctgctactggagggggtgacacaggccagttttcatcctccttctcctgtttattatttttaattggtactgtgggtgggacaaaatattttttcagatttttagacttggaatatgattcctgctgtctagcagaataagaagaagataatggcaggaggacagcacggactaaactccaagcagaaaaaacaaaaagatcaaatttaagacctttttggtgagcccgttttaatcctggtcctactctgtcccaaatttctacatcaagactgcctgtctgtggaaaccacgggttatgtatagtgaccttcttcagcatcttaattaatgtttgagaactaacctgagcaccagtttgtttaagtaaaactttaagcaaatgcacataatgttgcacctcaatagacaaattctgccccatgttacccttattcagaaaacttcccattcccagtacctctctagggcactgacctgatatcccagtacctctttagggcactgatcttgtatctgctgccgctcccagtacctctttagggcactgaccttttattggctgccggcagacttgttccagggtttctcgttcgtcttgtcagtttctctttctctgctccagcagaccttctttgctcacgttcctgtcccggccaccacttgtcgctgttggttgctaggggattgaacaaaggggggacgaatgcagaaatgaagacaaagacaaagagatctgttttgaaagaaggggtcagggagctccttgcttctagtgaacaagggccctgagcttctacagcccttcgtatttattaggtagaaagagaagggagggagaggtaatggttggtcagctgcttgatttattacaggtacacacaatagctttctttgtacaacaggcttcagatgttcctatagataatcacaaggaacacagcacttggggtgtgactgccctcagcaccccttcgggcagcagacaccgttgccagttttccaacatcctgctttcatgagaacagttttctgttcgctcatatagcctccagtgctatactgtgttggtcatgactctcattctttcggcctgtaacaaaagttaacattactgaccttgacaccaagtgttggaaacactctcgagtacctggagccctcataccctgcaggtgggaatgcacatgatgcaaccacctgggaaaagagtttgcagtttcttcagacatgaaatgtatgcccgccagagatgatccagcccctcagcacttccatatttagtcaaaataatagaaagttttatgttcacacagagacctgtatgtgaatgttcatagcagctttatttgtaatagcaaaaaactggaaacaattcaagtgagtggatttttttaaaaatgtgaaatacaggctgggcgtggtggttcacgcctgtaatcccagcactttgttaaggctgaggcaggtggatcacttgaggctaggagtttgagaccagcctagccaacatgacaaaaccccatctctactaaaaataaaaaaaaattagctggctatggtggcactaacctgtagtcccagatgcttgggagggtgaggcagagaattgcttgaacctgggaggcagtggttgcagtgagccaagatcatgccactgcactgcaacctgagtgacagagagagactctgtctcaaaaaaaaaaaaaaaaaaaaagtgaaatactcatgcaatggaatacaacttgcaataaaagggaatgttctactgatataccaatgataaaatagttatgctgagtgaaagaaaccagctcaaaagctgatttacactgtatgattccatttatattagattctggaaaatgccaactcatagatagtaagagaaaatggatcatcccttagctaaggctgtcacaacaaaataccacagactgggtggcgtaaacaacagaaacgtatttctcatagttctggaggctggaagtccgagatcaaggtgttggcaggttcagttgagcctgaggcctccctccctggcttgcaggtggctgccttcttgctaccccttcttgcggttgcccctctgtgctcgcatgccttggtgtctccctgtgtgtcctcatctcctcttcagagaacgataccagtcagatggcattaggacttaccctaacaaactcattttaacttaattgcctcttgaaaggtcctatctccaaatatagtcacattttgaggtactggggactagcatatcaacatataatttttaggggtccacagttcagtccctaacacctggggacagagtaagggggagggcgggcatggggattatgaatgtgttgactgtcctgatcatggtggtggtgttaccgggtatacacatacatcagagtttaacatattgttctctttaaatatttacagtttattatgtgtcagttataccttgatttaatcccagaaaaatgatataaaaagacaaatatgatgctgtgatctcttattattagattgctcctgaagcaaactttgaatat

SEQ ID NO: 1243750 - DNA, 4001 bp, Homo sapiens
gggaagatgagatatcttttaaaggtaaaaattttttggaatggcaatatcattttccagaaaggacccattccctaccttgcatttgcaattctctgatgcttctcacgtcttttgggaagatcccaggcagctgttccagtcggcaactgctatctctgaggtctgggggtgagcagagggggaggaggggaaccggggaaggtttggggaaaatcagaatttactggtacttactttttagaattctgggcaatggagaagatatgaaagattgcagttcctgctcataaaacttgcaacttgggagatcaaacactctctaaaaagactttacttttatttatttatttatttatttatttatttatttatttatttattgagacggagtctcactctgtcgcccaggatggagtgcagtgacgtgatctccgctcattgcaacattcacctcctgggttcaagggattcttctgcctcagcctcccgagtagctgggattacgggcatgcaccaccatgcccagctaatttttgtatttttagtagagatggggtttcgccattttggctatgctggtctcaaactccttacttcaggtgatccacctgccttggcctcccaaaagtgctaggatgacaggtgtgagccaccacgcccggccctcaaaaaagaacacccagccaaatacatacaaagtagtagttgacctagtataaagaatactgtgtaccaatctattacccttaggacaaagaaaggtcaaatagagttaagaaaatttactaagttaatgaaagtctaaccaacccatttccttaaatactgcttattttctcttctccctcctattctgtcttctttcttgtattaaataaagcttttggagatttatattgtctgaccttggtatctctataggtttccacagaaccataggtcttagttatttatgctttttggcacataattcaaagggttgtgacatttttataatttgtcaaattcgttactgctgcactttgtgccatttggtcttaattctgattagctaattttatttttttattttaattttttattttttgagacagagtctcattctgttacctaggctggatttcagtggtacgatctcagctcattgcaacctcacctcccaggtttaagtgattcttatgcctcagccacccgagtagctgagattacaggtgcatgccaccatgcctggctaatttttgcacttttagtagagatggggtttcgccatgttggccaggctggtctcgaactcctgacctcaggtgatccaccaatcttggcctcccaaagtgctgggattacagtcatgagccaccgtgcccagccttgattagctaattttagagatgaaatgtttatgaaactttgaaaactcatattttaaataagcagttaccaaagagcagcaaatgatgccattccacccaatatcaccctttccctcagctctccccacccaagaatatcaccgtctagctatttacatgtaccaacttaaaaaaggcaacatcttatgaacagtatgaatttgggaaccttaggtgatgacaatactgaaactctaaagaaagccatccaacagtgaaaggacttttaatgttaattacatgaacaagacataagaatgcatcacattctctgaagacctctcatcatgaaacagacagctatctctctggaatgaataagttgcagtccttcttagaggcgagtggatacatgggattaactctggaaagtattgcttgctggatatcagctacatctctatctggtggaagagaccccgaaactctttctaggcctctctctgtattttccaggagattaggctagagaattacatacctttcttgttggcatcataggatgcaatgattaggctgaagaccaagatggtatccatgttagcttgagcacatgctcattgcagacagaccactgctcatctgtcacagcccttgatagctctgcctctagttgctttcaccacacgcagctggaaccaagtttgaccctgagagactctgattccaccctgattattttgccccatttcctgaagacccaggaatagatctaattggagaaagggctaattctgcttattaataattcactcagacttcttctgacttcgctgccggtgccgacatagagaactagattacctagaggtttctcgagcaggaaggccataaacgcccattgatatgctttacaaatacttgcagatagacacgtagacatttacatgcatgctcactgacacaggcacagagatttatatactttcatgaaaagatgtggagatttctagtaaggaatataatttctagagcaggaattatagaaatagagcaggaaactaggactaggagtcagtacaattgagttctagtacaggcccttttatgagctatcaccttgagaaaattacttgacttcttgggatctaaatgttctcttctataaattgagagtcctgaaccatatgatctcttttttttttgaggcagagtctcgctcggtcgcccaggctggagtgtagtgacacgatctcggctcactgcaagctctgtctcccaggttcacgccattctcctgcctcagcctcctgagtaggtgggactacaggcgcccactaccatgcctggctaatgtttttgtatttttagtagagacagcgtttcaccgtgttagacaggatggtcttaatctcctgatctcgtgatccacctgcctcggcctcccgaagtgctgggattacaggcatgagccaccgtgcctggcctttttttttgtgaaatggagtctcgttctgttgcccaggctggagtgcagtggcataatcttggctcactgcaaccttcatctcctgggttcaagtgattctcctgcctcagtctcctgaatagctgggattaaatgtgtgtgccaccctgccggctaatttttatatttttagtagagacaggtttcaccatgttggccaggctggtctcgaactcctgacctcaagtgatctgcccccatcggcctcccaaagtgctgggattacagccgtgagccaccccagccggccgtgaaccatatgatctctagaattaatccagttatatatataaactcacattagcacagacatacctattgagttttgcacatcttcacactcctgaatagtgaagtgagtattggtggacaacattctgatgaccattgggctgagaggttgtgaggaagagctaaatacggcaggtgagtggtactgtctgtggcttgggaaggttttcctagacagataactgttgttgaagatttttccaaatttgtatttttttagtgtctagtgtaataatctgtagactttgtcatggcatagatagatggagcataaaagagaatgaagggccgggcgcggtggctcacgcctgtaatcccagcactttgggtggctgaggcgggtggatgacctgaggtcgggagttcgagaccagcctgaccaacatggagaaactccatctctactgaaagtacaaaaattagctgggcatggtggcgcatgtttgtaatcccagctacttgggaggctgaggtaggagaatcgcttgaacctgggaggtggaggttgcagtgagccgagattgcaccattgcactccagcctgggcaacaagagcgaaactccgtctcaaaaaaaaaaaaaagaaaagaaaaaaaagagaataaagatctaccccatctttatcaaactctacagcttctttggtcttgttttattttggagatgggctatgttttgtagagacacagtctcactgtgttgcccaggttggtctcaaactcctgagctccagtaatctgcccaccttggcctcccaaattgctggggttacaggtgtgagccactgcacccagactagaaaactttttaaaaaagttttgctatgagaa

SEQ ID NO: 1243751 - DNA, 4001 bp, Homo sapiens
atttcccaggttcaagctattgtcctgcctcagcatcccgaggagctgggactacaggcatgcgccaccacgccaggctaatttttgtatttttagtagagacggggtttcaccatgttggccaggatggtctcaatctcctgacttcgtgatctgcccgccttcggccttccagtgtgctgggattacaggcgtgagacaccacgcctggcctacttatagtttctagtacaacagattactggcaaattagtttgacatctttgttaaacatatacgatgtaaaaaattaaaaaaaaaacatttataccatgtatatttgtacctgttattctttagagtccagaaaagaaaatgtttaattccaatgtttagttgaaagttatttcctttctacatctcttattctttctataaagttccagagggcaggaaacatatctatcctgcacacagctgtatgtaaaaacctagcactgagcctggcatacaatatttgttcacttaattctttagatataaacgtttaaatattattcagtactacaactgataatatcttctgactaccaaagagattaaaaagggtgactgaaaccacttacaaaatagacacaatcttcaccaatccattcaataaagcaaccaacccaccttatcctgtacgaagtccttcaaaacaaaactgttttctgccaacagattacagtaatcatttttactttgttgttgtttggtctttttttttttgagatggagtcttgctctatcactcaggctggagtgcagtggcgcgatctcggctcacagcaacctcagcctcccaggttcaaacggttctcctgcctcagcctcccgcgtggctgggattactgggattaagggcgtgcgccaccacgcccagctaattttagtatttttagtagagacggggtttcaccatgttggccaggctggtcttgaactcctgacctcaggtgatccacccgcctcggcctcccaaagtgctgggactacaggcgtgagccaccgcgcccagcctgctgggattacaggcgtgagccatcattctttctttctttggaggtacacactaacaggatgaaagccacagactgtttgtttacaataatacacacaaatgaagccagtccatggaccttcggctaacaacgttaggaagggcttgacacctgctagacgtttctgcctccactccacctcacactcaaccctacttgaaagatcccggtacattcccacgataacgtctatacgtgggtgtctgttttcttacccgagctcctccaggaggatgctagttttgtgggtgcttctcccggatccccatgcttccccgatcaccgttcccgagtgtggcagaatgaaacgtgaatgtcagcctgtgtaggacacgatcagacaggtgacttggcagcatgcacagtgagtaaacgcggcacgatactgaaccaaatagaaacacaggttccggaaagcagagagttaagacctccccagcctccgggctcaaggaggacctcaatagttccactaatcctcaccctcacctccggcgctctccagccgcctttccctcctcccgctgcgttaccagcctgcccacctccccgcacccttcctttccctgaaagctgttctgattctgccagctgttctgattctgcggagtggatggggtcggcccggcagctcctgggtcagggacagccgttcccgcagccccaccgaggatttcctcctgcggttccaggaagaccctccgccggccccggcacccgattccctaccctctccgctcaggagagtctcccccagacttagaacgtgggccgcggaaaacaaacccgcccttgcaagctccccacagagcaccgtcctcacctcggaagacctgaaagcccaggcggccccggcgacaagccccccagggaagccccccaggcccctgcccaacccccggccaaggaacctcgtcaggccgtctgcaccactgccggataggtccgcctgttttaaaatatgttacacggattcaactcaaatacttgtatgatattattatgacataattgaatttatttgaaacctggcttgacttttataccgtaccctccgttggctgtgaacaggcgagcgcttctgccaccccaggggaggtcctttctcccagaagctcctagtcgctcctcccgctccgagcccgcctcttcccgtgggcggggttaccagtcggtgcggttgggatggtgccactgcgcagccgcgagagggcggtaccacggcggcagcgacatgggggggcgcggagcagacgccggaagtagtggtggtacgggtccgactgaggggtactcgccaccggctgcgtccacccgagcggctgcgagagccaaggcccgagggggtgggcgtggcggccgccgaaacacaaccccctctgttccctctcttcgcggagcggcgccgcgtagcttccatccgccagctgccatgagcgagcgcctccgtcccaggtgagagggaagggaccccctttccattcgtcgcctgaggatctgggagatagagccgagggggcgcgcgaaatgggggtcggagcaagagtggacccggcggggctccctgtggggtgcactgcgggccgggggaggaggggagagggatgcgcgagtgatcggatgcttggttcctgtgggtagctggaaggtgactctccggggtccaggtctcccgcccctccatcttttttcccccctgtcttttcctatttggaacgaagtgtgatcggtcccggaagagagacggtggccctaaagctttcctgtcctaaatttaggagggtggggggatgggataaacgtctcatcttggagagggagcccccaaaggcttttgtgagggcaccgggcggggagctgccggctccccaaggtcagaaagaaaggttgggcttaaccccgcagcagggaaagattcggttagaccgaagaacttgtgccctgaacggttgtgaacacagaagggcagatgaccaaggcgggttatggatcttctcttgactgtggcattaagaacaagctggattctaaactgtttggattgcggggccgtttgactccgaaggcgggaggaaagattttatcgcgatgcactcgctaccttcccgagggagcctggcctcgggacgcgggtcttaaattaggggttctgtgcttgacatgtactactagagtccggactaagttgggatttcttaatttttttctctctcttaatttcctctgcaagaatgtgtggaggagaaagttgggaaaggttacctcagaatgctcttcctgttacggtctttccacaaggatccttctctgaaataattatttcatgtgattgaagttctcaaaagtattctgagtttatttggtcccatagtgaaaacctagggttccccaagctgctgcattggattattgatttgggtcatgtagcaggtggagcataaagcctctccttgtatagaaaagaagagtggactaaatttgaaattgggggcccaattacagacatgccatcggaattaggagcaagatctttagatacagtgaatctgacccgactgccatattattctttcccaaacccagtttatacttacgatattctcttggggtgtctcacatatctgaaaaaaaatctaaatatttcctacaaataaaaattctactgtacataactaatctgaatgcatttatactggcagtagattccttttatcttgtacacaaataatctcaacatgttttaaagaagttatttgatttggacaggcttttcctgccagtgtttaatggagtatgatgggccagctctgccagctctaggatggtctaagacggtggtttttcggctgggtgcggtggctcacgcctgtaatcccagcactttgggaagtcaaggcgggcggatcacctgaggtcagg

SEQ ID NO: 1243752 - DNA, 4001 bp, Homo sapiens
ctttctacatctcttattctttctataaagttccagagggcaggaaacatatctatcctgcacacagctgtatgtaaaaacctagcactgagcctggcatacaatatttgttcacttaattctttagatataaacgtttaaatattattcagtactacaactgataatatcttctgactaccaaagagattaaaaagggtgactgaaaccacttacaaaatagacacaatcttcaccaatccattcaataaagcaaccaacccaccttatcctgtacgaagtccttcaaaacaaaactgttttctgccaacagattacagtaatcatttttactttgttgttgtttggtctttttttttttgagatggagtcttgctctatcactcaggctggagtgcagtggcgcgatctcggctcacagcaacctcagcctcccaggttcaaacggttctcctgcctcagcctcccgcgtggctgggattactgggattaagggcgtgcgccaccacgcccagctaattttagtatttttagtagagacggggtttcaccatgttggccaggctggtcttgaactcctgacctcaggtgatccacccgcctcggcctcccaaagtgctgggactacaggcgtgagccaccgcgcccagcctgctgggattacaggcgtgagccatcattctttctttctttggaggtacacactaacaggatgaaagccacagactgtttgtttacaataatacacacaaatgaagccagtccatggaccttcggctaacaacgttaggaagggcttgacacctgctagacgtttctgcctccactccacctcacactcaaccctacttgaaagatcccggtacattcccacgataacgtctatacgtgggtgtctgttttcttacccgagctcctccaggaggatgctagttttgtgggtgcttctcccggatccccatgcttccccgatcaccgttcccgagtgtggcagaatgaaacgtgaatgtcagcctgtgtaggacacgatcagacaggtgacttggcagcatgcacagtgagtaaacgcggcacgatactgaaccaaatagaaacacaggttccggaaagcagagagttaagacctccccagcctccgggctcaaggaggacctcaatagttccactaatcctcaccctcacctccggcgctctccagccgcctttccctcctcccgctgcgttaccagcctgcccacctccccgcacccttcctttccctgaaagctgttctgattctgccagctgttctgattctgcggagtggatggggtcggcccggcagctcctgggtcagggacagccgttcccgcagccccaccgaggatttcctcctgcggttccaggaagaccctccgccggccccggcacccgattccctaccctctccgctcaggagagtctcccccagacttagaacgtgggccgcggaaaacaaacccgcccttgcaagctccccacagagcaccgtcctcacctcggaagacctgaaagcccaggcggccccggcgacaagccccccagggaagccccccaggcccctgcccaacccccggccaaggaacctcgtcaggccgtctgcaccactgccggataggtccgcctgttttaaaatatgttacacggattcaactcaaatacttgtatgatattattatgacataattgaatttatttgaaacctggcttgacttttataccgtaccctccgttggctgtgaacaggcgagcgcttctgccaccccaggggaggtcctttctcccagaagctcctagtcgctcctcccgctccgagcccgcctcttcccgtgggcggggttaccagtcggtgcggttgggatggtgccactgcgcagccgcgagagggcggtaccacggcggcagcgacatgggggggcgcggagcagacgccggaagtagtggtggtacgggtccgactgaggggtactcgccaccggctgcgtccacccgagcggctgcgagagccaaggcccgagggggtgggcgtggcggccgccgaaacacaaccccctctgttccctctcttcgcggagcggcgccgcgtagcttccatccgccagctgccatgagcgagcgcctccgtcccaggtgagagggaagggaccccctttccattcgtcgcctgaggatctgggagatagagccgagggggcgcgcgaaatgggggtcggagcaagagtggacccggcggggctccctgtggggtgcactgcgggccgggggaggaggggagagggatgcgcgagtgatcggatgcttggttcctgtgggtagctggaaggtgactctccggggtccaggtctcccgcccctccatcttttttcccccctgtcttttcctatttggaacgaagtgtgatcggtcccggaagagagacggtggccctaaagctttcctgtcctaaatttaggagggtggggggatgggataaacgtctcatcttggagagggagcccccaaaggcttttgtgagggcaccgggcggggagctgccggctccccaaggtcagaaagaaaggttgggcttaaccccgcagcagggaaagattcggttagaccgaagaacttgtgccctgaacggttgtgaacacagaagggcagatgaccaaggcgggttatggatcttctcttgactgtggcattaagaacaagctggattctaaactgtttggattgcggggccgtttgactccgaaggcgggaggaaagattttatcgcgatgcactcgctaccttcccgagggagcctggcctcgggacgcgggtcttaaattaggggttctgtgcttgacatgtactactagagtccggactaagttgggatttcttaatttttttctctctcttaatttcctctgcaagaatgtgtggaggagaaagttgggaaaggttacctcagaatgctcttcctgttacggtctttccacaaggatccttctctgaaataattatttcatgtgattgaagttctcaaaagtattctgagtttatttggtcccatagtgaaaacctagggttccccaagctgctgcattggattattgatttgggtcatgtagcaggtggagcataaagcctctccttgtatagaaaagaagagtggactaaatttgaaattgggggcccaattacagacatgccatcggaattaggagcaagatctttagatacagtgaatctgacccgactgccatattattctttcccaaacccagtttatacttacgatattctcttggggtgtctcacatatctgaaaaaaaatctaaatatttcctacaaataaaaattctactgtacataactaatctgaatgcatttatactggcagtagattccttttatcttgtacacaaataatctcaacatgttttaaagaagttatttgatttggacaggcttttcctgccagtgtttaatggagtatgatgggccagctctgccagctctaggatggtctaagacggtggtttttcggctgggtgcggtggctcacgcctgtaatcccagcactttgggaagtcaaggcgggcggatcacctgaggtcaggagttggagatcactctggccaacatggtgaaactctgtctctactaaaaatacaaaaaaattagttgggcctggtggtgggcaccttcatcccagctacttgggaggctaaggcaggagaatcgcttgaacctggaaggcggaggttgcagtgagcggagatcactgcactcaagcctgagcaacaagagcgaaacttccatctaaaaaaaaaaaagggttttcaggctctcccacagtagattggatagccgcagagaggtgagtgtgtagtgagggagtccctgcttattgattgattgattggttgattgattgactgattgattgacagagtctcactctgtcgaccaggctggagtgcagtggccccatcatgcctcactgcag

SEQ ID NO: 1243753 - DNA, 4001 bp, Homo sapiens
agagaataaagtcacattttcaaagagcactcacagctctagaggcagagttcgaccttgtacctatctatctcctgtccagttttcctaccaagcagctgcttcagccatagatgagcatgtagataattattaaatcaccaaagatttggtcctattctctgctacactgtactttgaaagagaaaagagctgagagcctagtgcagggacgacatctggcctgggtcccatcacccagccggtgactgtattgcagtggaaatgaccctcgactggtgttaactgggctgctttctagccgtgtgcccttaggaaacgtgtgtagggttaatctctgagggtgccagagctcatctggggacataaaaggtcagctggaaacaggcttctaagccccaccccctccaactctggcattccccagccaacgggtcttacatccccagcctcccattgagacttgacccagagcattggtggcttttaatccaagggcgagattctcaggctgacccctgggccctccccagtccccaccacctcccgctggaataacgcagcccaaagcctcccctatggaggcaggaacttaggtgagcagctccacagggcacatcctgccctcgaccctgaagaccccgccctgaagagccggatgagggtggtgaggagggcgggtcggagccgagggggccctctccgctggaggagcgctggatccccgccgatccttcccctatcccgcccgtaagtcctcaccgtcgagtgggccccgcgctcctagggccgtgcgccccgcgcgctgcggatgccagccacagcccccttcggaggggcccaggaggccggaggccggcggctcacttcccgcagagagaacgcgagggcccagccccgcgggcgcgcagaagaggacaagctggggtctgcagcagcctggaaggtcgccgagctggcgctgccgggcggttctggcagcaggggagaaggccccaccccgagcctcaagccctccgctcagtgtgtccgcagccccggagtccctcggtccctcggcggcctgtgccgggctccggacccggctctgcctgtgtcggtggctgtgcctccgtgccccgcttgccggggtccgcagtctatctcccgctctcgcccgaggcgggctgtgaggccgcggcccgggccctggcctgcagcgccatctcgtggacctgtgaggagttgccgaggcccgaggcctgggcgggctctgggttcgctcccactcgtgctcccggcggggagctgcgggagctgccaagaggactcgctgggaaaccaggcgcggccgtcagcgctggaaatcggtgcttccggagtgggtttggggtccccggccccatccaataggaggaacagatatgcgcctccggagagcccaaaaggaagtccaagtgcaaaaccgccccgggcgtgctcggacacgttcagcgcccggcaaccagcctccaccccgaaggcgctcccgggagggtgcccaggagacccggagctcgggcttcctcccaagagggcgggggctccctccgctgccgccctgtcctgcgagcagggagcgctcggcctcctgcgggatcccgcctgaccgccggtgctccgcacctcggggccaaggacagcgaaggagggggaggaagcgggactggattttgggtccttcccagagcggaggaaggcaggctcggggtataaatccagggctcgtagaggctgtccctcaaggggccgtcccataaccgggaaatagggggtcccggcctcaagccggggcgcttgagcgtgagagtcccggggagagcgaggctgagcgcgcccctcccgccccaggagcaccccacgcaggagttcgcggtcagctggggaggcgggcccgggagctgcggccttcgggagggcagggccaggccataccggtggctccggttctccacagcagcggcgggggagtggaggaggaagggcttgagggctcggaagattccgattaacccgagaggaaatgaggtcccctgggccttgggatccgggcggcttagccgctaggggtctctcggagcccctgcactcacaccctccatctccgagttcctccgggaatcgcacgcgccaccccacaccgacacgcacaattccctcttagacctcacacgccccacacgcgagagcccgaggcgacaggctaggccgccagcaggtatcgccatcgtcccagcactggccctcctgccacgcgtgtgccggcggctctgccgtccaaggaccccgggccaggccctgaagggttaaggaggccttgcggcaccggagcggcgggtacgccgggcgcctaggctaattggcgaccccggggacaatgagggctgggaggccggggaggagggtggcttaattggacatgggagtggcctagcctttgtctgggacaaggcccagccgccggccgcgggttcccgcagtcgcactcaggctaccagctggggccccgcggagcgccgggtgggcgactcggaggggacatgtgcggcgggaggtggcggcgaaagtggtgtgggggatctcgaggccctggagtcccaccccaccccacccgggttgctgcagcaacgacgcggcctaaaaacggccgcgactaggccgccccgcccggccttcgcaggcacccgcctcccccgcgcccatgcccgcacccgcacccctcccgcgaccctaagtcggtgctgccccctggtgtccgcagccctgtacgtaggccgccgcgggcgcgcagccgactctcgtctccctcctaatgtcctgctgaaagtgagaagccgcgggacgcaaacgcgccgctcctctaggagtatgagaggcgtttcagcccaaagcgacctccagcaaacgcgctgcccacgagcttctatttaggctggaaaacgggcttctctgtccctgtcgggttcccggacctgcccgcaggtctgaggcagggaagccagaacccaccctctggggttgggatacgttctactgcaacctcccactcgtgcactggctgagtcccctccctgctccagccgcattcggcgtggcctgggggcagcaccatcctgaagaggcgggcctggttctctctctctcgctccttgcaaatgtatcggcccacaaaggcgtcctgggagtctgggggcccaactgtccattccaccttcaccatcaccgttcctccatctcaacgtccctggtgttttggaagccagcaccctccccaagccccaccctgtgcagtgcccaaggtgggcagcctgttggggcagggcgttcagggtccccaaggcttaaagaggagagaactgggaaggaggtggcgtgctcggtgaccgaccagacccagggctaaaggagtgcccgcccagctcccactgctagaagtgggggctggagacacctgctagctgggcaaggagggggagctcaccggcgcggggtgggaggcagctgtccttgcaggagtgggtctcggggaaggaccagcctaatggagactgacacagctggaccccggagagaccccagccaagcccattattatacaggggaaactgaggcaggaatggaaatagcccactgaccccactctccactctcccaagagggatttagatagatgagttaaagtaagaccttttagtccagattttgccactctagccaacagccctgacgcggaggaaatgtttgtctttgaggttcaggaggcagagagaggggaaagaattctaggctcagcgatatttggcggggagtacgggggtgggacacagccaaacccctcctccgaagggagaggttggacaaggaacacccatcctcccagcccacccacccagaagcattgaaaggagatgggtttccagtgtggtttcccggaaagggagtcagaagccaggagtccaggccgctcggctgctctcctcccg

SEQ ID NO: 1243754 - DNA, 4001 bp, Homo sapiens
cactaattacaggacactgtatagttttcttgacctctctgggtctcagtttcctctgtggtatctacctgccttcctgacctcttttactgcccttccattagtactacagaagtttccaacaatcctggacccatcccagagcctctgtgcttgttactggccctgctgggggaactccttttcaatcttcacaagattggctttttgtcatttagagtttatatggaacataaactccaggagggaggttgagcttgatcaagcacctagggctgtgccttggtacatagcgggggatgcaataaatacatgttggccggacgcaatggctcaggcctgtaatcccagcactttgggaggcagaggcgggcggatcacctgaggtcaggtgttcgagaccagcctggccaacatggagaaaccccgtctctactaaaaatacaaaattagccgggcacggtggcacatccctgtaatctcaactacttgggaggctgaggcagaagagtagcttgaacccaggaggcggaggttgcggtgagccaagatcaggccattgtacttggctactcaggaggctgaggcaggagaatggcttgaacccgggaggcggaagttgcggtgagccgagatcgcgccattgcgttccagcctgggcaacaagagcgaactccgtctcaaaacaaaacaaaacaaaaaccatgttgaactgaatgactaaagggatgataacacctgcttcacaactgcagtaatatttatttattttggttttgtttttgagatggggagaggggaaaggggggacctcaaaggggtcttgctatattgctgaggctggtctggaacttagactcctgaatagctggcactaaaggcgtgcacggccagtatatttaagtgacacaatatagtgaatggtaaatgctactatattagctgttgttaatcataattataacgtttgccatctctagcgatcatactttaacctttctccataacttcagtctaaatatgttgacatgtggtcaaaagtaattcatgttaggtgagaaattaagaggagtcatccaggcctgaaaccagctctgagaactggatatacagccaccaagtcacaagcaaaacacctctcaccatccccagcgcggtaaaggagggaccaaggatgtctattggtcgtctgctagtttgctttcattaagagtcagatgctggggccacggtgtaggtgtcactggagctgcggggggggcaagatgaccccgaagtcacgacagaaacagtgagtttctgctgctgacaagtgcagccctctcaagacaaagagcgagtgccatgtttcccagatacaaattcctccggggcaagacccacaaggagacctggttgctggcgccacccaacagctccttctgggctgcccctggttctgttcccgcccagggctccccctttatctcatccttccagcccctcctcactcacctccttgcacagcgcggctcagagggggcagcggaggggggtcctcaactccctcccagctctccgccaccaccccccagccccctcaacacccatttccggcgccccggcgtcctttctcccgctccgcgtccctcctccagcccggcgttcccgttcccaggacgctggctccctcctctcccgctcccttgacttccccggctggggctccggccaccgccccttccggccccctccggcgctagacactagccccgcgacctcttccttaccccccgacccccgcccgtaccgggatcagttccttgagcgagcgccgcacaggcacgatttccagctcgccctcctccacctccatgggctccggctcgccacggtcaacaccggactccgcctcaggggacgggagccccagggccggccccgccggggcctccgccttcaccgacacccgcaggccccgtacggccgccatcgctgcctgccggccgcaccactgagagcccgcccctcacggccgccggctagagcgccgctgccactggccacagaggagccgccgcagctacctagagcgtcgccggcttcggcccagaaggccgcccttagcgccgccgccccctggtggcgggagaaaaccgggccggctgcgcgggcgggacctggggaggagaaggcgggactgagcggggacgggggcggggcctgcgggaactacggagcttggaggagaccggggtagtcaagggttacaatgtagctacgccttgaggctaaagctgtactaaaagccaactttcctgagtgatcactatgggccagacacttccaagcgctcgaacccttagaacaactctatgaagtagatcctattttgacccccatttcatatatgaggaaactgaggcatagaaattgacccaaggtgacgccatttaagggataaaagctggatctaagtcttccagagtttacaatgagccttgatatatcacctctggacaatctgtaggtttataaagttacttgccttgccagtctttgtctcttaaaagtctccccaaaattggcccatgttacatacacaaaaattgagactccaagagggagagacctgcccaaaggccagaacttggacgccgatttcctgactcctgagggtgccatccactgtagacctgtgagcatagtttccggcggatatttctaacgagagcctggtgggggagaggggttgtctacgcgtcccgagggtgtcactgatcagctgctgttctgagtcctgattttctttttctttctttctttctttctttattcctttcttccttcctttctttcttcttttctttctttctcttttccttccttcctccctctcctctttctttctttctttcttttttttttttttttttgtagagacagggtttcaccatgttgactaagctggtctcgaattcctaacctcaagcgatccacccgcctcggcctcccaaagtcttgggattacaggcatgagccaccgcgcccggcctgagtcctgattttgcatcttcctccctgggtaaccttggacaggtttttgggtctgttttcccatctgaggagggcataggtgagaccctacagtctctgaggccctgaggccctaccagctctgaccatggaggagcaaataatgataaaccaaggaagagcatggtcagcatcagacacacctgggtttcgagctggctggccgggccccatccaccatgtgtgaccttaggcaagctgcttagcactttggagtctcagttccttcatcagtaaaatggaccattacctacctacaaaggaggttgtgagggttaaatgtgataatttatatgtagatacagggtccaacagaaggggtgcagtacatcacagtttttcttaaatttgggctaaaccacaggataaacacaagacagagctctttagaggactagttttatttgatgaatgggacacaaagtacttttaaaaattgggttgaggccgggcacggtggctcatgcctgtaatcccaacactttgggaggccaaggcgggcagatcatgaggtcaggagatcgagatcatcctggctaacatggtgaaaccgtgtctctactaaaaaaaaaaaattagccgggcatggtggcatgcactacttgggaggctgaggcaggagaatcacttgaacccgggaggtggaggttgcagtgagccgagatcataccactgcactccagcctgggcgacagagcgagactccgtctccaaaaaaaaaaaaaaaaaatgggttgaatgcatacatagaatatgtacgggtgtgtgtgtgtgtgtgtgtttaatttcaaacaaaatgtgtagttggggtggccagctataggtaagagtcacagcccccaccattactaggcctgtggggttaggggatgggagaggaggaagtaatccctcctcagctatggacaccaggaggccagtagaga

SEQ ID NO: 1243755 - DNA, 4001 bp, Homo sapiens
gttgcagtctgcacacagtaagccccaggctgcaggatttgaccgagtctttatcgtggcttccgttacatcttattctaactcaggtttacggacacaatgctggaaaaccaattcctgctctacccacgcctcaacttgttaagaaaaaacaggatctaacaccgaggaatgtcacatcttcgccattcccacttcctttctgccctaggcattcgatatgtgccaccaggggccatcaggactagggctctgcacccatggcagcagacaggtgtgaagctcagagtccctcctaacagcctccctccagcgtcttcttggcctgcaagataaagtgttttgtctgaatggcttgcttccaagttagatacgcctcaaaagcaagctaccacaccacacgttgtgttctaccaaataccttacagagaacttgggtgctggcatatggtgggggctcgactggttggagcctggggccccatgggcaggttctctgggtcacttgtccacgggacaagggcctcatgacactatcacagaactcactgctgccccctcctctgagcccccacgagatgccacatttggtctcaagctctcatagagggaaagcaggagccccccccctttttttttttttgagatgcagtctcactttgttgcctaggctggagtacagcagcgtgatctcggctcactgcaacctccacctcccaggttcaagtgatcttcccacctcagcctcccaagtaactgggactacaccaccatgcctggctaattttttttttctttttttttgtagagacggggtctccatatgttgcccaggctggtctcaaacttctaggcctaagcaatccacccacctcagcctcccaaagcggtaggattacaggcacgcgccaccacacccagcaaaaagtgcaacttctgatgagttgtccacccctggatccaaggctgctggggccgggtagggatgaaggccgtggaactcttgttcaaataccctttctctggtccaaatctccggattaacagctcccagtaaacagagtcagcactggcatcaaggcctacccagatacactgaggtggtacccggtgcggctgacacttagggaaccagcctcagaatgacttaaagccccacgggcaagaagccctatcgtgccagttgtgagggtggctgggggttccccgcaggacacgtgctgaaggaatccaccactgcaggtgcacaggggctgcaagtgccagggaggtgaagacccggaaggtgctgggcactttccgggagtcctgtgttgggtcaatcctggcatgacaccccccggcggcagtgctaacacgaaagcttacgcgttttacaaggcgcttttttgcacacatctcccatcctttctgaggttggtgccagtcccgctttacaaacatgcagggacaagcccaggacggccgaggtttcgcgggctcgtcgatggctcggtgattttgtcagccggcgtctaaagcacgcggcaggcgctcaaaccttgaaccaacgggaaagcaaaggaaagccggggcccgctggctcttggaggggaagggctgggaaggggggaaggggcccgcgcccacctaccgcagcggcgaagcagctccgcagggcctcgaactcccgcgcgcagaagtccttactcaggcggccgcccggggccgtggaggcctgcacgcacctgccgtacgccgcggcctgcggaaaggacgggcgtgggtcgtggggtcccctgaccccgtcaccgtcctccctcccagccacctccccgcgcggctcctcctgccccgcagcactggcccgcccgcggctcctcacctcggccccgcaggcggccagccgctcggggaaggcgcggaggcggcttcgcacgcggccccacaccgctccgttagccgacatgagcggctattcccagccccctggaggccgccatcttaggtccgtcctcttccggtgtcaaacagcttgataggtcggcgcttccgcccataacctttcctgaacttcttaattggccaggctttgcctggcctcgagcccccgcaattggctcttgtcctagtctgtctgtgctctgggacttcggattggcctaggctccaattgtttacgaagccaacctcagggcccgccctaccgtgagggattggccggcggacccagacccgcgcagtgattggagggcccgggcctggcggaagcggggcagaccgggaggggacctggatcatggctgccgcgccgccgctacgggaccgcctgagctttctacaccgggtgagtgagggcggtccgcccgggccccggtcccacggctcctctcgagcgccgcattccccggactcgccccgggccggagccattgaccttgcgtctccgcgccgggtagctgctcctggccccttcgcccgcgccgacgcccctgagctgcccgcccgccgcgccgtcccggggccttccaagccgggccttccaagccggacccgccgagcgcaagggcgatgggcacagccagaccctgggggaacgaacaggcctcggccagcattcagtggcctccgacgggagggaaggagcggcggacccggtggacgtggagccgctgtgtccgtgctgctggcgcccaggtgggctggcagcccgccgtcctccctgacggtggcgtttcagaggactccggtcctggagaggcacccctgggttgcagagaacacagacgtctcgaagggacagagaaggacgcaccattgtaagcccctcttagtaaaccctctgagaagtagaggccggggcgagttcccaggtgtcgtcctgagcaaactgccctcttttgtcagccctgagctttcctgggctggacctcagagggggctgggtggtcccagggcgcgaccttgggctgccagaagccacgctagggttggtcaaggctctcagtgcaaggtttcgacatagtcgttctgtgctgcgttctgcagttgtcagctgtcacctgcaaacctcagcagctccccttagggcgtggtgggcaaacagtgtcagtgatgcgtgtccacagcctcgggaaacacttcaggtccacgttttcgtatgttgtcactagatctcggcccttccgaccgaaaggcttcggcacctcacgcggtgggtcccatgcttgtcctgttaaatactcttgaactctattctgtcctgatactgaataatgcaagaatgggtggttccagttttcatccctataaaccgtacatctttgtgccagtaagtaagcatgaaacaaataagtacgtctgcgctaagcgaacgtaaaacacacgacatcagtcggttctcggggagcgatggagctagtcacgctgagcggctgtcactctgccattccggcctctggggaggtggaacgattcatagtcccctgtgtggaaaaggggcttgcctgggccttgtttggctttgctagtcagtaggtaggtacaggagaggtaccttcaaatagccttacatgctggtaagtgcagggaggctgggggctgtgtcccttcttaacccaagtggcgcagctcctccgtggagaaccaccattgatttgcctcttctccgaggctgttcatccctgactgttgagagaggaccctgctgcagcctccctgtggccagtagcacagttctcatcccttcccagtcctctctccggccatgtcaacagtgagaggtgggtcgtttccatcccctttggggggctgcggattcacccctgtgggaaatggcacctcatcatggtaggggctcttgttccctttcagctcccgattctcctgaaggggacgtccgatgatgatgtcccgtgtccgggctacctgtttgaagagattgctagtatccttccttgatgtccccgtgtagtggaaagagcggatggcagggtcccagagtggtgcaaagggttcctggg

SEQ ID NO: 1243756 - DNA, 4001 bp, Homo sapiens
acagccccgcaccccaggctcgcccacagacacagtaacaaccggtttgtccatcaccgaggtctctctcttctccccttttttttgggtgggggggtgtctttgagcggtggcctcctttgctcccactggggtgcaggccctgcctccaacggtccgagatggaaggaggcagggattggaatctatgtcatcagccttctcccgactccagccctgggttcctctgcaaaggatgagggggagggactgtcaccccgaaaacttaggtgcttgaatgaagatcactgttatttaggtccctctgcccacagctcctaaaatgtaaaggaaggggacaaatgtgagaaacggggctccctcctcaagcccgcggtttggccatggtcccaacttttcccctttggcagaagtcccacggtcagctttcatccatgttgatcccccagaatttgaggccagggggctcagggacagcgggaccccccatctgccacctccacagcgggtgggcgggcgggggcttagagtctccctggaggcgaagcgaggatgccggctttaggtctccgtcttcccccaccaccagggccggggggcaggggaagcagttgaggaggctgaaggtgctcgtggtggggagcgtcggtgcagggcggcggggctgcgcggtgcgcggagggggcgccggcagccggcgtttcttggcggctccccgagccggccctttcgcaggcggccgctctggcccccggcgcaaactcggagtgtccaaggcgaagcccttcgcgtaacaccaaagtttcgaccggcggatcagacgatcgaaatgttcctggcggagatctccgggtgcggccggagccgggctggccgtcgaggggctggccgctggagcctcgggggcggccggcggggggtttccatcgacttcggcaggctggccgggcaggaacggccgcggcgccgtcccgggacccgcgggctcggtggagaggcccgcaggtggcgacggaggccgggaactgggttcctgaggcgggctggcggctgggccacgctgaggctcgagacccggggccgggcgaggcggggccgaggcgaagctggtcgtagattcccgagggtgcgggggcgcagggcagcggcccggaggtgcacaggagcgaacgccgaagtgcgggaaaccgcctccgccctcttcctcctctccgcggcgggggcacgctgcgacgtccgcatcctcgccggcggcggtgttaggaacgccgggccgcccggtcggtgcccagaggtgcttcaggccatccggggcccagccgccagggcgcaggggggcctgagggccccgcagcactggggaccgcgccgccagctccccaggccccgggcccagagaggacgcccggggcttggcaagggcgcagaaggcgagggcacgcaggcacagcggagagaattcctgggtcccccgacacggcttccggggcgtgggggagcagggcgaccctcgcggggacgccggcactgccaggcggggcgcagggcacagggtctccatggagcagcctgaggggtgcccactgagcgggtccaggtcccagcggcgggatgccctggctgcccgaagagcccacgggtgaggggaacatcgccccccgtcgacggggaggtctctgctcacgggcgcccccggcccgccacccggggccgcagagctcgggctccctcttcgctctcctcacgcggccctcccggcggccggactcctgggtccctgtgagtcccggcggggtcggccgcccttctgccgccgcgtccccttcgcaaccccggcgggagaccctctcgagtcgcccgaagcgcagaggcaggggaaacaaagcggccggcggccgcgggaggcgggaaggaccccgggcccggcacccggtgcccgggcccaggcggcggggagggcgccttccgcccgctcggtttctttcttccccgctggctcccggagaccgcgttatagagaactgccccctcgctgccccaataccagcgccggggccgcgagcccgccgctgattgggccgcaccgcccgtgacgttagcccggaccccacccctccggcggcaccgcccccgtccccattccgcacacagacacacacacgtggacccggcgcggcggcggctgggagggagcgcgggagggagcgtgcgcgggtgggatcgcgagcggccagatgcgccgccgcacgtggcccggtggcgtcctgggatttcgtcgtcgcaaagccactcgttttttcccgagcagtcacggttttgcatctgtaaaatgggacggttcatatctgccctcttgggactaaaagagctatgtgaatcaacgtagatgaatctcagaaataatgtttaggggaaagatgaaatgaggcaatggttgtttacaagctttgcacagcagggattctagcgggccgtgaatggcccctaaaacagtgcgtggcacacagtaggctcaaaaatgctgtaatgtataagtagttaataattcagtacttgtatgcaagatgaacaaaaaaaataaatttggaagggtgggagtgttattacatccatggaagccgataaataggctgtctcggtatctatttccatttctctgatgcagtatctaaatactccgcctcaactaaattccgagggctgactctgcaacccctgacccccaatcccaggatgcccccctctgaggtttgatctgccaaaccggttgaagaggccagaggagggcacgcgcagaccctcactctcatctgccccaaggaaaataaagaaaaagtgaattcccagtacaaattctgataatgcagcacacacccccaccctgttctatccccttaaccttctttagtttctgcatagcttattgttacataaaagtctgtaaatggatttattctttagtgtctgtctctcccattagtctggaaatgagttgacgagaactttgtcttgatcattggtgcatcccccactgcctagaacagtggccaagatataataggtgctcaatcaatatgtgtgaatgaatgaatgagcaagtgagcgagtgaatgaatccttgggatatttctctcttgataaaaatcaggttattggaatactgccgtttcctatctgtggaaatacagagattggtatgatgacttggggtaaaggtgtggaagaatgctgggggcggccccacagataaatatcttattctggagccaggacaagagagggtttcagaacggggacaaatgatgcagcttgcctccgggcccttctagcagtgacaacagaggtgtagtttccctatgtgtcatcaaataacatctgggaggacaggggtaaggaggatctgcctcccccacctgcaaagtccagaggtaaagtccctaggtggggcgagggtttgaggaaggaggaggtgtgatgttccattgcccaaaacactcaccctctaacatctgcagaagagctctccagggcagttgtcacaaggggggatcctggggtcctgccaagtcatgaagctgagctgggtctagactccagggctcataattgctcaaaaagcccacctctacacacacacacacacacacacacacacacacacacacacacacacggaaagttctggaaggatgatcttcatggctgtctcttctgcaggacagtgctgaggactcatcctcaacaacagtgcctacttgcactcctgtgcctaccacagtgtagacacaaggagagaatgcccaagaaaatgatcagtatgaataaatgagtgaatattacataacagtgcagatcaatggcctcttctttctctgcctccaaaagctcccagctcccccttccccatgtgagtttgggggctttattgaggggtcattacgattgtgagtgcttctctctgcctccactatccctacttccccttgctctcatcaggcacc

SEQ ID NO: 1243757 - DNA, 4001 bp, Homo sapiens
atacacacagggctttttttttttttgagactgagtctcactctgccacccaggctggagcacagtggcacaatcttggctcactgcaacctccgcctctcaggttcaagcaattctaggtgcctgccaccatgcccagctaatttttgtattttcagtagagacggggtttcaccatgttggccaggctggtcttgaattcccaaagtgctgggattacaggcgtgagccatgtgcccagccacacagggcttcttgacctgaactgcagaattttcttgcctttgtattacgcctgagaagtacttatcatcttcccattgctcccttcccacactgcacggtccatatgggcgaggctgccactctgcctcctgcttgccttggtgccagctctgccacagagggccaggccccagaactggagcttagagccctctcccagacagccaaagccactgaggtggaccacacgggcgacagtggcctcacagcactcacgggcacctgcattctctgtcactgctgtgctctctctcctcaaagtgggtgctcagtccccttgtcaagaaatgtaggggttctacaagaagagcttggtgagatgtagggactggggtttatggcaggtagggtatgtgtgtttgtgaaggtgtccctgagagagactgcaattcctgcctgcatatgactacacacgcgaatggataacgtattaacagtctgtgtgtgtagactaggaatgtgtgtgcatgagggggatctgtgctttagttttcttgtttgtttttttgagagacagggtcttgcttgttgcccaggctggagtgcaatggtgcgatcatagctcactgcagcctggaagtcctgggttcaagtgatcctcccacctcggcctcccaaagtgctcggattacaggtgtgagccactgcgtcccgccctttagtttcactgttggtgttacattgatagaaggtggggggagtggttgagggtgtcccccgccctttagtttcactgtgggtgttacactgatatgaagcggggagtggttgagggtgtcagggattataggaggatgtcacagtgactggtgtcatggggtttgtgcagtccaaggctgccccttggtgggtgcgagggggagcccatgcagcgaggacctttaatacacacgtctgtgggtgtgggtgtctaccgcgcatccacaggcaggcagccttaacgcaagagggtgggaggaggggaggcaggagtctgcccttctctgtgcatgagagtgagggcctttcatgtggcatcaatgtgtttggggtggggaaagtgtcttgtgaggagggcctctgtggggaaggcgcagacgtttaagactgccagttttggctgagggattaggaagttgagagggtgtctttgtgtggggctggaaggctcttaggaatggtggatatctgtaggggtctctgtgtggggctaagggaccgcagagttggtggatggtctccacgggtggggctggggcatcaacgtgctgctgacgggcatgtgtggggagcaggaggacctcggtccgggaccactgagcttctgtttccggtctgaagggtaaatggggggtgggtccccaaagagtctccagggaaccggagctgacgcagccgggctagctgctcctcttaccgtcccccttgccagaccccttggtcttcttcttcctttttttcttcttcaccttccgtttggccagctcggaggcgccgcctgtgatggggggcagtctagacccccgcgggcccgcggcgccgccctcccgctcctcctcctcgccgtcgttgtccttgtaccccattgtccccgccccaccgcggcggtccagccgcccgctgggctgcaacccaacccgccccgggggcgcccgaggcccgatgccgactaatcggcgactctcagcgcggaccgccaggccagggccacgcgtctccatggcgaccacccctgctgcgcctgcgcagtcaggacgcttccgcccggtgccccacggaccgcggtgtgcgcatgcgtgcttccgtcttttggcgaccttggcacacagcggtgtgcgcatgtgtgcttctgtcggggatctcgagaacagagcgttgtgcgcatgcgtacatctgtcggagtgctaggtacgcagcggtgcgcgcatgcgtgcttccatctgttggcgataccggcacagcgatgtgcgcatgcgtgcttctgtctgcggagacctccgcgcatagaagtgtgcgcatgcgtgcgtctgtcggaaacctccgcacacagaggtgtgcgcatgcgtgcttctgtcggggaccgcggcgcacggtggttcgcccatgcttgcttttgtctgttggaatctggacagttgaccgcaggaaggggagggtgggcagagagattttaaatccctgggctgacactcatctcgtccagtcccgtgcctcgatcctcctgccttggcctcccatccccacgcctggctaagagttttgatttttggtttcaggctggtctcgaactcctgggctccatcgatcttcccgcctcggcctcctagatcgctgggatcacaggcatgagcctccgtgctcggcctcctgtacctttttaaatgctgtgtattctcccctcaatttttattgcctgagtttcagcctcgtacatctaccctggactctcaaagccaatgtgtccaaaacaaacttacttcttcatggttttccactttagtgaacaaaaccgctggactggctggaaacctggtgggcttccgtgtcccctaccctctcccttgtcccttacccaggctggggccgactgccgtgtctggcactgggacttctgggtcctctcctgaatggtctctgctttcaaaccttccccacgaactctttttccgcacagctgctagaacaaacttttaaaaacaaccaaaccgttcactctcttgctaaaagtctccagtgatgaaaaacaaaacataaaaagccaaaaagtcctccattgcttcctcatcacaatttacatcaagatctaaactcttgtggggctctgtgcagggctgacacccgtagtcccaacactttgggaggtcaaggtgggtggatcgcttgagcccattctgggcaacgtagtgagaccccatctctacaaaaaattaaccagctgcgctgaggggcacttgtggaggaacttgagcctgcagtgagccgagatcgcaccactgctgtccagcctgggtaacaaagcaagactttctctctctttttttttttttgggagacagagccttcctctgttgcccaggctggaatgcagtggcgtgaacgtgactcactgcaacctctgcctctcaggttcaagtgattcttctgcctcagcctccctagtagctaggactacaggtgcgtgccaccacgcctggctgattttttattttttattttttgtatttttagtagagacggggtgtcaccatattggccaggctggtctcgaacacctgaccttgtgatccgcctacctcggcctcccaaagtgctgggactacaggcttgagccaccacgcccggcctctgtgtcttaaaaaaaaaaataacaaagtgtggcttacaaggcctggtatgatgcatcacctgcttttctttctaggtttaccctccacagattgtattatctgaaaatggctgcagaggctgggcatggtggctcacgcctgtaatcccagcactttgggaggccgaggtgggtggatcacttgaggtcaggagtttgagaccagcctggccaacatggagaaaccccgtctctactaaaaatacaaaaattagctgggcatggtggtgggtgcatgtaatcccagctatttgagaggctgaggcaggagaatcacttgaacccaggaggtagaggttgcagtgagctgaaattgcatcactgcactccagcctgggtgacagggcaaggc

SEQ ID NO: 1243758 - DNA, 4001 bp, Homo sapiens
cacggaaagcagaggttgcagtaagccaaaattatgccactgcactccagccagggtgacagaacaagaccctgtctcaaaaaaaaaaaaaaagaaaagaaaagaaaagaaaaattgggccgggcacggtggctcacacctgtatcccagcacttttggaggccgaggcaggcagatcacaaggtcaggagttcgagaacaccctggctaacacagtgaaaccccgtctctactattttttgtaaaaatacaaaaaattagacgggcgggcgtggtggcgggcacctgtagtcccagctacttgggaggctgaagcaggagaatggcgtgaacccaggaggcagagcttgcagtgagccgagatcctgccactgcactccagcctgggcgacagagcgagactccgtctcaaaaaaaaattaaaaaaaaaattacatgagtcaacacatgtgtgactcatgtatgtccatatacatgcactgcacagacctatgcaaacaaacatttgggactatacacacacacacaaatcccgaagatttgctcacagaataaccccatgagtcttcctgtctcttccccacaccgcttatacgtagaaacacaaatactggaagcaaaatgttgggggaaaaattgaaccatcagcaaacagtctcggaatctttgatctggggggttggtggaggagaactctgctgggaaggggcctacacctaggagggaaaaggccagggggaggaactgaggtccgcagaggtttgagaggtgtccctcccatcagaccaaagaacccggagagcaagccccatgccctgccactatgatgtcacaggaggaaggcgtctcgccctgcaggtcaaatcaattccctttgtcttgctcactgaggtcacacggatttttgcgtatttagagaatttgcggtgtgaggtcaccctagagggcgggtctgtgacgtcacaaaagacaaagacaccgactggtttgggagaagctggctttgagccctatccccttgccttgcagaaacctggaatgagtctattctcaaattcagggctggaaggccattctgtgagctcagggagcttgcgctcaacacctgtcctccctttcctccagtcctcgggctgcgttaagaaaactgggaggcggtggcgggaggatagcgtgagcccaggagttcaagaccagtctgggtaacatggcgagaccccctctctacaaaaaaaaaaaaaaaaaaaaaaaaaaaaaaaaaaaaaaattagcccggcgtgatggcgcgagcctgtagtcccggctaatcgcgaggctgaggtgggaaggttgcttgaccctgggaggtggaagctgcagtgagccgtgatggcaccaccgcactccagcctgggcgagaatcagaccctataattacaggctcacacctgtaacatggcgaaaccccgtctctaccaaaaatataaaaattagtctggcgtggtggcgcgcctgtaaccccagctactcgggaggctgaggcaggagaatcgcttgaacccgggaggctgaggcaggagaatcgcttgaacccgggaggcggaggttgcagtgagccaagatggtgccactcactacgctccagcctgggcgacagagcgagactttgtctcaaaataataataataaataaaaatttaaaaaagaaaagaaagtaaaccgaggaggtgaaagtggcggagccttctttgtggtgagaacgctggagtgaagatttagggaggtgtgtggggtcttccgggaagctcctatacctgatcagttttccgcaaaaggggcggaaccacgtgactctggaagtagctgcgggcgtggtagtcctgctgcgcgttgtagggcggaatcgccgaccacagcttgggcctagagcgcccataagcgcgggcagcggtgctcacagccaccccgtccaagataaagcctttctccagtcgcaggcgacactcgctcaggtacgccatcccaaccaccgtagcctcggagggcctttctggtgggggatgaggaccctagatggggacacccctgcgcattcttacgtgatgtcaacgacccctgcgacacaaaccctattgtctccactcaccccgggttgaccggtgggcccttaaggccgtgggggaagttgcttgcttggccccagaggaggttgaccagactgactatgcaagaggagttggaaagtgaaggggaggagactggataaccgattgtgggcagtttgtgtgcatttaggccccgctcccccagttttcctttaaggtgagtattctcttttcccacggtattacatgctatttcctcagctcagttttgttgaaaagcttgtacccggaattgatcagaaagttcagatcgcacctacttccaattctcattttacagagctagaagttgaagcttagaaagtttccctaggccgggcgcgttggcttacgccagtaatcccagcattttgggaaaacgaggcgggggggatcgcttgggcccaggaattcaagaccagcctgggcaataaagcgaaagtccatctctactaaataaatgaatacttagccgagtgtggtggcgcgcacctgtggactcagctgcactgcaggctgggccatggaggtggaggctgcagtgagccatgattgtgccacactcctggatgagagaaggaggccctgtctcaaaagacaaaaaaaaaaaaaaaaaaaaaaaaaaaaaaaaaggccgggcgcggtggctcacgcctgtaatcccagcactttgggaggccgaggcaggcggatcacgaggtcaggagatcgagaccatcctggctaacacagtgaaaccctgtctctactaaaaatacaaaaaattagccgggcgtggtggcggacgcctgtagtcccagcaactcggaaggctgaggcaggagaatggcgtgaacccgggaggcggagcttgcagtgagccgagatcgcaccactgcactccagcctgggcgacagagcaagactacgtctcaaaaaaaaagaggttccccaaatccagttagctgacttccggtcagtccacttaacaattctcctgccccacccgaattaacattatttatttacttattctttttatttatttatttattttagagacaaagtctcgctctgttgcccaggttgtagtgcagtggctcaatcctggctcactgcaacctgtgcctcccggcttcaagcaattctctgcctcagcctcccaagtagctgggattacaggcacctgccaccacgcccggctaattttttgtatttttagtagagccggggtttcaccatcttggccaggctggtcttgaactcctgatctcgtgatccacccctctcagcttcccaaagtgctgggattacaggcgtgagccaccgcgcccagcctttcacttattctatctatctatctatctgtctgtctgtccgtctatctatctatctatctatctatctatctatctatctatctatctatctatttagagagggagtctcgctctgttgcccaggccggagtgcagcggcgcgatcttggctcactgcaacctccgcctcccaggttcaagtgattattccgcctgagccttccgagtagctgagattacaggcgcctgacactaagcccggctaattttggtatttttagtagaaacggggttttgccatgttggccaagctggtctcgaactcctgacctcaaattatcagcccacctcggcctcccaaagtgctgggattacaggcataagccactgtgtctggcctattatatatattttaatataaatataaaatgtatattttatatttaaatattttatatttatattaaaaatatatatatatattttttaggtgtcacccaggctggagtgcagtggtgcgatcttggctcactgaaacctctgcctcccgggttcaatctattctcctgtgtcagcatcc

SEQ ID NO: 1243759 - DNA, 4001 bp, Homo sapiens
aaaaaaatcagctgggcatggtggtgcatatctgtaatctcagctactcaggaggctgggtggaagaatcccttgaccccaggaggcagaggttgcagtaagctgagatcgagccattttctttttttttttttaagagatgggggtctcactgtgtcggtcaggctggtcttgaactcctgggctcaactgatcctttggctacagcctcccaaagtgcgggataacaggcataagccactgaatgttcttatttttattatcatctgtccccccaacccccactagaatgtaagatacaggaggggtttgtttcagtgccttgccacattctcagggcctggaattgtgcctgcaaccaaacaggtgctcaagtatttgttgaatgaataaatgatttatcagtcagtctcttaggagtttagttagcaggacttggttggcaagaatcagagaagtcgggagccagccaagagggggaggcggaactgccctgcacaggtacttcccggagccccagctgcctgctctctttttagcagccacaccaacaatgtatccgtttttaaagcaaatgaggaaataatggttcaacctgggcctcattcaagtgagaatggcgtcatcattaccctgtacctgccctttagcaaaatagagggggaaggccctgctctgtaacctgatggcctagcaacaaggggcaagggttagttgggacaatatagggaggtgactgtccatcctcaccttaatggacatgaggggaggggagggaaggatggggcaagaaagtgcaggcagaaagatggagcaggcaaagatgaggaagcaggccaggctaggggctgtcagggaccttccccagcgtcccctcctccctggtcctgtacccagctgggtcccagacactctccactccccacctgcctctataaggaaggcagcctcgtgtatgtcaggcccctgggggagccttaacttcaccatcctctcacggccctcctcctggtcagagaatcccaacctcccaggccccaccagaattccccagccctccacggggcctcgcccaccgggcagagctgtgagggtctcagggggggcttctgctcccgatcagggacctggggcagagtgatgaggatgcacctgcccagggaatcttccctccaaacagcccagccaaaggctggaagctgagcaacttccctgcctgtgtgccccggaggtccccacactggcctgcttggcctgcccatctccatcactcctagggccctgcagggtgaagagagtgttccagaactgtccagccatcctccagcacacacctccccactagtaactcccttcccagccgaggcgccctccaccatgggggttctgacaccagggtcccagctgggggacttctccctgcagcaggctatgccacttaccttcctcccgtgccttggagaagctgctggcagctgtaagagaggtaagggcgataaggagagggcctggtgtggaggggagaccagagacagcctcgagacccacctgctgaagccaggagggaggagcaggctgattcttggtagtgaggccccaggactcagctggcaccatcactcacaaaagctcttttgcgcccctccccccacaacatcgcctctcatccgcccatttcgcagatgggtaagtagtgagcccagaatggtgcagaaatccctggaccacatatacagcaagtttaggggctggtccgagactcaagcccagatctttccctctctgtccatgtttccagaggtgcccttccttcaggcctcatctctcctgtgctcccagtacccccacctgagcccaagacctcaaggccccagcagcagccccaccatcacgtccctggtggactcacccagcacggccaagcagaacagcccagggagccccatgcctcggtgggtgtagggcctctgctcgggcagtgagaacctcctagttcctggcctcccccaccctgaggcccctgggatgctccctgggtgggtgcctgcagtggggagataacctggaggccgcagcaccccagggcctcagctaccagggcggggcccagagagccccggcaggcccggtacagcaaactccccctcaatccccagagaagtggaaggagtttggaccttgaagccagaccagggcttagactcagcagtcacctctgagccgcaggatcccgggctcacgtggtgggcagaaggtgtccatgctccgcggggcacagtggctcacacctgtaatcccagcactttgggaggcctggatgggcggatcacctgaggtcaggagttcgagaccagcctggccaacatggcgaaactccatctctactaaaaatcagccgggcgtggtggcgtgcgcctgtaatcccagctactcgggagactgaggcaggagaattgcttgaacccaggaggcggaggttgcagtgagccaagatcacgctactgcactccagcctgggcaacagagtgagattccatctcaaaaaaaaaaaaaaaaaaaaagatgtccacgctgtaacttctggagcccgtgagcaccatgctacgcggcaaggggaatgaaggctgtgagtcttctcattttgagaggaggagcccgtcctacatgacccaggtgaccctcatgtaatcactggggcctttccaagcagctggggacctgctgggctgagaaaaggcagccccacccatgatggttcacagccgggaggccaaggctgcacccagccccagaatgaaaccccagaccgacgaggcccctggtcctggagtgtgatgggtcctggagtcctgggtcccggagcgtggtgtgcccaagcaccgcccttcagaagtccctcaggccccactgagggtggtgggaggtcacatggatggtcattccccagggaactggccccagtgctggccttggccagcagcagacccagctgcatcgcaggcagtgtgtgtgcagagttcagccacagagcctcctgcacatgcagggagggtgggggtgagcagggcctcccagagccccgaggccagggctggggccaggcattccccggaacacagagagatgtaagggcgcaagggattgaggctggggccctgccagctccgctgtgggccactgcacccggctttgtgcccaagctcagcctggggctgctggaccagcctgtcactttctggcccggctcagtttcccacactttgtgtggggaatgccttttctggctgcctccttcaggaatatgtcccctgccaccaggtgaccattgcctcctgtgggagctgctgccacctgtggctcctgaccggtcaatcacactctctgcccctgggcaccgtccaggagtgaacacctgaccaagggaggccactcacagccccggcccagctctcctctcagcctttcccaggcacttgctgcaccggaggcctgggtgtgttgggaagctggtctgagggagtggccctgctgaccagggagtggccagaaggatggtggggaggcaggtgcaggtgtcctggaggtcactgcagactggctctgttgacccctcggtggccccctctcccagctggcatgagtccgtttctgcaccttgctacccatggtcccggggatggaggctgcctcctgtgcacccaccggcctctctgttttcggtttctcccagctggggagcaagagcattttctcttagtttcttagtaaaactcccttcccttcccaaagtctgttctcacttctgctgaaggcgggtggggaagggaactgaagactgaagggagccagaggtcactggggagctggctggctgcccaggccctgggctgctggcagcctcttgcctggaggccagggaaactcactctttttctccacgtggtggtgttcaggggaaccttgagttaaggcagctcatgaggagctcttcctcttcccag

SEQ ID NO: 1243760 - DNA, 4001 bp, Homo sapiens
atgacaacagtgttctagaattaggtagtgataactgatgcataattctgcgaggactaagaaccacttaatttaataaacttcaataaatgggtaaatcgtatgccatctcaattaaatctcataaaagctgtgatttaaaaaaattacatacacatcataaggtcaattatgaaggaaattcaatttatttatttattattgagatggcgtcttgctctgttgcccaggctggagcgcggtggcgcgatctcgactcactgcaacctccacctcccaggttcaagcgattcccctgcctcagcctcccgagtagctgggactacaggcacgtgccaccatacccggttaatttttactagagccagggttttagtgttagccaggattttctcctgacctcatgatctgcccgtcccaaagtgctgggattatgggtgtgagccaccgcgcccaggctcaatttaaaaacctggaagatgccaaatgtttatctgtgtaatgagattatggatgactataatgcagaaaagtgtaaacactttaacagtttaggagatgatgggggagctgacttaggtcacaaactccccacctctgatggcagcccttactacagtgtaaccccatcctgttacatagaagttacatatttttcattttcacccatactaaacattagagagcagtgtcctattttatcagggctgtaaatcagagatcaaactgattctgccagtacttttttgcactacatttttgtctccttagtaaccagcccacagcaaatttgtgttcggtgaatggactgcctggggcttacgaagttgtccaaatgaatccttcactctcttgaaacccatttatcaaagtatccacacctgaactcaaggctcttctggggatgacccaggatgggtcctgcaaggttaagggagttgctgccctgggatccccagaccagtacttacttttccccggcaactttccgcactaatttcgcttctgtcccattcagttccagctcccaacctccagacatcttagggagggttttatgcttctgaatttttctttcctccttaatttcatcactcaggaaatcaacaaaagctttgtctcctagaaaagaaatccagatacataaaaaggaaagccagttagtctaaaacataaaactattacccaggttattgcagccagaaacctggactgtttctaatctctctgctattacggttactctagaagcctgtttccttatcggtaaaaataccataatagtagtaggaagctgagcctgattctggaaaagtgatttccaacaatgaacgcattaccactttccgctataaaccaggagaatttccaatcctcttccacttgccaaacgatataactatgctattttcaaccacgaccatgggccttcccaaaggtccactttcgatagaataagactaaggaaaaaggtaccctagtatttaattttattcaccccctaccaaaagaaaacgaaactgctggataggggaggtgggggaaatatgatcatacgtgggtttagcccgctggttgccaatcaatggaaaaatgtcccagacctcagaggtcggttgcaggccctattcctggtctacgttttccctctgttgaacgcaaaccacacccccggcccgctaaacctcaccgtcggtgtgcagcgagccgcagccacagccacaggcgcagggtccgcgaggccgcaggaggcccggccgccgctcggaacctgcgcgcacgctgagcagcccgaagggccgggtgcacagccggggtgccggctgcaggagctgccggaaaggcgaggcgggcgcggcagcgcggaggccggcgacggaggagcccagcacacggggcacgcagcgcagcagaggcagcatcgcggaaacgactgcgaacacgtgcagatgcaaaggacaacccaggcctaggcgccccgcgacctgaggcgccgccggaagccccgcccctgcccggaagcgcttcccgcgccggcgctctgacgacctaaggccagcgggcggaatcgcgccctctgctggagactccggtgcagcccgggaagcctcgaatccggattccggagctttcttgctgcgctgccgagtccgctgtccgaagctgtttaattccctctagtggccgcttacccactttccacctgctgttctcaaagcacgcaaggcttttgggctgcgtggaatgcactcttgtctcccgccagctctcaccagacccttccacggtcactttcctctaggaggctgtggtgttatgatatatatatgtattggttttcatccacagttcctgggtcgtaactcctatagcccttgttacaatgttctgtgataatgttgggtgtgttaggcctcaggaaacagactctccccttctcctgccctccttttacctgccccaaagcaggactctaatctccttccacatttctgattatgggtcttaagtcccttcccagagaaggtcccaccatataccctgggggaagggatgctgatgtccagaagcttccataaaaacccaagaggagagggtttgcagagcctctgacagctgaatacgtagaggttcctggagggtggtggcccagggtaggcaaggaacctcggagcttcttccccattccccaccctgctcatctcatctgtatccttggtcatatcctttatatgaaaccggtgaatgtgtttccctgagttctgtgaactgctccagtgagttaacataatccaaagaggggggtcgtgggaaccccaacttgaagcgggttggtcggaagtttcagaggcccagacttgccattgctgtctgaaggtgggggcggtcttggggactgagccctcaacctatgggatctgacactatctccaggtagatactgttgggattgaattggaggacacccagctggtgtctgctgcttagtgtggaggggaaaaacccaaacctttggccacataagtcttctgtgttgattgttgtgttgtgagagcaaaggaaagtctgagggttttcctgaaagaggccttctagaacctttttttccaccggctcggaactcatgcttgtgcgcacccagcccatatgcttcattctcttttcaacaggaacctcctagcgttgctgctttaaccaggttaaacccaaccagactgtgacatcctcaagggcaggatccatgattaatttttgtgaccttccctctctgcacctccaaccttgcatccaagttctaatggaacatcatttttctggggacaagaagccagcttatatcatttagataagtccagaggcttccataaaaacccgaggacagggtttggagagcctctgatagctaaatacatggaggttcctggagggtggtggtccagggacggcatggaggctgggagcttcttccccattccccaccctgctcatctccttatctgtatccttggtcatatcttttgtatgaaaccggtaaatgtgtttccctgagttctgtgagtttctccagtaaattaatataacccaaagacagggttcagatttattaaaaatcaacaatcctaccttcccaggatatacaggacatataagctactaagaaggtatgtcttactaactcatggtaagactaacacttaatattttctaaataattttctatgaataatggaaaagagatgcaagaaacaagccacacacatcatatacaagattcatttttaatggatttgatcgtcgggtgcaaatttgagcattatttacaagagctttctgtagagttatttctgttcaaataaaaccagactctcaaaatacaacataagcctgaacctacttgatttttttttctccctctagttaccaaggaatatcgtatctcagatgcatggcctactatcacactggtctttaaagaaaaaaaaaaatgcatggccacagtt

SEQ ID NO: 1243761 - DNA, 4001 bp, Homo sapiens
ctctgcccctaagacttgcagacccgcaggctggcagagcctcagggcagtgctgctgtgggaagggttccaacaaggtcttgtatcttaatcgtgagagattccttctcaacttccactagctcagctttagttctgaccagtggtccccttcttcgaagagaatgctcagcctgaccacacccccaggtcacaggccaccacgagtgagagcactgggaagggaggtggtatcaagagagctggctaaaattgtcaccccagggcggggctgggtggaggctggtcctggggtcggccattccaaggagagctacacgcacatgcgagtcccggtaccagagtccccgacacactcagtgctttccagctgcagcgtctgagatggggacggagaatggagaggaccccacacactccagagtcaggaggggctggagctgggagaccaagaggagggggagtttccatctcttccaccaccccccaccccccaccccctccccgcctcaggaggaaaaactcccccgccccccagactgccttctttttggggaagctctgctacagtgggaaacagctccccaactcccggattttgcaaagggtgtcagattcgcccaatggtcccttctccagggcaggggaggcactgcagccagggctgtaagcaccgggctccctttgcctttgtgccccaaacatttcctgcagccagccttctccgctcgcgcccatggccacgcgcctaggcgcccgcgggcgcggatgctgcttctccctgttccatacgccagagcccatccttgccctccccttatcgcccactgctgtcggcccgaatccacttcccaaggggcaagcccccaagggcaagtccgtgcacctgggagccctgcgctctgactagttgggttcatttcccgcatttccagtagcgttccagacggtgcccagcagcgtctgtcttggagcgggaacccaggaactgaggatcggcgatgtccgctggctccgaccatccccacacgtgatgaccaagcggggccgctgtggggtgggatctccacctgcgtccgcctggcgcccccgccaactccgatcaggtacccatttgccccgggctccctgggtgccctgggcccagcccagccccatgcccccgcctggcccacctggccattcttgcagaggtctgcccacatactggtgccgtcgccgccgcgcatgaggacatggtaggtgaaaaagtaggtgccgggaatgttgcacgtaaacttgccgctggccgcgtcgtagttgttgcctaggttggtgaccacgtcgtcaaacttgagtacctcgtaaccctcgtgggggttcttgaggccggcgtagaaggccacgcgcggcaccgtggtgtaggtggcagtgctgatggcgccgctgccccccgcgcccggcagccccggagggcccggcttgcctggctcacccttctcccccggcggccccacagggccgggaggacctgggtccccgggaggccccggagggccgggcttgccggtgcggcccggcttcccctgggggccctgcaccagcgtggaaggcgggggcgcgccgctctgctcgctcagggcgtcgccgccgtcggtccgcgcgccggcgccggggccccgcgcggggtaggggtcgcacaccatgcggcaggtgcccagcatctcatagtggccttccgggccgcccgagctcaccagcacggggatgagcaccaccagcaccagcagcatcaccacacccgcggcggccgctagcagcgtctttcggcccgcgcggagcctggggagcgccgggccgcccggccgcgccgtcggggcaatggtgccggcgggcagggggcgcgggctaggcgcccgcgctcaaggacggtccggcggggctgcgggcatggggccgggcccggggcgccgcgctgcgctggctgcgctgcggagcccagccgccggctcctgcctcgcgcctccctcctgctgcgctgccggactgagcgccgcggccgccgcctcccgcctcccgcctcccgcctgcagcctcccgcctgactcctcccgcctccttgagccgggccaccgccccctcggccgggccccgccccgccagctccgcgcggctctgggctctctaggggtggggctgcgggcggggccggcgcctaattgggccgcgggcgcctcgaggtgggcggggcataagggggcggggccgcggagaccccgggcgggagcagggagaggaaagaagagactgagtacgcggagaccgagattcggaaatggggtgggggccggggtccgagagacccgagaggcgctccaagggaaggggagagtagggaccaaaatgcgaaagggagagagggccacagggagagctagagagctccgaggggatcgggagaggagaggcttcgagggtcggtcaccaggaaaacagagggactggggtcgcgacgggccaagacccgcagggggcggaagcgaggggatagcgcccaggtctgcaggggacaaagagcgattgaggggaggacggagcggggagctggaaggtaggatgagaaagggggttatgaagcgaagaagaggatacggaggggaccatttggcactcaggcctcgcagaccacccgtctgggagatccagatatcggatgaatgcctgtccgggggcccagcggagccagacggcagccgcctcctcctttctggatctgactgttccgggacccgtctcccccgaggtggggcaggagcttccaacccctcctcgcctctgccccttcctcaccgaactgtggccaggctgctttttcctgggcccttttcttccatctccctctgctcaatccctttacttctgcctctagaccagggagaaaaggggatcctaaaaaggtgggcacccccacgttatttctccatgctgacagatgcaaatacgtccctgaggggtaacccccttttccagcctccaggatgaggggtggatctcatccagcccctcagctcctcctccctcactccccagcctcctccgccgccccctaactcttctccccatcaggctgtgggaggctctcctcttcctcaagtgcagcaaagtgtttaggttgcataaaccgaaacgtgtctgcttccatcaaaatatttgtcacattatctgaggcccaggtcgggctgctccaccgctcctccttcgccctcctttatccggcccaccggggaggattcagccattcggaggcgactggccggctgctaaagaatgacatcccagcctctcctctcccgagagctaccccccgccggctcacactctccctgttgacccttcaccatgggcaaaatgattccctggccttccctacccaaggttgaggtcgctcacctcatccagggctgggagtagaaggacacagggacatccaacgagggggctgtgaaagaggaccctccaagcactaatggctgaggccaggttggagtgaccccaccaccaccaaggagggagctaaaaaattttcaataagtagcatttattcagggtttactctgtgctaggccctgtgttgaatgttttacatacatgatcacccttgatcttcacatcagtccaaagaagtaaaatccaagattattttaattttacagatggagaactgaggctctgggaagttaagagatttgcttaaagtcacacaactaataagtgggagagccgggactcaaactcgtagcctggctccaggctcttccaacctcagcgcgatagagtctctaggtaccgtttactgcccaaagcccaggggtagggggctcagggcagccagacctccctaggctcaggaagagtagtcttcagcgctcggctgtcaggcaatccggtccccggttccccacggcggtctcctcggtgtgccccaccaagagcgacagggctggtgacccgaggggcgcgtg

SEQ ID NO: 1243762 - DNA, 4001 bp, Homo sapiens
gcctcttgagctttgcagctctgctctttccacaagtgagagttcccttgatagaagtgttgagaattaactattataataattattataattattaatataatgttgagcgcctgccatgtgagaagcagacacacaaacctgtggctgacatcatgatgatgatgatgatggtgatgatgatgatgatggtgatgatgattgccactgttgttgttgggtggactctaggggcctctccagctctgcagctctaagagggagggtggggaagcttctgcttgtcctcagacctcggctcccatctccctgtcttggttccctcctccccggttggcaggtgctggagaggcctcctggagcacgtcctcccatgtcctcccgctccctgcagcacacaccacagccaagtgcgtctatctgtggctgttcatggctgcacggcctgccagggagtgtgtactttcctgcactataaaaagcagaggccgggcagcctgtaaggacatcacatgctcccctggggctgtgaagtggccagcggtggagaaaacagtttctcacggcatttctcatgttcaaagctcaggaccagaaagctcccagcacgtcatgttgcctcctttcctagaaactaggtggggtagaagagtcaggaacacctcacagaggggggcggcttcctccctccctcccaagcagggatgagtcggcccaagggtgcctgaagcacgcggagggtccagagaagataatctggctttctggggctggaagagtgtggcccgggtattggccccgcgaggcccgggctaacagtggggaccacacctgcaccggtggagaagccatggagggctgggtggtgggcggtgggtccacctgcgaggtccagaagccccagggcggctcagaggctccagccccaggccgggggggccactcccagcggcacaggcagcttcgcttcccaggagggccccggggaagcaacaccgttttttcctgcccaagctggaccccctccaggacaccaaggctgtcagatgcggggggccaaagtcagcgcttcctattccgtgaaggtccaggttggccacagacaggactggacagacccggcggtcaggtggtcccagtgataaggagtggggtgagggcatccccgccaggtgcagccgcgggcattagtaccattcctcttccttccacaccctcagaaaggcaccagagaacagtgaaacaagataaacaccccacaaaaaactagggggaaggtgcaattcctcccgttagtatccacgtgcagaaaagccccgctcctccacagtcagggagacccgggaccattatgacccccgcgcaaaggcgcctatggcgggggctgagccagagccagacgccagggctgcccccgaaaacccgggtctttccgcccctgcgccgccaccgccaaccggcccctcccacggcgctctccgtccgtcccggcccaggtgtctgccatccccgccctggccaccaggctgaagccacgaggatggggcggggcagcgctgggtcccccggcccggccacctacctccgtcccgccggccgctcctcccgcgccgcccctagagcatctcccgccggccaagcctcctcccggccaggtccggggcgatgcacagactcggtgaaggaaacagagcaggggaaaaggtcttccggaggacggcagtgcagaagaggagggtggggggcggtacgagcagccacaggtcccccccacccacagcacctccgtctccccggcgcggtctccgaggtctctgcgaccagaagcggaagcgcggtttctcgaaagtaaaggaagagagggagaaagtgggacagacgcgcaaggagcgaagcccagccagatgtgagcagcgaggagcctccaacacccccagcgcttttcgtccaaacagcagccgcggaggattaaccgtgtgtgccccgcgccgcgcctcagggaaatccagcggccgcctcctcccggccccctggggagcccgccaggctgagagtgggggtggggcagattccgtgagtctggaggtccgtccagaggcggaggggctgcgagccccggacgagaatgccccccgcaggatgggggtgcccagcaaggctgagcgctcctagtcacttggtagcagagggatgagccccaaggcctccgggatccgctgtggccaaccctgaggggtcaggtctccaaacagtggcagacctgagacgccctgtgcattatcggggactcagacaggtttgggggaatctgtgaaccccctataacaaaatgccaaactgtgtgtgtgtgtgtgtgtgtgtgtgtgtgtgtgcgcgcgcgcgcatcacctttggaaggtgatggtccactgttttgttcagagtcttgagagctctgtgatctaaaggttaggaaggagcccctgccgggaagatttccattttctagagaacagcacgagtacagtggtgagcccaggatggctggaagcactcctcagtctctatcaggcctctcattccttgatatgaaaacctgacattttctcagtcatacacaaatattttttctgaacaaggcccgtaggctgccctcccatcctgatccctgatccaggctgctccagagccggccctggttgggacccagtctccatccctagactctgcgtcagcccagcttgctctggaaacttaccatatcactagcaggggaaggatttggccagagaagcagaagccagctctgatgataacagcattccccctttttttgcttcttttttcccccctctgccctgttctctccgagctgcccctcacctcgatgttgcagctggatttttttgttttgttatccctcctgtgagggtctgtctctggacaaacaggagatgcgaaaatggggatgctggttgggacattcagagcaaaactaagaggcctcacctttccctgcctggagtgtcctcccatccgccgcaccaacaactggacagatgaaaagaatcaaaaaggagaggaagaagagggtgcaagcacaatgcccactgccttgccccaggctgggcgaggccagcactcaggtagagctgaggacaaatggagatgagaacagaaggggaggcttccgggcaggcgaggcgcccaaaagccactccacagaggccctgactgcatgcgtcaacccctcctgtgagtacagggagaaaggctgccaggcctccagcacccagggggaactcagaggacacgatggggatatgaagtcaacactacttaaccaactagagatgcagcctccgctaggcttagaagatcaggggttgcttgtgttcttggcatacgtgtctgaggcttggcaaaacctacatccctggttgcttattgatacaggaaaagccagagataagcttgtctccattcctgtaagtgacatgaggaagtttcccagtcaccaggagcaaggcttagcacacggactgacctttccttagttactctgtcctcaaatagcccttggtgcagggataccagagaaaacaacagcattttttgcagcccttatgagaccttcgtccatacttcagagaatctgggactttctagaactcttacgagctaggaaatccctcagtgcaatgagaaggcttcttgttgccctgcctgggagcctcagactcaggaaagtcgtgggcagataccagaattcacaaagcgggacacacagcttgaaagagaaagagatgcagatgatgggctgggtgtggtggctcacacctttaatcccagcactttgggaggctgaggcgggaggatcacttgagcccaggagtttaaaaccagcctgggcaacatagtgagaccttgtctctacaaaatataaaacaattagctgggcttggcagcacacacctgtaatcccagctactcaggaggctgaggtgagaggatcccttgag

SEQ ID NO: 1243763 - DNA, 4001 bp, Homo sapiens
taaggagtggggtgagggcatccccgccaggtgcagccgcgggcattagtaccattcctcttccttccacaccctcagaaaggcaccagagaacagtgaaacaagataaacaccccacaaaaaactagggggaaggtgcaattcctcccgttagtatccacgtgcagaaaagccccgctcctccacagtcagggagacccgggaccattatgacccccgcgcaaaggcgcctatggcgggggctgagccagagccagacgccagggctgcccccgaaaacccgggtctttccgcccctgcgccgccaccgccaaccggcccctcccacggcgctctccgtccgtcccggcccaggtgtctgccatccccgccctggccaccaggctgaagccacgaggatggggcggggcagcgctgggtcccccggcccggccacctacctccgtcccgccggccgctcctcccgcgccgcccctagagcatctcccgccggccaagcctcctcccggccaggtccggggcgatgcacagactcggtgaaggaaacagagcaggggaaaaggtcttccggaggacggcagtgcagaagaggagggtggggggcggtacgagcagccacaggtcccccccacccacagcacctccgtctccccggcgcggtctccgaggtctctgcgaccagaagcggaagcgcggtttctcgaaagtaaaggaagagagggagaaagtgggacagacgcgcaaggagcgaagcccagccagatgtgagcagcgaggagcctccaacacccccagcgcttttcgtccaaacagcagccgcggaggattaaccgtgtgtgccccgcgccgcgcctcagggaaatccagcggccgcctcctcccggccccctggggagcccgccaggctgagagtgggggtggggcagattccgtgagtctggaggtccgtccagaggcggaggggctgcgagccccggacgagaatgccccccgcaggatgggggtgcccagcaaggctgagcgctcctagtcacttggtagcagagggatgagccccaaggcctccgggatccgctgtggccaaccctgaggggtcaggtctccaaacagtggcagacctgagacgccctgtgcattatcggggactcagacaggtttgggggaatctgtgaaccccctataacaaaatgccaaactgtgtgtgtgtgtgtgtgtgtgtgtgtgtgtgtgcgcgcgcgcgcatcacctttggaaggtgatggtccactgttttgttcagagtcttgagagctctgtgatctaaaggttaggaaggagcccctgccgggaagatttccattttctagagaacagcacgagtacagtggtgagcccaggatggctggaagcactcctcagtctctatcaggcctctcattccttgatatgaaaacctgacattttctcagtcatacacaaatattttttctgaacaaggcccgtaggctgccctcccatcctgatccctgatccaggctgctccagagccggccctggttgggacccagtctccatccctagactctgcgtcagcccagcttgctctggaaacttaccatatcactagcaggggaaggatttggccagagaagcagaagccagctctgatgataacagcattccccctttttttgcttcttttttcccccctctgccctgttctctccgagctgcccctcacctcgatgttgcagctggatttttttgttttgttatccctcctgtgagggtctgtctctggacaaacaggagatgcgaaaatggggatgctggttgggacattcagagcaaaactaagaggcctcacctttccctgcctggagtgtcctcccatccgccgcaccaacaactggacagatgaaaagaatcaaaaaggagaggaagaagagggtgcaagcacaatgcccactgccttgccccaggctgggcgaggccagcactcaggtagagctgaggacaaatggagatgagaacagaaggggaggcttccgggcaggcgaggcgcccaaaagccactccacagaggccctgactgcatgcgtcaacccctcctgtgagtacagggagaaaggctgccaggcctccagcacccagggggaactcagaggacacgatggggatatgaagtcaacactacttaaccaactagagatgcagcctccgctaggcttagaagatcaggggttgcttgtgttcttggcatacgtgtctgaggcttggcaaaacctacatccctggttgcttattgatacaggaaaagccagagataagcttgtctccattcctgtaagtgacatgaggaagtttcccagtcaccaggagcaaggcttagcacacggactgacctttccttagttactctgtcctcaaatagcccttggtgcagggataccagagaaaacaacagcattttttgcagcccttatgagaccttcgtccatacttcagagaatctgggactttctagaactcttacgagctaggaaatccctcagtgcaatgagaaggcttcttgttgccctgcctgggagcctcagactcaggaaagtcgtgggcagataccagaattcacaaagcgggacacacagcttgaaagagaaagagatgcagatgatgggctgggtgtggtggctcacacctttaatcccagcactttgggaggctgaggcgggaggatcacttgagcccaggagtttaaaaccagcctgggcaacatagtgagaccttgtctctacaaaatataaaacaattagctgggcttggcagcacacacctgtaatcccagctactcaggaggctgaggtgagaggatcccttgagcccaggaggtcaaggctgcagtgagccctaatcatggcattgcattccagcctgggcaacagagcaagacccccatctcaaaaaaaaaaaaaaaagttgtggatgatggaatatttattctttctctttaccccatccaagatggctttggtgttgaagaactggaaaacagttatctttaacacaattccaagacagaactcagaggcccaatatagtgcaaagttctagaaagacagctgaaggctggtcatctcttccaggtgcacctggctcatcctactaggaggtcttgtcccggctctgtcctaccttgaggcagcctggggatgctaccaaacttcagtgggccttagcttccttatctacaaagcagagataggtccagggtctcttatctggaaccaaggaggtcagatatgttcagagtcagatgcaaatatcccacaaagcatcttacccagtgggcttcgggcagcgccccttcgttaaacacttgaatattcggcagtgggatgaaggcatccatagtctcaggatagttcaagccacattgttctgtcaaatttgtgtgtgccaactttagggaaaaactaaggtttcagattttttgcatttcagggattttggagaagtgattgtgaacctgtagcttctcacatgattaataaaaaggttggtggaacagacacattgttcattgcaactaccattattacaagtataatcttccttccatcctcttgggaagaggagggaaggaggagattagaaaagggattactcattttccttgaggcagaaactggggatagggaggagtggtatcaaacggtaacaaagagagcctggggtttcccaagatcttgtgtgagacccaaggctcggaggcatgggaacttccaaagaataggagttgaggtctgagcacatgtcttaggtgccaccatcatggctcacaactcaaggcagcaggcaatgggcaaagactcacaaggccagctcccagagaatacaagcttgtcctcaataaagtgaaaaaaaaaatccaaaatagagagcatgccaggttcctaatgctctttgtcatcaacttcacttctgctttgtaattttaagtaggaaagatggaaactttggca

SEQ ID NO: 1243764 - DNA, 4001 bp, Homo sapiens
tggaggctgaggcaagaggactggttgatctcagggggttgaggctgcagtgagccacgactgcaccactgcgccctagcctgggcaacagggcaagaccctctctcaaaacataaaaataaaaagccacatgtagctagtggttaccatgttggaaagtatagaatagaacatttcaatcattgcagaaagttttgttggacagctctgttctagattaaaatgaagtcatcaaggaggaagagtaactgtgaacaaacagcaggccagaaatctgagaggcgtttagaccctttcctctcatgcatccgcatctcatccatccccagcctgcttgaatagatcctaaaggtcaactctccctcctgccctgtgcctgtatcagatgccctccaggggctccgctgtcccccagacctcagtccacccaagacaagcatcttcgtctgccttttccagggtctagacattgcccccgcccccagtttacattcatctcccaaggaaacttggcataagataggactttatcccacatctagtggtgtccagttcaagaattggattcaggccaggtatggtggctcacgcctataatcccagcactttgggaggctgaggtgggcagatcacttgaggccaagagctcgaggccagcctggccaacatggtaaaaccctgtctctactaaaaatacaaaaattagctgggtgcagtggtgtgtgtctgtaatcccagctactcaggaggctaagacaggagaatcgcttgaacccaggaggcagaggttgcagtgagctgagatcgcatcactgcactccaacctgtgcaacaaagtgagactgtctcaaaaaaaaaaaaaaatacgattcagcccagaactcaaacactcctggtttctacacagcctcaacggccccttagccatcaccaccccttcgtgccatcccctccagccacctttggaacatccccagaatcctcccaaccagaagagaagccctgagtccactccccctcggctctgacgtctggtagaattctcctgttgagaagcttagagctctcctgttgctgcaagaggattcaggtactggggtgccaagaaagaggaaggtgccacgttggggtgtccttctgacaggtgacatctgctcatagccctttcctccctgccagaagccattcattcatcacactaattgcccaatgaccaaactcctccggtgatgggcaggaggcgggcagagtggctcccatttgatgagtgatgtgtgtttacctcttctagaagcccatttaatagctaatattccctgctctaactgcactgcccccactggtctcagactctccctctttccctcaacctcgtggtggatgggggtcccttatggaaggaattctcgccagatggagccgagcagccccttttcctgagagatgctggggtcctggagcctatctcctctctcaatctccctctctcctgtttccaaaaagctgccctctgtcttgcagaaggagggtttgtttttaaggcttaggtgtttatttggttacttccaaagcccaagtccagggatgaatacagactcttccagggttacttgctacttaattagcaacggtttcctcttccctggaggggaatgaggtctggcttgggacaaaaaagtgaagcgaagataggccaagaattctcccatcctaaagcatctccctcccatcttggagcaactgcaccttcaccaggaaggactcacctggagcgaagagtgggactcagtgtaaatttttgcccaggccctgcaaacaaggaggccgcatgagccgtcaggcatcgggccttcggggcgcttggccagcccagcctccagagctccgattccgtcccagtggaaacaaagatttccttgagtagagcagctgtcctcagctcacctcccagctggaaggcctcgggcggcaggcttgcccctgctttgagaaccgtgtgagagagaagaggcaccaacagctgtcctgagcccactctgcaggtggcctggcccgccgcccacttccctagcaccagcagcggggacgccctcggggaccgaccgctcccaaaacagagggaggaaagaacctgggaattctatggcctggtgccccgtcgcacccagccctttacaagcagcacaaacgtatttggttgtctggggcctggacaagccccagcattttccaggcagctcctgaggaagcctggcataagacagggctttatccccagcctggggcttctaggtcaggaatataatcagcacagcatcccactggccctcctcctgctggccccgccccgactgcttggctacgatcacccacgaccctcgtggcacccaacacccttctgcattcctctttcgtgcgcactgtaagcatctgccaatgtcgactgccctcttcttcagccatggggtttggcccacactgtctcccagtgtttagccttcctgatcaacccccaaagacaggtgctctcccaggctgttcctcagctctcagctcctcttgctcctaattctacatttatttatttatttatttaggagacagggtctcctgtcacccaggctggagtgcagtggtacagtcatggctcactgcagcttcaaacccttggacccaagtgatcctcccatctcagcctcccgggtagctggaactacaagcacatgccaccacatccagctaattaaaaaaaaaaattttttttttttagagacaggatctcactatgtttcccaggctggtctcaagcaatcctccagccttggcctcccaaagcgggtaggattatcagcgtgaagccaccgtgcctgacctctttctgcctgtcctggtccacaccacatcttcagctgacaatgccccattccatgtccccaccactgacctggctgctgagacctgggcttgcaaatgtttaagtcagtacagtggctacgagccacatggagctatgtcagttaaacaaaatgaaacatccagttctcggccaaggagccacattttaagtgctcacgtgactagcagctgccatactagacagcacagctcttagcaccttgcaccacagctgaaggttctgctgggcagcgctggtctagacccacatatgcaatcatctgctgaacacctcctctttgctctgcgctaagacttttttttttttttttttttgagacagagttttgctcttgtcacccaggcaggagtacaatggtacaatcttggctcgctgcaacctccgcctcctgggttcaagcaattctcctgcctcagcctccaaagtagctgggattacaggtgcccaccaccacgcccagctaatttttgtatttttagtagagatggggttttgccatgtttgtcaggctggtctcgaactcctaacctcaaagcgatccacccgcctcggcctcctaaagtgctgggattacaggtgtgagccaccgcaccaggctgctctgccctaaggcttttaagcccccaattaactcatatccttctcccccgtccttaccacattagcttctcctcctgtggcttgcagcttggtgaaagctatgcatgccatcacgcggggtcccgggccagaagcctgcaagccacttggatgccaccttccttgcacccgccacatctcatccatcgccagccccctgcaggtctcctctcctctccatcacttcttccccagccctggctggttttctgcctcccatctgtctcccacgctgcttccagaggcagctctgaaaaacgcaaatctgaatgccacccctggctccaagggcttcctatgccagtaaaggagggagtaagccctgagcgtttccatctggcccttccccaccccgcgtgagtccctttcagtccagctccctggagctactcagtccctaacagatcacacttgaggtctcgtcctctggcacccgctctttcct

SEQ ID NO: 1243765 - DNA, 4001 bp, Homo sapiens
ccaagtgcatcactcgacgggaaaacggggggaaggggggagcccgacacggcacacacacatacacactcgcacacacttccgagcgagtgcacactcgcactcccacccgacagccggccagggacagtcacccccaagatcaatatcgcagtttgaattgttccggcaaatctcccctcgggctcgacggatgtgcgccccagatgtgctgacacatgtccgatgcctcgctgccttggaggtctccccgctcgcgtgtctcttctcttcgcaccagcggcggaaaccgcactagcagcggcggcggcggcggcggcggcagcagccacctgaagccaccaacactgggctcttccagcaaaaacgagaccccgattcgtctggcgccccaagaagacatagacgatagccccccgccgggctgcgccgtgcaattccgggctcccgggagcgcgtagctcgctggctaagcccaggcagtccgcggcaagttgccctcgaagtccgcccccctcaccggggcatggtcggagggtggctgctgcgctccggggcagttcttctcctgcttccggggggcggggaaggagcagacacagcagacacacagagaaagagaggcagggattattgcccgaaaccgccagccgccggcagcctccgccgaccctccctgctccccaggtccgcgcgcagcctgcagcctctcagccgggttccggcagtgcgtccagggcgccgaggggaagggctgggccccggggactggggcgcggtgggggcacacagactctccaggtcgcgcgcgcccttcctgctcctctgctattttcctgaactccccagaacccccagttgcctggcttccatcgcccgcaactagcgccgctgtcgagattttccgcaatacaactgcaggggtcgttatttcctcgcctacggatccctacgcttcccaactcagagaggaggaggacaggtgggggcgggagggggaggaggagaaggaggcttggccaggtgagcgtcctcgccgccgccgggcgtcccagcgtcagctccgcagcccggcacccgggggcggaggcaggaggcccgggcggggaggtgaggctgagcgcggccatgaggaggaggaggaggaggctgggtgtcacagcttcaggccaccttggccgccgcctcggccccagtccctggcagccgcctccgcactccgccccgccctggctgcctctgttaccctccaggattttcgagtttctcttcttaaaaagaacttcgtgctgcgggttcggcgcgggagacccaggcaggactcatcctgggagtgctgtgctgtgctctccctccgctgcgaaatattggagatttttttgcataattcattccctgccctctccatttcgtccctctcatgccccccaccctttacccctttccgtgccagtgccagaacactacttaccccagagttcttttctctgcaggttcctagaccaggtgcaactcttgcctgcaagtccctgcctccctcctcccgaaaagggggaacaccgcctttccaagtccgggtgccagcagcggctgctgccaactgcgccttcgcccaactccaggaggatccgggactattggaaacccgggctttagaggaacgggcttcccttcttgtctttcttttattctgcttttctttagggaagctctagtgctttggaggcttttgctgggctccaggatactttccgccaacgacactcagcagcttccactgaaggagatttccccaccaaacccgcgcgcgcacacacacacacacccagcgcgcggctctccagggccccaggggaaagtaggggcggcgcgagcaccacccacccacccaggccgaggccaggggcagccagtccgcagaaggtctcgtggggaggcgggctgtctataacctaggaaagacttgcacccggttgcagtgtggatgcaggggaattgaagaaaaccctgtgctcagaactgcttgcctaagagggctgggaacgaaaggggaaagacaaaatctcaacagatttgtctgcttccatcgctgcagtggtggtttgcgaaagctcaaacctacctctttggggttattgaagaagaggagggagcgtagagggaatccctgggaagatccaggatttctcggcgcgcttgtcccgattgggaactgtgacgttaggagattttgcacaagcgcggatgaacacacacataacaaacacaaacacacacataccccgcggggattttttatccacttttaatatttgatgtttagaagctatttcagtataaacctcggtctaagaactgcacaaagggtagataagtggagatggaggaggggaaggaaagggtgcccgttcatccgcacagagtcaatctagtgaatcttcccgtgttgatcccagcacccaggctgtgcgacatctgagggtgcggagtgggagctaaaggagttacattacagtgctcccagggttcttgaagggactccaactgcccaggagtctggcgggtctttttgctgagtggcggggagaagagggaggaaaaagagagaacgcagagcagatcagcagctctctgagctgtctgggctgggcggctgcgggagccagagctacgtagtcccaccgactctagggattcgaaaaaggaaccgccgacagacctgcctactcttaaagaaggagatgtggccgtgagatctgttctgtgaaacaaaggccaaggactctaggtggtcaacacattaaaaatctaggcccagatgaaataaatccagcattcttatgtagagagcttccaggctcagcagggaaaagcatgaaacttcagaacattaaaagaattccggatagtgagaattagcccatttgggaaatatatgggggcatttgtctccgtgccttgaaagtagactgcatgaagaattattattattttttctttctttctttctttctttctttctttctttctttctttctttctttctctcttttttcttttttctttttctttttttgaggagagagggagaaagaaaaaaaaaaaagcagtctgacaaagatgagcagattccagcctggtgagagttcagaaccgtggacagcgacctaccatccctgcttgggtggggagataggctggcagaagaggtctctcctctggaagcagaagcatggtgcctgaatttttatgtcactacccactcatttactaatgaattctgcaattattaagtgtcttatatgtgtcaaacactgtggcaagatgcttgggctttgtaattgaaaatgcattatccttgctttcaaaaaaatctgcagaccatatatccctctatattctgctttaagagccaatgccagtaaaataatactttatttccaccctttcagtctgcatactcacctccagcattcccaaagaatatttaatctgtgatctgccactaagtgctttcagtttttaaaaaaggcaactcacatgacagtatttgttagtttaaaaaaagtttgagtgtattgattgttgtgtgtgaagtattatgtgtattgattgttatgtgtgaagactatgtgtgaagattctgaatcccttacataaattatctcatttaatcatcataatgtgatggtgagataaatgtcattatcacttcccttttactgacaataaaacaataccagggtagttatttgcccaaggctccacagctgcaaatcagtagtgtagagaccatagctggaaagtctaaactcagaagtcatgtcacaccacttccttatatgctctgtaaaatgaaaaatatcatcttggggaggttattttgcacttaaagagaacagaagtacacatatgacagctggaagttaatcaaaggtggtattaaaatttaatggtagacaatgcaatttagaacccaactacattagttgggataagga

SEQ ID NO: 1243766 - DNA, 4001 bp, Homo sapiens
acatgtccgatgcctcgctgccttggaggtctccccgctcgcgtgtctcttctcttcgcaccagcggcggaaaccgcactagcagcggcggcggcggcggcggcggcagcagccacctgaagccaccaacactgggctcttccagcaaaaacgagaccccgattcgtctggcgccccaagaagacatagacgatagccccccgccgggctgcgccgtgcaattccgggctcccgggagcgcgtagctcgctggctaagcccaggcagtccgcggcaagttgccctcgaagtccgcccccctcaccggggcatggtcggagggtggctgctgcgctccggggcagttcttctcctgcttccggggggcggggaaggagcagacacagcagacacacagagaaagagaggcagggattattgcccgaaaccgccagccgccggcagcctccgccgaccctccctgctccccaggtccgcgcgcagcctgcagcctctcagccgggttccggcagtgcgtccagggcgccgaggggaagggctgggccccggggactggggcgcggtgggggcacacagactctccaggtcgcgcgcgcccttcctgctcctctgctattttcctgaactccccagaacccccagttgcctggcttccatcgcccgcaactagcgccgctgtcgagattttccgcaatacaactgcaggggtcgttatttcctcgcctacggatccctacgcttcccaactcagagaggaggaggacaggtgggggcgggagggggaggaggagaaggaggcttggccaggtgagcgtcctcgccgccgccgggcgtcccagcgtcagctccgcagcccggcacccgggggcggaggcaggaggcccgggcggggaggtgaggctgagcgcggccatgaggaggaggaggaggaggctgggtgtcacagcttcaggccaccttggccgccgcctcggccccagtccctggcagccgcctccgcactccgccccgccctggctgcctctgttaccctccaggattttcgagtttctcttcttaaaaagaacttcgtgctgcgggttcggcgcgggagacccaggcaggactcatcctgggagtgctgtgctgtgctctccctccgctgcgaaatattggagatttttttgcataattcattccctgccctctccatttcgtccctctcatgccccccaccctttacccctttccgtgccagtgccagaacactacttaccccagagttcttttctctgcaggttcctagaccaggtgcaactcttgcctgcaagtccctgcctccctcctcccgaaaagggggaacaccgcctttccaagtccgggtgccagcagcggctgctgccaactgcgccttcgcccaactccaggaggatccgggactattggaaacccgggctttagaggaacgggcttcccttcttgtctttcttttattctgcttttctttagggaagctctagtgctttggaggcttttgctgggctccaggatactttccgccaacgacactcagcagcttccactgaaggagatttccccaccaaacccgcgcgcgcacacacacacacacccagcgcgcggctctccagggccccaggggaaagtaggggcggcgcgagcaccacccacccacccaggccgaggccaggggcagccagtccgcagaaggtctcgtggggaggcgggctgtctataacctaggaaagacttgcacccggttgcagtgtggatgcaggggaattgaagaaaaccctgtgctcagaactgcttgcctaagagggctgggaacgaaaggggaaagacaaaatctcaacagatttgtctgcttccatcgctgcagtggtggtttgcgaaagctcaaacctacctctttggggttattgaagaagaggagggagcgtagagggaatccctgggaagatccaggatttctcggcgcgcttgtcccgattgggaactgtgacgttaggagattttgcacaagcgcggatgaacacacacataacaaacacaaacacacacataccccgcggggattttttatccacttttaatatttgatgtttagaagctatttcagtataaacctcggtctaagaactgcacaaagggtagataagtggagatggaggaggggaaggaaagggtgcccgttcatccgcacagagtcaatctagtgaatcttcccgtgttgatcccagcacccaggctgtgcgacatctgagggtgcggagtgggagctaaaggagttacattacagtgctcccagggttcttgaagggactccaactgcccaggagtctggcgggtctttttgctgagtggcggggagaagagggaggaaaaagagagaacgcagagcagatcagcagctctctgagctgtctgggctgggcggctgcgggagccagagctacgtagtcccaccgactctagggattcgaaaaaggaaccgccgacagacctgcctactcttaaagaaggagatgtggccgtgagatctgttctgtgaaacaaaggccaaggactctaggtggtcaacacattaaaaatctaggcccagatgaaataaatccagcattcttatgtagagagcttccaggctcagcagggaaaagcatgaaacttcagaacattaaaagaattccggatagtgagaattagcccatttgggaaatatatgggggcatttgtctccgtgccttgaaagtagactgcatgaagaattattattattttttctttctttctttctttctttctttctttctttctttctttctttctttctctcttttttcttttttctttttctttttttgaggagagagggagaaagaaaaaaaaaaaagcagtctgacaaagatgagcagattccagcctggtgagagttcagaaccgtggacagcgacctaccatccctgcttgggtggggagataggctggcagaagaggtctctcctctggaagcagaagcatggtgcctgaatttttatgtcactacccactcatttactaatgaattctgcaattattaagtgtcttatatgtgtcaaacactgtggcaagatgcttgggctttgtaattgaaaatgcattatccttgctttcaaaaaaatctgcagaccatatatccctctatattctgctttaagagccaatgccagtaaaataatactttatttccaccctttcagtctgcatactcacctccagcattcccaaagaatatttaatctgtgatctgccactaagtgctttcagtttttaaaaaaggcaactcacatgacagtatttgttagtttaaaaaaagtttgagtgtattgattgttgtgtgtgaagtattatgtgtattgattgttatgtgtgaagactatgtgtgaagattctgaatcccttacataaattatctcatttaatcatcataatgtgatggtgagataaatgtcattatcacttcccttttactgacaataaaacaataccagggtagttatttgcccaaggctccacagctgcaaatcagtagtgtagagaccatagctggaaagtctaaactcagaagtcatgtcacaccacttccttatatgctctgtaaaatgaaaaatatcatcttggggaggttattttgcacttaaagagaacagaagtacacatatgacagctggaagttaatcaaaggtggtattaaaatttaatggtagacaatgcaatttagaacccaactacattagttgggataaggaaaagatcactgggaatcagaagtaatcaaaagcgtttctaatgatagaattttggcacctgctagatgtcagttctggttctggcacttggaatacagcagtgaacacaatagtccccaacatattgattccatactagcaattgctagaagaaagagccatacatttttgagtcatttctaggctactacatttctagagtaggttgctatatgt

SEQ ID NO: 1243767 - DNA, 4001 bp, Homo sapiens
aaatgggcttttccttgggtgcttaagtggcaggtgtgaagggaaatggggtgggtgccttcaatgggaggagccactgaactggggaatactgctggtccaggggctttcccctttccctcccagcttcctcccaaccccaattccctgcatcaacaaagacagtgctcaaaaaccagaactcgtcctaacacactcaggcacaggtgtccacaagcccaacctctttcacctcaacaccctgaaatcccgtttgctcttaaaagcacagacaggcccaagtagactgagaggtctgagccagcacatccttgctactgggaattaaaaaacaccgtgatgtaaagaaagtggtatttgtgacactgtagtgctttaacaagaaaattgggggggtagaggagggtgtgtcagcaggtttcaaagcatcacaatcagtcctgatgtgtttgggtaaggcatggaggacatatctctgatccctgctggtactctccagtcccgcatcctcccgcagtctcttgaaagtggttagatacccgggcagggccccgcgtccattttgccagccaggaaccaccgagtctgggaactttgaaagccaggggatgggggtggttgttgccaaggctcggatttcggcgccagagttctcagccaggaaagcagttgaaaatcaacacccatctgcctcttctttctcatcccccaccactttttccttcacccttctaggactgcacacagatcctaaccacccccccccgcaaaacacacacattcacacacccttgggctgagaagatttttgattctgaaggcggcaaacccgcagaactcaaagggtctcgccacccctctctctgccccgcggctatatacaataaaaccccatacaccccagacatcacaacataatccaaatcagccagtgacttcggcgcgtcccgtacctgatatgcagacgatgaaattggcttgaagaagaaaaagcacctcccagactatttccatcctctgattctcattccaagtgcatcactcgacgggaaaacggggggaaggggggagcccgacacggcacacacacatacacactcgcacacacttccgagcgagtgcacactcgcactcccacccgacagccggccagggacagtcacccccaagatcaatatcgcagtttgaattgttccggcaaatctcccctcgggctcgacggatgtgcgccccagatgtgctgacacatgtccgatgcctcgctgccttggaggtctccccgctcgcgtgtctcttctcttcgcaccagcggcggaaaccgcactagcagcggcggcggcggcggcggcggcagcagccacctgaagccaccaacactgggctcttccagcaaaaacgagaccccgattcgtctggcgccccaagaagacatagacgatagccccccgccgggctgcgccgtgcaattccgggctcccgggagcgcgtagctcgctggctaagcccaggcagtccgcggcaagttgccctcgaagtccgcccccctcaccggggcatggtcggagggtggctgctgcgctccggggcagttcttctcctgcttccggggggcggggaaggagcagacacagcagacacacagagaaagagaggcagggattattgcccgaaaccgccagccgccggcagcctccgccgaccctccctgctccccaggtccgcgcgcagcctgcagcctctcagccgggttccggcagtgcgtccagggcgccgaggggaagggctgggccccggggactggggcgcggtgggggcacacagactctccaggtcgcgcgcgcccttcctgctcctctgctattttcctgaactccccagaacccccagttgcctggcttccatcgcccgcaactagcgccgctgtcgagattttccgcaatacaactgcaggggtcgttatttcctcgcctacggatccctacgcttcccaactcagagaggaggaggacaggtgggggcgggagggggaggaggagaaggaggcttggccaggtgagcgtcctcgccgccgccgggcgtcccagcgtcagctccgcagcccggcacccgggggcggaggcaggaggcccgggcggggaggtgaggctgagcgcggccatgaggaggaggaggaggaggctgggtgtcacagcttcaggccaccttggccgccgcctcggccccagtccctggcagccgcctccgcactccgccccgccctggctgcctctgttaccctccaggattttcgagtttctcttcttaaaaagaacttcgtgctgcgggttcggcgcgggagacccaggcaggactcatcctgggagtgctgtgctgtgctctccctccgctgcgaaatattggagatttttttgcataattcattccctgccctctccatttcgtccctctcatgccccccaccctttacccctttccgtgccagtgccagaacactacttaccccagagttcttttctctgcaggttcctagaccaggtgcaactcttgcctgcaagtccctgcctccctcctcccgaaaagggggaacaccgcctttccaagtccgggtgccagcagcggctgctgccaactgcgccttcgcccaactccaggaggatccgggactattggaaacccgggctttagaggaacgggcttcccttcttgtctttcttttattctgcttttctttagggaagctctagtgctttggaggcttttgctgggctccaggatactttccgccaacgacactcagcagcttccactgaaggagatttccccaccaaacccgcgcgcgcacacacacacacacccagcgcgcggctctccagggccccaggggaaagtaggggcggcgcgagcaccacccacccacccaggccgaggccaggggcagccagtccgcagaaggtctcgtggggaggcgggctgtctataacctaggaaagacttgcacccggttgcagtgtggatgcaggggaattgaagaaaaccctgtgctcagaactgcttgcctaagagggctgggaacgaaaggggaaagacaaaatctcaacagatttgtctgcttccatcgctgcagtggtggtttgcgaaagctcaaacctacctctttggggttattgaagaagaggagggagcgtagagggaatccctgggaagatccaggatttctcggcgcgcttgtcccgattgggaactgtgacgttaggagattttgcacaagcgcggatgaacacacacataacaaacacaaacacacacataccccgcggggattttttatccacttttaatatttgatgtttagaagctatttcagtataaacctcggtctaagaactgcacaaagggtagataagtggagatggaggaggggaaggaaagggtgcccgttcatccgcacagagtcaatctagtgaatcttcccgtgttgatcccagcacccaggctgtgcgacatctgagggtgcggagtgggagctaaaggagttacattacagtgctcccagggttcttgaagggactccaactgcccaggagtctggcgggtctttttgctgagtggcggggagaagagggaggaaaaagagagaacgcagagcagatcagcagctctctgagctgtctgggctgggcggctgcgggagccagagctacgtagtcccaccgactctagggattcgaaaaaggaaccgccgacagacctgcctactcttaaagaaggagatgtggccgtgagatctgttctgtgaaacaaaggccaaggactctaggtggtcaacacattaaaaatctaggcccagatgaaataaatccagcattcttatgtagagagcttccaggctcagcagggaaaagcatgaaacttcagaacattaaaagaattccggatagtgagaattagcccatttgggaaatatatgggggcatttgtctccgtgccttgaaagtagactg

SEQ ID NO: 1243768 - DNA, 4001 bp, Homo sapiens
cctgggcaaagtctcagtcgctcccggccaggggtctggggctctgaaggggaccaaatatcctcacccggcctcttgtctcaatggacagagatgctctgggggtcgccatatgcaacctggtcccttctcagcttgagtcctccataagatgaatggaaggcaggtcccagtcagaaagccttggcactaaaggggatagcagcttgtgtgaggggtgagctgagacacattcctgacactggccccaggcttgggggagagccccataaacttggtatatgacacaccagccacgtgccacacaggcaccgcactaatcacttaaacccattatcttattcaaacgcttaaaacccctgaagtcagaatgacaacacctgttttgcaaatgggacaggaagtgacttacccaagaccacacagctacaaagcaccagaactgcaaagcatttctctttctactttctagctgcttagtaggtttccaatgtccaaccctacaaataaaagtttccacattctgctttttctctttcttctcccaggggcccggtggagaggctgcaaggtgcccctcgaccctctaagacagctcagccagtccctgctgcaaagggcacacgctggctcctctctgtgcagaggacaccttcacccctcactccgccgctttgaggatggagcacctaacttgggagaggaggtttcagcctgcgtggaccccaagaaccatccgaggggtggttgggctgagaactggcagagggggtcttccggtgatggggtctggggttgcaaagaaggtgcctccaggatcggatccctgtgcccagccgcttgaagcgcctttagcttcttatcaaatattaacatgcctttcctgccacctcccacctagaggaataattaagagctcggcttcaccattaatctttaaacgaaaatcaccctgtccggaaagaccggctccgcagaggccttggggctccgggtcccccaccccccgcccccgccaggctcccaattcagcgctggaggttagggaggccaggggagcttgcgaccctcaggggcaaggaacccgtgtgggaagcgcggcttccaggaccctgccagaccgcccttgctctggccgcggggcagtcacccagcgctgagtcccagcgggacggacggaaacccacgggcagacggaggaggctgggtgagaaaagaaggcgtgcgttgaggcgggtccgagaagcatccttttttttttttttttttttttttttttttttttttaaacggagcaccaggctggagtgcagtggcgtgatctcactgcaacctccacctcctgggttcaagcgattctcgggcctcagcctcccgagtagctgggattacaggcgtgtgccaccacgtccggctaatgtttgtatttttggtagagatgggatttcaccatgttggccatgctggtctcgaactcctgggctcaggtgatccacccgcctctgcctcccaacgtgctggcatttcaggctggagcacccgcgcccggcctgagacgcatccttatcagggactcccaactcgtctcgccgggccacgcgcacacaccctcaccgcgcacacccgtgcacacgctcccccagccggtgctgacacgcgtgtgcacacacaagctcgcgcgctgcccagtcctcccgcaccctcgcggcccccggcgcacacgcaacccgggaccccagcgccaccgacgctcaccggtcgcccgcggggggatcctctgcaggggcgggagctgggggcacggaggggaccgccgaggggcacctggggccggagcccgggagctcacctgcactggccgatggccgcgccgcggagagggccaggagcgccagcagcatccgcatcttgcgggacagcaaagagtcctctgagccgggggtcgcgcaccgaggaggccgccgcgggtgcagcgatcctgccggcctgggttttatagcggagccgcgacgggagggagccccgacagctggacgcgggaggcggctcctccccctggcggggcctgccctcccctctccaccttcccctgtccctcatctgaaatcctccgctctccccggtcccccgccctgcctggccacctcttgccctgtgcgcaaggccccctcacccactccgcgtcctctccactcagcagcggcgccctgcccctcccccatcctactcctggtccctggtttgggaacagggacacgacaccacaaagtgcttgacccacacaaagatgagtgccccatgatgactttgatcattctggcgccacccctgcgcagtggtcttgaatgggaccttggaatggccttggggtgggggtgggggtgggggtggagatggcctcgaagagatgagaggctgaggggcgtgtgatgccgtttgttgaatcagtggccgcagaaaggctctcctatctctctttggcagtggccattgattctctgggtctcatctcttctatttcctcccaggctgctccaaacttaatttctaagcagaccaaagacctttcttcgaatacagagcaaagctgtccctaaactactgcccttgctggtgtttatgtgatgaccagggagggttgatggggcagaattaagaaatggattgtaagaggattcggtgagggagaagctgatggggtcaaaggggaggagctaggttctttgagccccccaggtggagagatgagatgggaagagaagagactggggtctgaatggacccctggttctcccatctggcaagacctccagaggagtccaggggaagttcccttaagggcggctccaacatttggggaaatggggtcccccccatgcccccaagctgcctcttgtctcctctcttagctgtgccctcctgctactgcaggtcctctgtgtcccacatggggtgggggcttctgtgggagtttgggaagctcaggctggggtgcgggagagggacggggaaccaggcagtggacctggacctcctccatcaatccatcaacaggaagccccctttttctggtttagccactccccatccgctgccaacctctcagtccctaccgaccttcgaacctgggctagggacttctgaagggggattgcctcccccagaaggattcaggcaaagatgcttcctccttgcttagggttgaggctgactccccgctcctggcccaggatcacacagcctcacagagcagctttgatcctacagagaggcaggagggaggtgagggggtgtccatgccaggcttagggctctattgtcaacaccactgtataatgtaatcaccagcctgcgaccatgacagccacaggagggattccacacccagagcctattctggggagtgcatttgtgttcacagggctataaaaatgtccctttcaggactgaggaagcctgttcctgggaataaaaaccacccccagggagtccctgtgacctctggccagccccctgatgagcaggggagaggcttgggaaactttggtggggttaagggactgttgatcaatgatccactttaaagttcattgcattcaggccccccaggagagaggggggccctgggtgcattttgggaccataaagatgggtgaggagaacgagtccctggtagggcatcccctctgaggaatgcgggaggggtaaagctatacactctcttatgggtgcatcttaattatgggcaccacagagcctgcacattggcgatggggtggtggactggttcctgctccatctgccatctctaacttcaaggttacacagggtgagtggccctctcttcctgttcctggtcttaacattctcagccttatctccagccctgaccccagtcctggcctgccataaaccagtcacctgtcactatttagactacctggggccctgcttacctgtaggggacaaggcctgatttagggtcgttagagctggaatga

SEQ ID NO: 1243769 - DNA, 4001 bp, Homo sapiens
ctcacaggggctacaagggagacctggggtctcccaccctgggtctataagaacctctgagctggaaggaaggagcccagagaagctgtccagacctgagatggcagcaacacctcccctccacctttccttcccccggtggcaggacccgccagggagcttggggccaggcgtctgtcaagtggcgctttgagctagggtctgactgggctggggtctcccctaccactccagcctgggcagacagggagcagtgctaaatccatctccctggaatgtggggcttgcattccccaaacctatctgcggagtctacgctggggtggtggacccgagtcctccttagtgaacacactgacagtattactgtcccctcaagactttcgcgggcctgcagtcccccatacctggtctgcaggagcactctttatttgtgaaaggggaggagtaacctggaccagcttaaccccatcccccacttgctaaaaaagctcttgacacagtctttccctccacaagaaaaatccagcataaaactccccaacccaatcttaagcaccctgcatcgaatggagatcgggtaggaggcacccgcggcactgggctctagcggaaaggggctccactcccagctccgggggcagacagctcccctccaccacatcttgttctcattctgcgcccctgacatcagccgccgccggaatctccttgttgtgcctccaacccgcgaggtggggggtgaggtgggccaggacctggtccccgccccccaacatctccttctaggtcagtaaaaacctcagcctcaaggaccaggttgggggatcagaccctagaatccgccgcaaactttggggcgggggaaggagggaaacccaggagattgcggtcccccctcctccgtccccgcagcttcctccccaccgcccccacccaccccccaccaaactcggaaaccaaacccagctcgctaaccggcgcgggcagagtacagctcccaggctcccgaagcttcccacatctggaggatgacgaccctcccctgaccacatctggagggcgtccagctgcgagccagcggggcacagctctcttctcctggcctggatccccacccccccaacccaggaagactgaggtgtgtgtacgcaggtggggtaagcccgggttaccgacgagacctgctcgcgtctccgctcccactctggtgccccctcccctccctggcagccccccccccatccgcctaccctccgggctcacttcgactcacctggcggtgggtcttcttcccccccgacccccggcggtgcggcccgtcccccttctgaccccgcgcctggccgtcgtgccccgaaggatatgggttacagaccgtgcggagacaccagctccgcgggcggctgtcctggctcaagtagaagaaaaccaccggggccagcgccgggtacggcagcccctccgcctcggagtccgcgctgcccgggtccttttctgctgaccccggccccggccggcccccggcccccgacaggtcgttgagccgcatgaagctccggggctgtcccgactcctcggcgcccgctccatcctcctcctcgtccatcctctggccagccggggccccgggcgatccggagaggggcaagcggcgcccctcagaggaggtgtcctcacgcaacccgggggccccggcgggggcacatctggtgggctctagggcgcaagctgagcccccgggagggccagttcagcccagctccccctgcccgcaggggcatgctgcccgcggggcgccggggcgcagggaaaccccgcccggcgcgagtcccgcttcccctgcgcccctggggcttcccgggccagccggccggctccccctcactttgttccggcttcttcgcttcgcgcccaggctccggttgccggattcggcgctaccttcggcgaagccgccccgagagggcgaacgaaaaggggggcagcggcggagggcgggggtccggggaggggcgccccctcttcccgcggcgcagctggagccggatctaaggggtcagcatcgtcccggctccgcgccaggcggcgggggaggggaggagggatctctttaggggtgggcttggagggggtgggggcggctccttcccccgccccgccgcgggctcactgtccgggaggggcggggagacagtggggggcagtcccgggcgggagtggaggcggagatgccgccgccgcagccgccgcggtggctgccgctgccgtagctgtcgccggcgccacagcctcctcctccggccgagacgcggagcgagcgagcgaaagcggcggcgaggagccccgcgcacaccacagctggatccctcacttcaacttcaagcctcggccccgcccccagacagccccgcagccaatcgccggacgccgccggccccgagccgcgcgcccattggccgtccgccgtggcagtgcgggcgggagcgcagggagagaaccacagctggaatccgattcccaccccaaaacccaggaccgcccctctcccctccccttgcccctgggtccgctcccgaaggctggagccaatcagactgctgcccagaccgaacccactttcctattggccattggggtctttgggactcccttggagggagcccgaagaatcagagtattcggcgcggggtcctggcgtagggccgcaggccccaggcatcctttgtccacgacccctgatttgggcagcagccggaggacggagctcagctctgggcgggcctggggaagaaaggagacaggcggcacgggggtgagggttgtcaccagggggtcccagagcgaaatcccaggtctccacctggttaatctcccaccctggagttgagcttggctgcgggactgggggagggaaggagcggagctggatgtcctgggggtggggcttcaggctggaggggcccagtcttggagaaacgggcggagctcgagaaaggctagggtaggcatggtctgggcgtggcctccacaaatctcttgggcttattggtcatactcccgagtcaattctgagacttcgaccctgacctcgtaaccctaacccgctggacctgacctcacattgacgctcctgggcttcatccctttgcccctagggaccttttgaagggcgtggactccacgcaggggcttcgtgcttgaacacgtggccccaggcaggtcgcgctggaccgcagagcccggatccccaggaggggctgcggagcagagcgaggacccctaagaaggaacctgtgggggtctcgagtgtgtgggagggggcggaagcacagagctgggctttatcgactcgaccttcaaagtccccaccaccgccaccccccaacttcgtgcctcagtttctcttaagtccctatgtggcttagggaaagagtgtccgcggaactggaacttcgcgggtctgccgccttcactcactcaccttaaccctaccggcagcgggccctcgtgggtttgtgctttccacgcgtgcacacgcacgcgcagaccccggcccttgccccgcctacctccccgagttctggggctcagtcggctctagctctctcctgccgccggcgccactccagaaagctgtgggtacccgggagcggagcgccgcgggtgtgctgggcgccggtggaggggggaacagcgaggattagacgccgggaagcacttccccaacatctgcgagaggtagacacggcggaacctagtgggtcagtcagttccctctccggagattttggggcgcttgcgccactgcggagaggcggcgggatgggtcggatgacctccatcaccacccctcactttgctgaggccatcacccctgggcgttgttcactctcctaaggctgcaccacccacgcagcccccgcgcacctcccgccaccgcagagggttggggtcgtctcagttcccgccccggccgatggggggaggggatgggggaa

SEQ ID NO: 1243770 - DNA, 4001 bp, Homo sapiens
agtagctacaatcctccccaagggggcaagagggatcaagcttctaccctgtggcccccagctgccactgcccatgccccatgcccatggtacccatcaggctacgtcaatctaaatgtccctcggccccgcaccacatgagcctaggacacagccccacagatctctagggggtaagctggctcagtctcagagaccgggtggaggaaataccgcctgaccattcaggaagccacacgttcaggttaagggcgtcaggtatttccagtcctcttgtaagaagagctgcttctggccctccccagcttgtacccacacacacttggcctcagcccagttcagaatggggagagtgagtgagggctcagacttccaagtccccgcccttggtctccatcctagactttctttggccaaagaacctggaggggccatgaccagactgggggctttggctgctgggatcagggtacaagaaagaggatggaaaatgggagaggagggcccctggggacctttccaagatcctcccctccccgcccttctctcaaaccagacatataccccaactcaagttgtgatgctccctacaaacctaggaggatcacccagtgaatcccagacaccaccctcccccaccactgccaggctgggcaaagggagtggcactcagagggacaggggacagctgaaaggaaggccccagtcagctgcctcccaggctcaaaggggcctggggtggaggaaggtatttttaggtctgacttgacccctctacatacccatcagtcacattatcatggtggttacagctggtggccacagtaacagaagagttaatgctatccttggagaaggacactcccaaagaaatcccctggcgcgaccatcccagagcctgctggtcaccccatgagaacccaccgcgcccaagaatgccacttcctgggagtaaccaggggtgtaggaaaagtgtgcgggtggggatggagaagtagacccctcccccaggtaaaacagcttccccccctcctatgagttggcatccatccaactttccaaactttggaggcgtttttggggcgggggtgggggtggggtaagtcaacgtgggtgtggggggaggggagcaggtccgacatagagatggagcccaggtggctgggaggggacctcgaccggggttggctctttccccaccctcgagaaccagtgtctgcggctttgaaggcctgttggcatttggcaccgccctctgaccatcgcctcggccacctcctcgtgccacccccgccccacccacacccgcctggcgcccccgagcgtgctctgcgtcgccccccttgcctggctcgctttctagcctctttcaacctccccttctcaaggcccagatccccctccaccagcacccccacgctcagcccactgaagctggtgcccaagcggcaggaaccttgacgcgggggagataaggaggcgagggtgacaggcagcccacccgccccctccccgctccgcagcatcgccacccagccccaggcccagcgcccatcaatcacaacctgcaaggatggggggcgcgcaggcatccctctctcctccgcgcccggcatataaccccttcctctcccgcgcctctcgagccgaccttaacacggtccgcgggagcgaccccctcccgttgggccgggccaccacgcctcacctgcgggctggggtcgaagacctccatggggatctcctgggagggtgggtaagggccccgggacatgctggtcttctggaccatggagaggagcctcccctcccgccgccggcccggcccagccgggctccctcagcgcatgggagaggccgtgggagccgaaagcagcgcggcgcagccagcacccggtccagccacccagctcggccttcggctgcctccttcctgccttccctcgctcctcccgctctctccactgccgccgccgcctcccccgtaggctcagcatctccccgcgcccctccctcgctccctccctccgcccgcccggccccgcccctcgcagcccctccgccggctcggcgcacacaatgggcgtgcggcagcagggaggcaagcccctctcggctctaggtggccgcaggtgggcctctgactggccgtggggtgcaggcggcccgctggggcgggaaggcagaaactaggcgtggaacttgggggaggggtgggggggcggtctaccagtggatgccgagcgctgatggggattggcatggctggcaccaccccccttttgtcccaaacctctcttcctgcgggtccccccaacccactcctgtttggaccaccggaacttcccggtcccggtgatcctgggacctggctttaactcctttctccccagtgtggggcccaggctgcctcaaaccaaacagaaaagcctctccctccaacatggctctggggctgccggtgggaggctgaggctgagatggggagggtgtccaatagagacagcaaaataaatcccaggggtccaggagttctgccctaatcagtcactaggatacaccgcccccccaacccctgttcttccaaaaggccaggaatggggctgggtgaggtccctgctcttggatgagaaaagaggaagaaatatggagctgagagaggagaagctggtaaaatcagatctcatgacctttgacctagaattgcgccacctttacccctgatttagggagaaacatccaagatctggatgccacccaccatgactggtggagagaagaggaataggagattctgggcaatagactctggcgccaatttggctcaggctgtttctggttgtatagccccggacaaatcacctctctgagcatcagtttcctcctctcctataaaatggggttgctggtactgtggagtctgtgtcacctggtattattgggaggatgagggagaattaaatgaattgctggggtgtttggagaagctgtaagtttcaatgaaggggtcactcatgacaggaggacccattcccttcctactccaccccttctcctgctccacagaaaggagagatggagaagaccctctccaggtcaagtgaccttacaataaggccaccaccttgctgtgttccgcaggacaggagactatgggactcctcctcctcacccaactctaatagcaagtgaatggtcagtctgtcattcctctgatcacaacaccttggggaaggcggagcagtgagtgaagatgaagcccattagaaacgttccaggagagttccaaccctgagcagggtttccacctgccccttggagacaagaaaggctggcataaccgcaaaagtatgggctttgcaatcagaaatatctgtgttctgaatctgttaccttagctgtaaaatgagggcaacgctaatcgtgttgttgtgaggaagtagcataaatgttgcttccctttctctctcttctactttctcagccaggaaagttgagatgaaacggatagggtgatcagcaggaaccaatcatgagttggagcctcaattcagatgtagacttcttaaaccccagaatgttcttcttggatttttacattgggtgttccagatcagaagaaaaggactgctttttttttttttttgagacggagtctcactctgttgcccaggctggagtgcagtggcgcaatctcggctcactgcaacctccgcctcctgggttcaagcgattctcctgcctcagcctccccagtagctggaattacaagcacgcgccgctacgcccggctaatttttgtatttttagtggagacagggtttcaccatgttggccaggctggtctcgaactcctgacctcaagtgatccgcctgccttggcctcccaaagtgctgggattacaggcatgagccatcgagcccaacccaattttttttttttttaattttactttctgcaatcattcatccattcagccagtgcggtatttctgaggtgt

SEQ ID NO: 1243771 - DNA, 4001 bp, Homo sapiens
ctgggacttggtgtttctacaacagctgggcacttatgagtcttctgggcctccagtggggctgaacaagggaggggatctctggagcaagcaggagggaaggaagagggagcagagacaagggaggatggggtctgtgctctttgcctcacaagcagactgcaagatctttggggacttagccctagtgtccttgaaggacaggtttcaaggaacacctagtctgataaaagaggaaataatcctgaaaaccaggtgggacatcacactgacatcactctgctccactgccactgtggatgggcgtctgtaagccgaggaagggatctcacgttgctgagagtcagtcccatattttatagaggaagaagcagaggctgagatgagctttgtcctccctggatggtcatttgagggtagtgggcaatggcgattagatccctggctgcctggtctccatgagcactctttcctctaaagtgctgtatttgctaagaatccagaagcctctgcatttgcagaatagaggctagtcacgcgactaccaggtactcctgaaaaggaccttaccttcaacgtgtggttcggtcacacggtaggaaatcgaggaatacgcttaaattacagggtgaggaaatgctttgtaactctgacagggtctgagctaagacaggatgcatagaggactgaagtcctgacaaaaggacaggtggaggtcgggcatggtggctcacgtctgtaatcccagcactctgggaggccaaggcaggtggatcacctgaggtcaggagttcgagaccagcctgaccaacatggtgaaaccccgtctctactgaaagtacaaaaattagatgggtgtggtggtgcatgcctgtaatcccagctactggggaagctgaggcaggagaatcgcttgagtccaggaggcagaagttgcagggagccaagatcatgccactgcactccagcctgagcgacaaagttgtctcaaaaaaaaaaaaaaaaaaaaaaagaaggtgggggcaggtggctcacctacagcctacagccatgtcctgcttcacagacattcaacctgtgcagctgctccaggcccagagcccacaagggcccatgtgtggtttcatgtgctgctgtcactgccttgaaatccttggtaatttggagcaaggaaccctgcattttcattctgcacaggaccctgcaaattccatcgcctatgctctctcctctcctgccttgaggccaggaacaaacctgccagccccatgggtccccctagcctgaggacacagagccacctagcttttctttgcagggagagagtgagcaggtggggcccagaagtccctgggctggtagagctgcagttcctttcttgagcctgcccagctctctgctctgggcaaaaagccccaaggtccagccagacagaaatagctgggacaaacgccctcgtcttacaacccagccccagccaccagcaccacacatgcaattcatatcttcttccctgggcagaaaaggctgggcggctgccctatttctaggcagagaaacctgccttccttcgcaagggcaactttgccagggggatgacggggaagagcaggaggtggggatcgggacggagggtgggtacgttacccccgggcagggtgatgggcccgcaggtcttgctgtcgtccatggggatgcgcttggtacaaatccgccagaggccgaagtgggccgcctcgcaggtagtgttgtggtgctccatgtgggggctcagcacagcccagtggtcggttaccacggctgtcatggccagcacgatgcctgccaggatgcagaagagggtcacgcggaccttcagcattttggtctgggacatggtggtcgccgaggcgtgggtgccctgggcagggtccggcggctgcgtctcctagggcaggtgacaagccgagcttggggggtggcagtggttgtcgagctgggagtggccactaagtttagtgtgcctggctgagccagagtgggctggccttggggccgagggacgcgggacgtgctgagcagctgcccagacgcgtcaggggcctgagggaggctgctattaatgcccatctccaggcgtggcaccgaggacagcttctgctcgggtttcagggttttctgcccctctgggagccagaaataccccagtgcggcggggcagggtggcaaggagagaaggctctggatggtagattgaggcctctgtgagtagcagctcagggtgcctgagttgggagagggcgagaggtgggcagcagggccccgggggtggggatctgcctgctctgggctgatgggaaagggcagcccaggccaggggaggagaccaggagctgcgggctgcacggctgtcccgggctcccacggggtaagcctgttaccggcagggcagtgagtaggttctcatcctgggatctgaggggctaggattctgtctaatgacatcccgggaacccagtccagggcctgtggagtccacctcttaggcaagcgttttagccacaaaccccacggcatcccccaaaccataggaaggttttaggtggttcccaggtctggccttacccaactctgatccctccacgagaacattacttccttttcaattctctttccatccccaaaactgggtccagagcaaagctctgttcgaggtcagtgtcattattgcctgtaaagtgtcctttgaaacaaagcgagaacggcccgaagaggacgaggaatcctgctggacttggtcattctgtttttcagggcactgtttggttttgccttctattaacagcaggtgataacgactttccagttatgtttgaatttgaaaaataagtgtgtgagtaaaaaagaatgaataggttgatttataggggatcattaggagctcatgggcgtgcagagaacacagaaagcccgggatcgaccaccctccgacggtcctgtgcacccgcctggcccccaggctggtctccgaggctccagcctctacatctctcctgggttgtgtcatctcttccttctcggctcacagggtggccctttttgggtgtagccgagaggctgacgcatgaccaggaatagcctcctgagctgggtggggccttgagcttcaaaatcctggcctcagattgacacgatttacagagactctgcccatgtggacagaaatgtttcggcctccagccttagaatcacagaaagttcatgatgatgataatcagaacagtggctcatcttcagtgagtgcttactatctaccaggtaccctgctaagccttcatccattgtcacagttactcttcacaccaatccacaaggggactacaacggttactgccatttcacagacaaggacatggaagctcagagacatgaagtcacttgtccaaggtcacacagcgagaaaatgaggaatccaggtttcaggacccagagcccaaagtcataacgaatggttggaactgggaagaaacttcatgatctattgtgacagattaggaatctgcagcccagagaggagatgtgaggagccaggactacctggtgaacagccccagggctgagctgaaccctcgcatctccagccactggcttgtgcttattgcagttccatccaaacttccatatttttaaaatcagtctctcatacatattacaatctcctgagagcttatctccccactgttctcatctctgcttcccttcctccctgtccccccacctctgtgttccctgtgggtgctaatccatcacaactgactgatcactgactgactgttgacatatgccaccgcccctgcttcagctcgtggagaaactgcctgtcaccaggtgggtagaccatctccatggggaattcccagaagctgggacatggctgcagcctctgagccctctcttgttgtttgtgggggcccagcttcaggatcctggcacctggggatctcaggaggtgctgtacagct

SEQ ID NO: 1243772 - DNA, 4001 bp, Homo sapiens
tctgagcaattgcacactaaaaatgatgtttttcaaaagaaaagaggagggtgtgatcatgagcccactggctcttttgtgtggctgtgtttctcgaactactgattgcacatttctgttacctgcagactccactcagccctgccattaggctccaaattgcaaagggcaaagcagcctcttttgggagtgggggtgggagacagaggtgggcaggatccccgatgagatgagaacaagcatggtctggaggggaaaagggggccaagttgacttcactaagcagatccagcttcacaaagcctcttttcagatgacttcaaatgcggccagaaaagggctatggttttaagagctccttgccaacctccaccaagaaacaaccgcggctgaactctgtgcaggggttggaactgcagtaaggaaggctaggtgtgtgggagaacttcccgaacaaccgaggggcggagttaacacgcggggaaaggttaccgaaaaagaaggaattctgtccaagggtttttgaaaaatcaaaggaaagcccccaccaactccctccacccggtccccgatctgagcgccacgcttaagcagcaaacctgtgcccaaccttgctgggaccaggtggcccctccccagccacctgttagttcaagttccgcagccgggcagaagggcgcccggaaggcgccgaagccgagcgcattttggcgttggaggcatccaggcccctccccagtagggagctgtccccacggtcccggggctgaaatcctggtcccctagcattccagcctcatgacacctactactcagcctccagtcgcatttgggggtcgcagcgcccagctccgacgagatgaccacgcccctcccagtctgttcccggtccgcagatcggtcctgcacaccctagtttcctactgaggtctccgcagcctccctgctgaggggccgcgaccgaggtcgctgtctccgttgggggagactcggtgtcgctccccttaccaccccaccgcacagcgaggagcgggccggtgactccgtgggagacgaggcgggcgtcgggctgggcctacccagctaccctagatccgctaggaactcagcccctaccccggctccgaccgcgcccccgcccctacttctgcccctacttctgcccccacccctcagcccgagcctgtagaaagcgcccagcggcaccgacgcgccccgcccccggccggccccgccccaggatggccagttcccatagcaatagcacagacaccggttgccaagcaacccctccccccctcccgtccgctccccccaaccccagcctcctcccgccccctcgccagcctccacctcccccgggggtgccggcgcggcccctggggatcgctcgggtcccgggctacgcgcgcgtgcttgagtttcggtgtgtttcattgtgtctgtgggcgagggggtgtgcgcgtggagagtttgtgggatcggtgtgctggggaggtccccagccgagagggaccagagctgatgtacagctggccgcgaagggacccgcccgccagctccggctcctttgtgtctcgcgcggagccagcgccgcgcccaccctctccccggcccgcgcgccgggcagtgtgtgcgcgtgtgtgtgtgtgcgcgcgcgcgcgcgcgcgtgtgtatatgtgtgtgtgtgtgtgtgtgtgtgtggggcggcgaggggtcggggctggccgtaccttcgatgcagcacacccgccacagaccagagtgggtgaggtcgccgcgggcgcggcggggcgggggcccgtcgtccatggtcaggttggtgccgttgcagatgtgcgcgctggagtacagccagtagtcggtgccgatggcgatggccatgagcgagaaggcggcgaaggctccggccgtggtcagcagcatctgcagcccgcggtcgcatcgcaccatggtgggcgcctcatagtccgccgcccgccggcccggcccgccgcgcccgcccgccctcctccctccgcgcgccgctccgggggcgccggggttggggggccgagggccggggggcggcgccgcgctgcgcgctccgaccccgcgccccgggcgtgcctgcgctccggcagcgctggggctcaaactccgaggcgcggcgacgagtgcgggctgcgcggccgccgggcgggctggcggcggcggccgggggctcctccctctccgctcgccctcccccctcggcccgcgcctccgccctgcgccctccgcgcctcccccgccgccgccgcgctccgggtccgcgccccgtttctctcggcgccgcccctcgagcctcggcccccgcccggctgtgcgctcctctgagctcccctctctccccagccaggattttctccccctcgcctcccttcccctcgcctcccctcccctcccttcccctcccctccccgcgcccgcgcgcgctctctctctctcccagagttcattcacattattggagtgaaggaagccgagggaagtgttccccaggaggaccgaagggaaagcgcgtctccagccacctctcttacccgcccaggacatccagcctcccctccgacggccctgcggattctttaatttgtggaggagggcgtgggtgggtgtgtccctcctttcccctctgtgcctgttcacctggtgatgaaggtgagtgtgggagtgcgtgttcaggtcagaattcctgaaaccccagatgtgggacacagctgccagaccctgcaagccacgccaggcccgggccaggccccaccccaacccaggtggttcctgctcctccagatccccttgcagggcctggaaggaccctgacttggggttgagggagaagggcgatgacagcgagaagtcctttggggagaacacagggtctctgctttctagagtggtggcaaggctgagattgaagatggggcgttcctctgtgctcacatttctgagggtctattactgctagagtccagggacactccagttgtgttagattccaacactccacccgccagccttttccctttctctcccaacctttcgcaatgcctttatttcgttttgccttttgctctgctcgagcttaaccggctttccctcccctggcctttattgtcagcctctgaccccaacccctgctggcttcacttaattgcctttgctgctggccgtgatcccaacctggacacactcccttctccagggagccggtccggactcctccttccagacccagctccaaacccctccctccaggaggttctcagagcccagcatcaggaggtgcagcaccctttgacatgtccaggtggtcctgttgttggcatccctggctgcactggaccccaggatatggaaaaaggtatagggagtgctgctattcttgcaagacgaagcttaactttctttgtggcaccttccctggtccccactccccgtgttgaaatcactgttctctgtcccacaagattgtgagcctttcctgtgactggcatacatggtaagggcttagcaaatgtttgctgagtgagagttgtttcttgccacttggaaaattatagtctgattgggaggaatagatcatatacataaagggaaaaaacaaacatcacaaggtgacagagcctgaggaccaggctggctgtgacagtgattgttggccccttctgcccttggggtgtctattctgctttccaagtcacaaaggacgagggtcatcatctctaatttactttaacccacctgccaccggatctggagttctgcacccagcaggtgcccaatgtatgtctaagtggaccagaaggtgtgagatggtttgctctgacccagaacagggttacccacctccaaccctaacagccactaggattaagtctaggttctgttctcagaaactccaggaaaatgaatcccaagttcttctctcctcctcctcctcctcccctcctcctcctcctcttcctcttcatcttcct

SEQ ID NO: 1243773 - DNA, 4001 bp, Homo sapiens
tgatgcctgggtcagtagactgggagactccagcaacctgttttcactactggaaaattaagctctagtggatcatctctaattaacaggacagcacacccagctgagtctaagggcattcctcttgagaaatatgctggcacactgactcttccctctgccttgctcctctctgtccagccagtggcccaggttgccagactcaaggcacttacttagaacattgaccgtggactcggatgtcagctgggtgttcatgggcatcacatattctatggtgaagcaacgcccccgctcctcacctgtggagacaagaatcacatttccaggtccctcttgaacatggatttgaagttggtccatacaaatggtatttccaagtgtgtttttaggatctttgacctgctgtgtctttgcacctgagctggatccaaaccctatgggggtcctgtccctggctcatagcccacagcaggggtggaggcacgtcctgacatgacaaccttcctggagaagcgcctgtgtgaggatggacccaagcaccaagagtcacatgaaaagaggttggtattgcaaactctccatgctgagtgaacatctggtgccatctcactgcgtttggccagatggggctgacaatggtgcatagctgacttagattctccagtgtgggtgtcatggagcaaaactccaaaagccctgtcaaccaccctggaaatcagatcctagtgacttcaaactccagatttaagcacagaccaatgccacgcagtctgaggcagaagaagccagagttggatgtcattcacatggcagactcaacaccttgaggtgtcttctctgctaaatactggtaggaacaaatacccactccatcccccaaagctgtactatcaagctgggaggtaaaaggctgggagagccaaactgtgtctcttcccagtgcacacataagttacaagcccctaccaagaaaagcccagtgaccacactgtggcaatccaggccagcccagcttgcagctattcttgtatgacttggaaatgcttttcttgtgcaggctggtcttgggtcatgataaagggataaaggatagaattcttggagtggtaacttgaagggttacagggaagccctagtgagtaaaaaggtaggcccagataagtggggtcaaaacctctaccatgctgcagagctggagggacctgctcatgtgtttcctctgtgccattttatggagtgaggaacagagaaactgccaagtattttctaatctataaactagtggatgcaaggaagctgagttaaggagacttaacctctttgaatcttcatttctgcatttgcaaagtggaaataacaagtcctgtcttgcagtactgttgggagaattatatgggatcaatacttcaatgagctaaagcatgcatgaacatttgagatctgtgcagtgtcattggcatccagtcctgggagcagagtgtggggaaggcatagttacattcatctttcaggaaggaagacctgggaggtgaaaagactggctcaaatggacatcgagaatcaggacttgagtttggaatggggtcccagtcactgcagggagcaccacccgccatatatagggatcatccgtggtgaatggtctccttccagcatctcttggccatctcttcccagggagggacctcttggggcaggtgatgtcagggggcagggctgtccccaaccctgggcacccttacctgcaaggaagcagacccgccagaggcctgagtgcagggacatcttgatctcggtgctctggttctggggcacaatcacaccctcctccaggtacagccagtagtcggtgctgaccgcgatacccaggaggcccaagccacagacagcaaagacactgctcagcagggtcagggccttcctcccgcaggcactcatcttcctggaccgttgctgtgcaactagtcgccacgctcccaccagcacggactgcgctctggggctagggagagtgggtgagcaggtggcagtacccacggctctgagaagacgaagatgaggagccagtaactaaagtcaaaccccaacctggctcaatggatgggtaaagaccaccaggcaaccccctggacaccaggtcactgcaacagaggtgccaccctccccctaaccccgcagcaattcagagcgttcttggcatgccactgcaaggacccccttgtcctctctgggagtccccttgctgggtactgccattcattcattcattcattcattcattcattcattcagcaacccattgtgccagacatgggagatacaaaaatgaacatgacactatccttgccattgaagggtttcccatctagaagaacaaaggcacccccaaagcaattaaatgcgacctattgagggctgtggtagagacctgtccaggaagtagagaggaagaatggaggagacaactctgctgggtgagcttctctgtgttgaaaaggattctgaggctcaaatagtctctgtgagagatgccagctccagacaggaaaatggcagcagccttgggaaggagtagagaggcagggaagatttcttggaggaaagtgtcctcctcatgtgactctaataagttgcagcacttggtcaacacaagtaaagaagccataccacagtccaagtgcaacagcctcctaaatccacctaatcagaaatgggctgactcttacctgctcagcacgctgtatcggcaggggccagcaatgaacgagaaaaagagaagctaagtgtctaagcaaggtcaaccacaagccccacctgctgatatctgccagggtcaggcactggacttggagctggaaaacagtggagagcaaggcagatggatgccagcccccgtggagcccatagccagtctcagggcttctgtgctctggctgtaatctagaatcacctaggaagtgtctaaaaatccctgataccctggtgctgctccaagagattctgatacaattgagctcaagtggggcctggacaatggtattttttaaattctgccaggtgattctaatgtgtagccaaagttcaaaacaactgatcttcgctactcaaagtatggtccatggaccagccatgtaggcatcaccatgcagctggttagaaaagtagactctctggcctctccaacatcctaaattgaaatctgcattttaacaggatcccggtgagttgtctgcctactaaaatctgagaagtgctgtgccaagcaaacagttgatggcattgtaatgtagcaactgctatgatggggaaagcccaggatatgacaagggcccagaaggggtcatccagtggggctggagggggcaggcagagccatctctagaagagaatgaggcctggggcaactcagaaaggttgtgtcacccaagccacccttggctgcaagtttgctatcctgtcggcatctttcactggcaccttgcaatattgcaaagtcagaacttttgaaactggatgttagtgatgtttgggaaagaggtgcagcagtgcttcggtgcagtccaccaatatcagggctccagtggagtcctagggccctgccccagggatggtatcatgttccagttgagatttgaggcacaggtgggtattgaggcagctgaaaatggacagaagccagatttgtctgcagagtctgagttgactgtaggaggagagtggcagagtttagagcctctttgtgagaaggggttgaggggtgcacgctggccctgattccacagcgccggccctgctctagcagttgatcatgggaaagttgattgatctacagagtgagccatatattggcttcctggaggcatgtgtgagtctatgtccatgtttgcaaggctgaagagcacagggctttaagccacaatgatccttcctgtgttggctttgacaaaggagggagaaatgaaacaccaaacagccctctccacccagccaaatcattc

SEQ ID NO: 1243774 - DNA, 4001 bp, Homo sapiens
aaattttacaccccaggaggcctttattactactcattaacaattgtttgaatttgctgtccagctttttctaaacaggccctcatctcacatccacaccaccatagtgctggcgccagttctaggggaagatggaaaaaatagttctgggacatcaggtgcgggcaactggaaactctgaaaggctcaaagctgtgtactaatctccattttactgagaccatccacttttcccttgacaggggtgattctaacatgccatgtccctgtgacatgggcagtgacagtgtttgaagtgtggtggaaaggggactaggctaacagccaagggagctgggttcctatcttagttctgccactctgagagcttggccaagtcacagtacccttttctggcctgtttcctcatcagcaaaatgcatggctaaggctagaaaatcttcaaggaccttgcctgatataatgatgatcctaagtgaaggaaaaaagaagtgaaagagttcatttaactctcttttcatctaaaaataattaaggatacatgacattctatcaatacatactgccaaattaaatttttgtttgtttgttttttgagacggagtctcactctgttgcccaggctggagtgcagtggcgccatctcggctcaccgcaccctccgctgtctgggtccaagcgattctcctgcctcagcctcccaagtagctgggattacaggcgcccgccaccacgctccactaatttttgtatttttagtaaagacagcgttttgctatgtttgccaagctggtcttgaactcctgacctcaggtgattctgcccgcctgggcctcccaaagtgctgagattacaggcgtgagccaccgcgcctagtcagccaaattaaatttttaaagagccacagatgtactatctgactcgaaagacaatatgacctgttagtgccaggtaactcaggattatcgactacctttttcaaggccctttccattccacagctgtcatgtctgccaaaggatagagtttccaggtcccttgaaaatacctgggaaactgagccatctggatattccttaatcatgtattctccacaagctacaaagacctaccacataaagtcctttacttgcaatggtgtttccaataatagaataagttatattatccatattttactcagctccaaccatggtcacttgttggcttgcatgtgaagcaagaatccaagtgatagaaaagagttaacacgtccagtggggttgaaataatatacgagtgggaacattagctcccaaactaagctgggtcagtggtggaggggcaatggattaactgtagaggcaggtcacgacaccgtctttcctcctgcctagaacgtcttctccgacagctgcagcatgcaaaaggcaaggcgcttcagggatcaaacctactcgtaaagggggacactgaggcccaaaaagaaagtaacttgctcagggtgacgcaacaaggctccacctccgcctcgaagccaacggcgatgacatccaggcgagggattacggaaccaccacagcctgggcccgcgggaggggacgggacgccacgacccgtggggcggcagccgccgcctcaagaccctcgccgccgccaggggtgtcacttcttcccgaggagcctcccaccctgccacacagcactgcagcgctgccctccgcaagacaaaactgccccgcaaccctcccgggccgcgggaggggctccagggccttcagaacaccactcccactatcaccccagagggtgaactgcggtgagaaccgaaacttgccacacctctacccccgtggccccttctcaggactgcaagtctgaatgtgggcaccccgagggcctaactgcccctttccacttgaggcactcaccagggacagcaaccagcagcggcgcgacagcaacagggcagagtgggacgggggcggggctaagcacccaagggagagcccgtcccgcctgccccgcccacacgtcacaacggtcagcaagccccgcccccgcgcggcgcttgctgggacttgtagtgttcaggtgaccgggccccaggagcggtcttctgcctttgatggctctcctaagtcctgagcagcaatctcaccgaaataaacctacttcatcccctggaagaagctgtttacttttcttttttttcttttatacctttatttcttttttctttttctgtcgtccaggctagagtgccatggtgcgaacacggcttactgcagccccgacctcccgggctcaggtgatcctcccacttcagcctcctgagtagctgggacaaccacggtgcccatacggcgcccgccaccacgccaggctaatttttgtatttttagtagagatggggttttgccatgttgcctaggctggtcttgaactcctgggctcaagaggtccagctgcctcggcctcccaaagtgttgggattacagacctgagtcatcgcgcctgggctacatctttatgtctttcttccctgaatgagaaagctttatacatttgaagggccattaagaggtcatcttcatttttctcctgggtccacttaacactacttcacgaagagtctttattttttttgagacaaggtctcactctgttgcccaggctggtgtgcagcggggcgatctcggctcagtgcaacctctgcctcctgagttcaagctattctcgtgcctcagcctccccagtagctgggattacaggcacccgccaccatgcccggctcatttttttgtatttttagtagagacggggtttcaccatgttggccaggctggccttgaactccgtctcaaaaagaaaaaagagaataaactcatggccaggcacagtagctcacgcctgtaatcccaacattttgggtggccgaggtgggagatctcttgagcccagaaatttcagatcatcctggacaagatagggagaccctgtctccacaaaaaataaaaaaattagccgggtgtggcggtgggcccctgtagtcccagctactcaggaggctgaggtggtaggatcacttgagcctgggaggtggaggctgccataagccatgatcacaccactgcactccagtctgggagacagagcgagaccctgtctcaaaaaaaaaaaaaaaaaaaaaaaaaaagaataaactcagtaagaaaagaattctgctaagtcaatttaaagaaaatcccccatccttaatatctaataaccctggcctgccttcaacaagagtcctgttaagttggtttaacaagaatctccttttagtaattttccatgcagtgacccctcactctgcttgttggctataaatcccacttgtcattattgtattcagagtgcagcataatctcccctttggtcctgaataaattcttccttgccattttaacaagtttcagaatatttttttctttaacatccagaagatgttaaatgctgtatatgctgtctatgaaagattaaatttggaagtgccccttcttccactgtttaaatgtggaaagaaatttttctgtgccatctcaggcaggggaatgagcattcctttttttttttttttttttgtcgagacagagtcttgccctgtcgcctaggctggagtgcagtggcatgatctgggctcactgcaacctccacctcccgggttcaaatgattctcctgcctcagcctcctgagtagctgggactacaggcgcccgccaccacgcccggctaatttttgtattttcagtaaagacggggtttcaccatattggccaggctggtcttgaattcctgaccttgtgatccaccagcctcagccttccaaagtgctgggattacaggcatgagccaccacacccagcgggaatgagcattcctaatctgcttcctcacaagactggtggcattcaactgagatgaacggatggtgggaaatgatgagtaagccaggaagtgggtcatccgtctaaagt

SEQ ID NO: 1243775 - DNA, 4001 bp, Homo sapiens
gccttccaggaactcggaatgtcatggatagaggagcagaagtggcctcagactgggggcaaggttggggggggggtcacaggctagggagcagccagggacatggacgcctgggatgcaagcacaaatagtcacggagcacctgctgtctgccagactctgtgcaagcctgtgtggggagatacagcagtgaaccaaaaagaccaagtctctgctctcatacagtttaatttctcgtgggggcaagaagcaacaaacaagaaagccagtgattcagatatgatatgtcaagtggtacatataggaagaaaaatacagccgagtaagaaggatcaagagaaaggggctgggagatgctgctgatacagtgtagttgaggaaggccttttgggagcaggactggagcagacacctgaaggaaggaaggggcagtaggcagtgtagttatctggggaagagcatttcaggtgcagggaccagcaggtgcaaacgccatgaggggacagtgcttgctcagtatgaagaacagcagggaggctgacgtggctggagtggagtcttccccacataagaggcacctgatagcaagaggagttacatctggagagaaagccccctcactcattgtgctggcctcagggatggcttcctagaggaggtggcacctgagctctcttctgagcactgagcaggatttcaggatgaggcgaggatggaagtttgcactgtgcatataggagagtcatttcctggctgggactccgggcttggtttgggggtggggagagcttggtggacagagcccaggaggcccccaaagccagggggaggttgtgagcaggggagtgcctcggttaggtgaggtttaaaacgactcccatggctgctgtgaggactgacggtgggagaccgaggaagaggcgaagggtccccagagtgtgtgcgcctgggacgcagtggggggtcaatttgtatgtactggaggaaagagggcagggcttggggaggccagcgccacttccctgggatcctccagcgcgcacaggctgtgtgcccctcccacactcctgtgcccgccctgcggacaccaccaaggcccggtcctgtggcctgtgacacagccttctctgcacagccctgcaacgccaagacttgagcacaccccctcccctgacaggcacacgcccgtgtccgcgtgacccgccctcacacaccactccatcctgtcctgcaccccccacgcagacacaggcacactcccgcgtccacgtgacacacgcacacccgcctccaaacagcacacgcaggtccctgcgcacgtggacacccccccagccaccagccctgcgcctcccgggccccgaagccgcagcgcccgcctctgccgccccctctcgccccagccaaggcaggaccctgcgcagcctgagccgcgcgccgccgccgccccattcatctcccaccccgcccccggctcctgcaggaagacgctccggcgggccgtgggaggagcgctccgcggagaaccgcacgtgggtgccccgggccgggcccactccgcacagacgtggcctccaccaggagccgggcgcgggggacagtgcaccggggatggatgcggtccgcagacagaagcggggaagaacgcagacggcggggcacccgcggcgatgcggtcccggcggccggcgcagacccgagcagactccgcgaggcaccccgcagacccggccccgcagacagaaggggaaggatccccgccctgaccagatcccagctccctcgtagacgcggcctggcagaccccccccgcctctcccttgcaggctcggggcaggtgttaaggcgttcgtcctcctgctcctcgcccgcgtccccgccccgccgatccctacctgggcgccgggcgacagtgtccgcggcccggcgggcggccccactcgctcctgctgcgcgccccgccccgccccgccccgccccaccgcctcgctggggcccagatcgccgagctcagcccgcgggcgccgcggctccgggcagcgctcgctgccccgcccaccgccgcgcccggccggcgctcattggtcggagcgaacggccccgccagcgccgcccaatcggagcccgggactcccgccccctcctggactaagggaccgcggtgggcggcgcggtaggggccctccctcccctgcggcggggccgacctcgccacgcccccggcgtcctggggtccccgaagtccctcccggccgcggcgtgggcccttctcctgggcctgcaggggaccgtgcttccccgccaaaccctttgcgcccccatcccggcctgcaggagccagagcgcccctccctcccgggcgaggcgcggtgcgtgcgagggaggggcgaggcccggggaggaaggccttgaatggcaggcccaggagtgtagcttctgcggggcgggggcagagaggccgagaggtggcttagcacagagtgaagtgcttgctcggtgagccggcgacaggaatggcctagcgagggccgagggagtagagggaactcagcaggacagtgaggtgaccttcgctgtggctgttcctggggactctgccgccacctcttcccctaacgcctccgcgtgtgaatcctctggcaccaccacttgccccatatccttcccccaaatctaacctcctgcgtccctgtctcgaagtggagccaggagcctgggagtcacctgctgcctccctgtttcctgctccaaccagtccatctccaggccctgccatactgcctcttaactatccctggaatcggcccactcctctccaccccacttcccctcccttagctcaggctaccaccatcttgtccctgattgctgcagcagcctcctccctggcctccagccccatccagtctcacctcctactagcctttctctccctggcacccagagcaagttttcaggaacacaagtccaccgagaggcattttctatggctcaccgtgagaataggtctaatcaagccctgtatagccttactcccagccacctgcctgtttaacgcctactcgtctttcagggttcaattcaatcctacttctgcctggaaaccttctccatgacctccccacttccagcatgggttagtggccccacccaggtacttccttgtacctggcatctgtttacctgctggttcctcattgggactgggagctcctggatggcaagcactgtgcctgattcgtccagcacacagcctgtcgcatggcacaggtgctcagtggatgttgttgaatgaataattccagcaacttgagtgtggcttttgacctcatggttcaggataccagctagagctccagcaatcacataacgcattccaggcagtggagtggagaaaaggatgaagaagagggcagagggtctgcaccagctctcttttcaggaaagttcccagaagttgccacgtggcactttcacatacaccgcttgagcttacttaacatgaccagacccagctgcaagagaaagctgggaaatgcagcttccattctgggcagccacatgcccaaccaagaaccaaggactgaattgctaccgggagaacagatatccggaacaactagtggactccaccattgagagggtggatagattgaggggcagagctcgactgtatgccaggtgctgtttacaggtctttcctcaaccctactaaaagctattattgtccgggtgcagtagctcatgccggtaatcccagccctttggaaggctgaggtggagcgtatcatttgagcccaggagtttgagaacagcctggtccacatagtgaaactctgtctctatttaaaaaaaaaaaaaaaaagaagttgttattatccttgactcacagaggaggcttggagagttaagccacttcccccaaggacacacagtgaactgtggcagagctgcaattgaaacctgtcttttccttgcacgccagacaggctgggaagtca

SEQ ID NO: 1243776 - DNA, 4001 bp, Homo sapiens
tcaaattcaggtgactaagcgcgtctgcgagggaggcggccggccggggaggcccgaggttcctgccgcgtgtccgggagacagggcctggcgccccggccgcgtgtgtgagggcgtgtgtccccacaggagggaatatgtgtgcgcaggctgtggaccagggtggtggcgtgtgtgtgtgtgtgtgtgtgttgtgggtccccacacaggagcgcactgcatggagatgaaaacctcggtgtgatgtgtgtgtgcgcaggtgtgtttatgcgcctgtgtgcctgcaggtctccgtgtacctatgcccagggtaggggggtggtccgcgcccctgggggccctgggagcctgatcccagagctcatatctggacttttccccatagtcactggtcccaccagcctggcactgcctgctgggctggattctgtgccccgggcggaaacccaggcccatctggaggctcacacagggggtgtctcaaggcccttcccaagctcaggccttagtagatactctgtagaaacttaattcggtggataactagggccatgtgggcaaacagaaagatggacagacaggccgggaaccaggcccatggtacagcgaaggattcctgtgggcatgggcactggcttagtcctgcggccgtgaacagccagactcaagccctccctcattgggaaaaactactgcaatcctgtccccccagactggggatctgctgcctcggacaagtcatcgagcctcttggagcctctgtttcctaacacgtgcatcaagcagaaggccactgtcctgccaactcccagggcgatggaaggaacagaatgaggtgtggacacaggagtagtttgtgccacagcactgtggggctgggatgtggctgtgtctagaagcgtccaagagagccttgatgtgcaaggtccaaccccacctctgcccccagctccaagatggcctggcacatatcccccacccaggtttttcctcccaggctgtgccccaccccccaagcgtctggccactcccaaggaatgtgggcccccggctccagacgcccacttggcctggcttcttccacaggacatgccccatccagctgcatccctcaaaggagccccagagcaggcagaccctgctgccatccacgcgggttcaagtagctccacctgggagctggtcaggccctggtcaggcctcattctgagcgctggaaggccgctgtgaaccccagtgccaagccgaggcaggggaccagctacatccaggcgaggggatggacagccgtgaccagcagaggaccgaacagaagggaaagccgcagaggtggcggccacccaggccagacacagaaggtggtcctcccatgcctgggccgcctcactggagctgtgtttatgatcctggcgagtatctggatggccctggcaacgggtgccctccgcagctcccgcccccacccgggatgactcagtccccttgagggaggcccaggcgtctggtgccaagtcatgcttgacgactcctgctgtgaggacgcccgctcccaccatccctggggagcccccaagcaccaatacgggctgttgcctgactcagcacagctacccccagcgcatcgtcctggcccacccacggaggctgatggtctccaggcctcatcctctgcccctcctcatcctccacaccaggtctgtgcctccagccccactctttccagctagctgccacctccccgtccatgttcccgagcagctcagatccaacaggccccagattcaactcagcatcttccccaaacctgctcgtcctcctctgtctccattgcgagacgggtaccacaccctccccattctttcctgacccaggtcagcaatccgggagccctccttgtcactcgtcctttccctgttgcccacccttgctccccacaaccccacacttactctccactgcagccacaccacagcttcccaaattgcatactctgttctgctgccaggcctcagtacaagctgtgccttctgccaggaacacacctccctctcctctgctgcctggaggacagctcagacatcgcctcttctgagccctccttgatctccccactacctgctgggtgagctcaccaagtcaaaccccttagaagtccagattctacccactgcttcgtttcccactatgtgggtcttccctgactccaggctaacacctccaccccaccctaccccatcctccacaccagctgctggagggatttccaacatgcaaatgtggttatagttctcccagacctggccttccaggaactcggaatgtcatggatagaggagcagaagtggcctcagactgggggcaaggttggggggggggtcacaggctagggagcagccagggacatggacgcctgggatgcaagcacaaatagtcacggagcacctgctgtctgccagactctgtgcaagcctgtgtggggagatacagcagtgaaccaaaaagaccaagtctctgctctcatacagtttaatttctcgtgggggcaagaagcaacaaacaagaaagccagtgattcagatatgatatgtcaagtggtacatataggaagaaaaatacagccgagtaagaaggatcaagagaaaggggctgggagatgctgctgatacagtgtagttgaggaaggccttttgggagcaggactggagcagacacctgaaggaaggaaggggcagtaggcagtgtagttatctggggaagagcatttcaggtgcagggaccagcaggtgcaaacgccatgaggggacagtgcttgctcagtatgaagaacagcagggaggctgacgtggctggagtggagtcttccccacataagaggcacctgatagcaagaggagttacatctggagagaaagccccctcactcattgtgctggcctcagggatggcttcctagaggaggtggcacctgagctctcttctgagcactgagcaggatttcaggatgaggcgaggatggaagtttgcactgtgcatataggagagtcatttcctggctgggactccgggcttggtttgggggtggggagagcttggtggacagagcccaggaggcccccaaagccagggggaggttgtgagcaggggagtgcctcggttaggtgaggtttaaaacgactcccatggctgctgtgaggactgacggtgggagaccgaggaagaggcgaagggtccccagagtgtgtgcgcctgggacgcagtggggggtcaatttgtatgtactggaggaaagagggcagggcttggggaggccagcgccacttccctgggatcctccagcgcgcacaggctgtgtgcccctcccacactcctgtgcccgccctgcggacaccaccaaggcccggtcctgtggcctgtgacacagccttctctgcacagccctgcaacgccaagacttgagcacaccccctcccctgacaggcacacgcccgtgtccgcgtgacccgccctcacacaccactccatcctgtcctgcaccccccacgcagacacaggcacactcccgcgtccacgtgacacacgcacacccgcctccaaacagcacacgcaggtccctgcgcacgtggacacccccccagccaccagccctgcgcctcccgggccccgaagccgcagcgcccgcctctgccgccccctctcgccccagccaaggcaggaccctgcgcagcctgagccgcgcgccgccgccgccccattcatctcccaccccgcccccggctcctgcaggaagacgctccggcgggccgtgggaggagcgctccgcggagaaccgcacgtgggtgccccgggccgggcccactccgcacagacgtggcctccaccaggagccgggcgcgggggacagtgcaccggggatggatgcggtccgcagacagaagcggggaagaacgcagacggcggggcacccgcggcgatgcggtcccggcggccggcgcagacccgag

SEQ ID NO: 1243777 - DNA, 4001 bp, Homo sapiens
cacccgcctcagcctcccaaagtgctgggattacaggcatgagccaccatgcccggccaagatccatgtttttatacctctcctaggatccccaaagagcttagaatggtgctctgcacttaggagtgttgacagacacggaaagaccccccactcaccctcctccagcctactaggtcttgctgggccccaacccccagcctccctagaaaacctcatttgtattccaccgtagcctctctggaggcagcagcgggcagcgaggaagacactccagcagcttcttggggagaaagatcttcaggtggtggctgttttctaaagggaattagaagggagggtttagtgtgctaccctggggcatccctgtgatagtccaaggggaaagggctgaaggcaatacagagcactggggaaaactgaaacctcactaaggagaacagaaaatccaagaattagagggccactaaagcgtggggagaacgaaaggctgtggccacattgggaacctggtttgtgaacttaccagcaacctcggtggtgtccttggtattcatggtgagggctccagggggcaaggtcacccccggcctgaggggccggggggagggggagtctgtgctgggaagggagagaacaaggtcatggcagaagcccccacattaatccaggatgagaagtatgaggtagggagtgggtatagaactgggtcatagtatctgggaaggatgaggaaagggagggaggggctgactgtgatgtgacagtagaagagagaacaacacacagtgcccggagccaatatgagtgagcagactggacaggaagagtgagcaggaagaaatgggttggggtgggggagcggggagaagactggcagggcttgggcctcagaggccctaaaccttgagcttttgcacagactggggctatggttgggtcaggtcctgggggttgggactcaggccatccggtccttggaggatggtttggcaagagagcctggatcctgggggcagggcaggagattctacctccggtagaagctaggcctttagaagacacgccctgagttccttctctgtttgatttttccaaggggaagggcagatctgataactgaacctaacctattctctcctccaggttggttaggacctgatagaatctgggccagacacccagattcccaccctcaggacaacccaccctccggctgacagccctctctacgtagctccctctccccaaacgcctctgcctcccctggcctccaggcctagcctaccccatctaccgctctggctccagcctgagccccccgccctcctcggggaacagatgggagctggcggaggctctcagcacgggctccgccaggtgtccaggatggagatgggaggaggcccgtcgggctcggctatgtgcagtgaagctggggttggggtaaggactccgccccagggcgcaggtgcgcagtcctggctaggcagcctgccagggtgcggagcgggagcgggtccttgggctgcacttgggcggcgccggatcggacgcttggcactctgggcggccccccggcggagtggtggtcccaggagaacctccgaggtgggagggtcccgcccgcatagagggatgttctggagaagccgggagcagagtccgcgggcacgcggtgggcgagggacagtgcaggtgccgggtgcgggggtctccgggacagtccccggcacgcgctggtccgccgtggggccctgcggtgagcggcgccccctggcgcgggggaggaggacggaagcgggaggtgagggcgaaccgggaagagggacggtggtccctggcgcggcgctccgcgtcgggacctggaggagctgcgccctctggcgcgggggcggagaggcgggcgagaggccctggctcttacctcccggggtcccgcgggtgacggcggcagcggccattctaccccacaccgaccccccccagcgccggctgacagcggcgtctaacgtcactgcgcacggggcggggcctcccaattaaggggatgagggtcaggaagggaacctggggtcagcacacgtggagttctgggtggggcgctgggcagagggactcggcttctagggctctgagccaggccgagggacagactgctgggaagtccccaaaagggcagcagcactgaggggcaggattccagggtcctggaggcggaagctcggccgactgactcccagttcgagagaacggggcgggggcagcccaccagtgctggaacccgaggggccgggcgaggaacgctggactgggagcaggacccttctcgcctcggacaagactccttgtctggggacccagcccgacttcattgtagctgggtcctcgagaaagcgaaaggagccctccttccccattggcctctccatcgctgcatcccaagaagaaagacaactcgggctccacttgcttgctttttaataacagagcagagagaatacaaggccaggagcggggcctggaggaaaacaggacttggggtgctcctgtgagagcggtgggttgagatgggagcccacgggggctgttaatgcctagttcagaggatgggaaaggcagttggagagacgaaggaaggggaaacgccttcatgtcagcaatgagggtgactctagtgacggaactagtcttgggtccctggggcaccactagcctctcggcatcggtggtttctccttactcttcagacgctgccaactccatcccccagggattgtgaagggggttccttctggctgtgacagtgctgaacgaggccagagagtgcagctgcctggaggcacaagcctcctcctgatccagggggctccagggagaccaaagcagctgtcaagatgagagaaattgaaaaagaaaatggaaaagtaggtcttctttccagatttcctagtacccaagcttaggtacctcgaagtctctggttctcacctacgttatttttgtttctctcaaatccagctctccagcctggctctcagcttctgcatctccatgcaagaccagagacccacatcactccctcactccacccagttccactccaacaatacctgggccctgccaggagtgagaaaacggtcctcttcctgtggataggttgctctctcctcttccagatcagggtattcattggtgctggggaatccacagccctcttcgccaagcaccactggctcagatgcagccccagagctgccccactgggccttcttcagtctgtggagactttaggctgaggagagaagtgcctggaggccaggcttcctgtctctccattcttcacctttctgttctgaaatacttcctgctgggactccagggagttgtcatttgacctttaaccctccactcccaattttctgctcccctcagactgaagcatattgtctaggaacccagaggtgaccccaacctccccactgtcctccagttctatggtttgctttcctgtcttcagtgatctagtttccactccttccagctcatgtggctcatcctccttactgcagttccctccttctttccatattacagaaatctgtttcaatcacaccaaagcccacagcttccttccaagcaacctcccctcaaagctcccctcaaacctcccctcaaagctgtcaaccccttccttagctcaaactgttctgcccccaaatcctgcatgactcccagaacccagatgtctcccttccttactcgttgatgatgctctgacgccttcttaggtcctccaggtggtaagtgacagccctcacccgggcggggactcccccaaggccctgctgctgcattccttccaaacatggcctcctcttctttcttctccaaagcatttcagggggtgggagctgctcaggaggatacagaccaagctgggagcaaccagtggctctctgtgccagagaatggggaaaaagagctagaaagaagaactg

SEQ ID NO: 1243778 - DNA, 4001 bp, Homo sapiens
tttttacccaggtggctatgccacagaaaagagggctccttcaagatccatgtctttttgtttttgtttttgagacggagtctcactctgtcacccaggctggagtgcagtggcgtgatctcagctcactgcagcctccgcctccctggctcaagtaattctcccgcctcagcctctcgagtagctgggattacaggcgtacatcaccacgcctggctgctttttgtatttttagtagagacggggttccaccatgtttgccaggctggtcttgaactcctgacctcagatgatccacccgcctcagcctcccaaagtgctgggattacaggcatgagccaccatgcccggccaagatccatgtttttatacctctcctaggatccccaaagagcttagaatggtgctctgcacttaggagtgttgacagacacggaaagaccccccactcaccctcctccagcctactaggtcttgctgggccccaacccccagcctccctagaaaacctcatttgtattccaccgtagcctctctggaggcagcagcgggcagcgaggaagacactccagcagcttcttggggagaaagatcttcaggtggtggctgttttctaaagggaattagaagggagggtttagtgtgctaccctggggcatccctgtgatagtccaaggggaaagggctgaaggcaatacagagcactggggaaaactgaaacctcactaaggagaacagaaaatccaagaattagagggccactaaagcgtggggagaacgaaaggctgtggccacattgggaacctggtttgtgaacttaccagcaacctcggtggtgtccttggtattcatggtgagggctccagggggcaaggtcacccccggcctgaggggccggggggagggggagtctgtgctgggaagggagagaacaaggtcatggcagaagcccccacattaatccaggatgagaagtatgaggtagggagtgggtatagaactgggtcatagtatctgggaaggatgaggaaagggagggaggggctgactgtgatgtgacagtagaagagagaacaacacacagtgcccggagccaatatgagtgagcagactggacaggaagagtgagcaggaagaaatgggttggggtgggggagcggggagaagactggcagggcttgggcctcagaggccctaaaccttgagcttttgcacagactggggctatggttgggtcaggtcctgggggttgggactcaggccatccggtccttggaggatggtttggcaagagagcctggatcctgggggcagggcaggagattctacctccggtagaagctaggcctttagaagacacgccctgagttccttctctgtttgatttttccaaggggaagggcagatctgataactgaacctaacctattctctcctccaggttggttaggacctgatagaatctgggccagacacccagattcccaccctcaggacaacccaccctccggctgacagccctctctacgtagctccctctccccaaacgcctctgcctcccctggcctccaggcctagcctaccccatctaccgctctggctccagcctgagccccccgccctcctcggggaacagatgggagctggcggaggctctcagcacgggctccgccaggtgtccaggatggagatgggaggaggcccgtcgggctcggctatgtgcagtgaagctggggttggggtaaggactccgccccagggcgcaggtgcgcagtcctggctaggcagcctgccagggtgcggagcgggagcgggtccttgggctgcacttgggcggcgccggatcggacgcttggcactctgggcggccccccggcggagtggtggtcccaggagaacctccgaggtgggagggtcccgcccgcatagagggatgttctggagaagccgggagcagagtccgcgggcacgcggtgggcgagggacagtgcaggtgccgggtgcgggggtctccgggacagtccccggcacgcgctggtccgccgtggggccctgcggtgagcggcgccccctggcgcgggggaggaggacggaagcgggaggtgagggcgaaccgggaagagggacggtggtccctggcgcggcgctccgcgtcgggacctggaggagctgcgccctctggcgcgggggcggagaggcgggcgagaggccctggctcttacctcccggggtcccgcgggtgacggcggcagcggccattctaccccacaccgaccccccccagcgccggctgacagcggcgtctaacgtcactgcgcacggggcggggcctcccaattaaggggatgagggtcaggaagggaacctggggtcagcacacgtggagttctgggtggggcgctgggcagagggactcggcttctagggctctgagccaggccgagggacagactgctgggaagtccccaaaagggcagcagcactgaggggcaggattccagggtcctggaggcggaagctcggccgactgactcccagttcgagagaacggggcgggggcagcccaccagtgctggaacccgaggggccgggcgaggaacgctggactgggagcaggacccttctcgcctcggacaagactccttgtctggggacccagcccgacttcattgtagctgggtcctcgagaaagcgaaaggagccctccttccccattggcctctccatcgctgcatcccaagaagaaagacaactcgggctccacttgcttgctttttaataacagagcagagagaatacaaggccaggagcggggcctggaggaaaacaggacttggggtgctcctgtgagagcggtgggttgagatgggagcccacgggggctgttaatgcctagttcagaggatgggaaaggcagttggagagacgaaggaaggggaaacgccttcatgtcagcaatgagggtgactctagtgacggaactagtcttgggtccctggggcaccactagcctctcggcatcggtggtttctccttactcttcagacgctgccaactccatcccccagggattgtgaagggggttccttctggctgtgacagtgctgaacgaggccagagagtgcagctgcctggaggcacaagcctcctcctgatccagggggctccagggagaccaaagcagctgtcaagatgagagaaattgaaaaagaaaatggaaaagtaggtcttctttccagatttcctagtacccaagcttaggtacctcgaagtctctggttctcacctacgttatttttgtttctctcaaatccagctctccagcctggctctcagcttctgcatctccatgcaagaccagagacccacatcactccctcactccacccagttccactccaacaatacctgggccctgccaggagtgagaaaacggtcctcttcctgtggataggttgctctctcctcttccagatcagggtattcattggtgctggggaatccacagccctcttcgccaagcaccactggctcagatgcagccccagagctgccccactgggccttcttcagtctgtggagactttaggctgaggagagaagtgcctggaggccaggcttcctgtctctccattcttcacctttctgttctgaaatacttcctgctgggactccagggagttgtcatttgacctttaaccctccactcccaattttctgctcccctcagactgaagcatattgtctaggaacccagaggtgaccccaacctccccactgtcctccagttctatggtttgctttcctgtcttcagtgatctagtttccactccttccagctcatgtggctcatcctccttactgcagttccctccttctttccatattacagaaatctgtttcaatcacaccaaagcccacagcttccttccaagcaacctcccctcaaagctcccctcaaacctcccctcaaagctgtcaaccccttccttagctcaaac

SEQ ID NO: 1243779 - DNA, 4001 bp, Homo sapiens
taaggggaagaaaggagacctctggcaatcagaagcgtcaagcctcagatgtgcccctccagcgaggtgtcccagggtccaggggtcctatcccgctgcgagtggagggttccctctaccaccttgtgacatgtcattctcttttgtgatcacgttaatttggacatgaaaaagtgacactagaagttggtccccacactgctgcggtggcctcatgacagtgcctggacaaatccatgcttcacctgagtcctggccgtgaagatgcctggggctgccccgacaggaaacccttgccacgtccagaggggagagggttggctccttcagtgtgcctttcagcaggggcgtgtgctaggatagagggctcattgaggccagcagggaggagcacctgggaggagccccactgccgttccacaggctccagccagactgtcctgctgagaggcctgcggtggggctgcagggagggtctgtggtccaggcctggagggacctttctcagcaaagctcctcagagggagagggaggaagagctgggagatagcggatcctgaagggctgcggcacccgcttccttttaggagccttctacgacctgacacttgtttcaagtttgggcccttacactggagagctagccggattcacttgacaccaagagcctcacatttccaaacctctgctttgttgaaaatgtggtaggaaaggccatagggcatacaacctcaagaataaaataagaaatggagctgggacactaagagacggcttttccaggggtcactaagggggaaaggtgtttgggagagagatgtgtctgctgatggaagagtggtcacaggtgctctgtgccaagcctagggtacacagagggcaagggaaagaccattcggagggagaagcaaaggcaccaggcaacatggactggcaaggaggtaccagtctccaaggatgagagaatccagaccggatggcagtaggggtgtgagacaggtatggtggggagggcgaatcatttgcatgcaggaagatgagagtgagctgtgtgcctggaggaaggctccaaattggatgagggcagggagagcaaggactgggatggggtggggaaggttggcctgttacaggtttgaccaagtgccagtcagagggagaaaattcccttatcagtccaaggagaccctgcatagaccagaggaggggtatttgaagtcagaaggtggtgggagggggtcattcccaggaggggtgccccacactagccagagcggggaggcgtcccacactaatcagagggggatggtccccacactaaccagagggggaggtgccccacatgaatcagaggggggtggtccccacactaatcagagcggggaggtgccccacagtaatcagagggggatggtccccaaactaattagaaggggggtgtcccacactaatcagagcggggaggagtcacataatcagaggggggaggtgcccacactaatcagaggggaatggtccccacactaattagagaggaggggtgcccacactaaccagagggtaatggtccccacgctagtcccagggatgaggtgtcccaaaagtcagagggggtggtgtccaccgcctgtcggaagaaggggactttcccacaggtcagagggcagagtcccagcccagtctgcgagtcagggggcagagatcccgcacgggtgggacgggaagggggcctgacgggtcagggggcgggacgcggcagggtcggagggcggcggcaggctccgggacgggggtccgggcccgtggctggggcagggcgccggcggccgcgggcgcagtcactcacccgctgcggggctggctccggtgcccgcgatcggcggggcttggctgggcttggctgggcttggctgggctaacggccgggacggaggaaggtggccgacttccgccccgcgcgcgctcgccccgcctctgggcccgcgttcccggcagcctctgctctgcggctgcgcgcggacggcgcgagggctgctgggagctgtggtttgtgtttttttgggttttttttttgttgtttttttgtgttttttttttccgtcctgcgcctgcgcgctggaggagcggccggctggctgcaggctggaggggcgcgagggtccgcactggcacatgagggccgtcttccaccgcgttgcgctggaacgtgggcccagcagatcttttggggtgggaggcattgaggggggtgaaggctactagggagggaagttctcattctccgagcgagggcccccttacatgggcctcccgaccctcgtagtcttgggaggcggaaaaccgtgggcccctttctgccatcctcattctcaggcagcccctctccttggcccttcaaaacagccgcctccagagtgctgctgaccagttgccaaagccaggatcagggaggtctaaggctgtagtgtcctggggtggggacggtggggtgtttccctgcaaaaaatctgcagttgacaaacctgccaaacaagggtctctgatttctcctttcccctccgtagccctagcccccgagatattttagggcactctgttaaaaggcttccccggccccgccctcctccatcccaaagttctgagaaaggcctggtggccgtggagcctctggcaggagagcttggcagaagggtgcaccagccccctgcccatctgcaccttcagctttcctgcttgataccagctacttcccccagctctctcaaaaccttccgttcagtaaaagatacacaagaggaggaattcaaattatataaatggtacgcaatgaaaaataagcctcccattgccgttctgtattccctgcccagaggcgatcactagatgttatatggtatccaaacaagtcataaacacgtatcttaaattacctttaactaaatagaaatgtgctaaacactgttatgcacttttggtttttgattttggagaggagacaaacctttcttgaattcattaatgtttcttgtcatgctaaactgagtcccaaccatgtctcacataatactcattattgtcaggcctctgagcccaagctaagccatcatatcccctgtgacctgcacatatacatccagatggcctgaagcaactgaagaaccacaaaagatgacattccaccattgtgatctgttcctgccccaccctcactgatcaattgaccttatgacaatacaccctccccacccttaggataatgtacttcgtgatattccctcacccttaagaaggtactttgtaatatttttcccacccttgagaatgtactttgtgagatccaccccctgcccacaaaaaattgctcctaactccaccacctatcccaaacctataagaactaatgataatcccactactctttgctgactcctttctcggactccgcccacttgcacccaggtgaaataaacagtcttgttgctcacacaaggcccgttggtggaatctcttcacatggacgcatgtgacaattatatttgaatcttttattttctaaaagatccacatgtgccttccagcttaagaaataacacattattcctgcatctttaaaactctccaggttcttcctgttctgtactccctgctacccccaagaggtggtagccacaatactgaatgttgtgttaatcattctgttgccttactttataattttagcacataggtatgtatccctaaacaatatattgtttaattctgtctattttaacctttataaaatgaaataaaactgtatgcaataattgagagatccagtggctctctcagaggccttcgaaccagagcaacaccatcttgaataagggctgggtaaatgagacctgctgggctgcattcccaggaaattaggcattcttagtcacaggatgagataggaggttacaagatacgggtcacagagaccctgctgatgaaacaggatgcagtaaagaagctgg

SEQ ID NO: 1243780 - DNA, 4001 bp, Homo sapiens
gactgcgcagaggactccacatgagggaaatgtgctggggagtgacactgggcacaagtgcctcgcagaagacacttcagggtagtaacggccagcacggctcggctgcggggggtgtgggcttacaaagatggcgaggcagacagagggtggacaggtccccgaaagggctgagctgcagctgatctggggccaccaccagggctgatgtcccaagcccaggtctgtctggacagaatacacgaagcaggtcgccgttacagcccggaacacctgctcttcaggggacatgctggctagtgcagactctaagagctgttggaggtcctcagccgtcacctgcccagcctcccatcccagcgagagatgagctgtgtaccccactgtgcccctgcctgagcccctctctggcatcaacatgaggccattagcccattaatccatctaaataattttaaaatgttttaaaactgtgcactgttttcagcatattaaaaaatcctgcaaataacaaatatccacatatctaccatgcggattcaaccatcttgacattctgcacttcaggtttctttttaaggaaatgcgaggcagatggcgcctttttgttctcttcagtccctcttccctccctctctggccagacattctaaaatcatttaaaaatgattttttttgaggtagggtctcactctgttgcccaggctggaacgcagtagcgtgatcgtggctcactgcagccttgagctcccagacccaagcaatcctcccacctcagcctctcaagtagctgagaccgcaggcatgcgccaccatgcctggcttcttttttaatttttgtagagatggaatctccgtatgttgctcaggctggtctcgaacttctgggctcaggtgatctgtctacctcagcctctgaaagtgctgggattacagtccagcctaaaaatgatattttaaaaatcatttcctacaaatggaagtgtgtataaacagtacatagcatctttgcatgatacttcgtgcagacagcagctttacatcaacagtgccttcagtgttagctggaacttcacagaaactatcgttctgtgcaaggctgtacggcttctgaggtttctcatactgatacatgcagcttgatacatgcatggtcctttaaactgtgcactggattcaatgatatgaataaccacagtggacttacgctcctgtgggaggatatcaggttgtgcctaatttttctccactgctcacagagctgcagccaccgcctttgttaatctcctgggcacagatgggagcgattccttacagacccatgaattcctgtgacttgattcttttcatttggaaggagaggctggaccactggagacagatgcctcttgcagggatctgtatgctaaaaatacttgaaaatcagagcaaatcaacacctgtcatctgaaaaatggaaaatgggccggggccagtggctcatgcctgtaatcccagcactttgggaggccaaggcgggcagatcacctgaggtcaggagtttgagactagcctgaccaacatggtggaaacccgtctctattgaaaatacaaaaattagccagtcatggtgacgggtgcctgtagtcccagctacttgagaagctgaggcaggacaatcacttgaacctgggaggcagaggttgcagtaagctgagattgcatcattgcactccagcctgggtgacagagtgagactccatctcaaaaattaaaagataaaaataaaacatggaaaatgatcgttggagagtcgtgtgtgcaggagcagcgccagaagccgtcccaggagccgggtctccggaagtactcaccaaggttctcaggtttgcttttgcaggagctccgtgcagcagggtggggtccacagtccccgcagtgtctccaaagcccagtgtggtgccagctgcctcctttctctgcgggctgctgggtgggacggagctgggcagaaggaagagcctgaagtcaaagcagcaccaggtgaattgaccgtgatttcaaagccatgtgacctgttccaaaactcaaggttcggtcacaaccaccgcaagcggcggggaaaagacgtcagactcggatccgggaaataactcgacggacctttgacccctgtggttttcccagtaactattgaagcttccttagcacttggaagcagacttctagaatggacctgggctttgaaccctagactaccaaggagagttgacaggcgcagtagttatccaaagcacccacaggcctgtctgcggctccccacagggccaggccactcatacccttctgctgagtctccttgcccggaaggaagaacagctggagaggacagtgacgggcgcagaggccggggtgggcaggtgaggaggagaggagaaccaatcgagggcagctctgcctcattccttctgatctcagtcctgtttctcactggaacaggtgattgaggcttgcgagtcagggtgtcactgattgtggccccccgcaaaagaatgctgaagtcttgacccccagtacctgtaagtaggacctcatttgggaataagtctctgccaacgtaatcaagttgaggtcattagggtgggccctagtccagggatgggtgcccttataacaagaggagaagggctgggtgtggtggctcatgcctgtaatcccacactttgaaaggccaaggcgggcagattgcttgagctcaggagtttgagaccagcctgggcaacacagtgagaccttgtctctgctaaaatctgctaaaaaaaaattttttttttttgagacagagtcttgctcgtctcccaggctgcagtgcaatggcacaatcttggctcactgcaacctttgtctcccgggttcaagcaattctcctgcctcagccttctgagtatctgggatcacaggtgcatgccaccatgcccagctaattctttatttttagtagagacaaggtttcaccatgttggccaggctggtctcgatctcctgacctcaagtgatccgcctgcctcggcctcccaaagtgctgggattacaggcatgaaccactgcacctggcctaaaaaaattttttttttaattagccaggtgttgtggtgcacacctgtagtcgcagctacttaggaggctgaggtgggaggatcgcttgagcctgggaggtgtaggttgcagagctgaggtagtgccactccactccagcctggacgacagagcaagaccctgtcttaaaaaaaaaagaaagaagaagaagaagaggaggagaagggccctaggcctagacaccccatgatcaccccatgttggcagaggccgagactggagtgacacgccaagggtcggtggcaacactagaaactcaagagaaggcatgaagcagaccctccctggagccttcatgggggtgcggccctgctcacccctggagtgtggacttctggcctccagaaccatgagcaaatacatttctgttgttttaagccacccagtttgtggtaatttatgacggcagccagagggagcgtgcacaggggcaaaggcgatgtggaaattgtccgtccatctccagggatgcgctgccaatgggcacactcccacagaaggctcctgagctcctgggcctccacccagtagaagcctgcgtcgctagagtctgactccaagtcagaatgatcctctgccccacttcaggaccagctatatcgtctgtggagctcagggcaaaatgaaaggatggtgcgtttgttttaaaaacgtattcagaatttcaaggcagcaatagcgagcaataaagtcagcccagggcccccactccagccctgccctgcatcaccgaggggtcttcaggccccctgtctatcaggatgtcaggatggtagctaaaggtaggggatgtttcctttacagatgatggaatgtcctaaagttaactgtggcggcgattgcacacatctgtgaatacactagaa

SEQ ID NO: 1243781 - DNA, 4001 bp, Homo sapiens
gctcccccgcgcctcgtccaggctctgctccagaatgtccttctccgcctggggcagagagaggtcagcctggggtgctggcttccccagaggcctgccctaggcaagcagaatcccgagaagatggcggcaactgcacggtcaggtgtgtggacggatgcagtcttgccactctacaccgggcaggagagaagccacggaaaagccacccatcatgcctgggaaaagtgcagattcatggccaaggagaaggaacacaggaagctggcaacctctgaggacaccagttcctccctttaccaggtcagccttctccttcaacagatctaccggcagtttcacagcgagggagaaaccagcagacaggtcattcccctctgacactcacttcccaggaaggagcttataaacagagacacaatccgggctgcaagatggccagtgccctgggcccagtgaatgcttatggaaggaatatctcaataaataccaatctactgagaggggccgaggaggagacgccaagggtcgttgctcactcactgctccacttcagagcccccctctctccagtgcacctgaggcccagagggcggagtctttccaggcagaaaggtttctttcccccatccttaacgcgaatcccatgctttacaattggccaagtccactccagaacacagtcgctgcagtaaacccaccaagtcgggcattgtgatgcacctccagcggcttttatttttgtttgtttgagacagggtctccctctgtcgccaggctggagtgcagtggcgtgatctcagctccctgcagcctgaaactcccagggtcaagcgatcctcccacctcagcctcccgaatagctgggaccacaggtgtgcaccaccatgcccggctactttttgtattttttgtagagatggggtctcgccatgttgcccaggctggtcttgaactcctgagctcaagctatcttgcccatcttggcctcccaagtgctgggattacaggaatgagccactgtgcccagttccagcttttaattctgttccagcagcttttaattctgccaattttggggtctggggaacagcaggaaggaaggaggtaaagagaaagtgggtgagatgagtcactaaatttcatctcttgttcttagcctcaccttaactaaaccacctgtcagaaaccccacagcctgagggccaagcccccaaggcaggaggccgctctctgctgcggggaccggaacctaccaggctgaaagtcagcgagcgcagtttctcattctcctccttcaggcggttcagctcctcatccccggactcctggtcgctggctgtcctcagggactgctcttgcaattccagctcacaggaggaaaccatgttggctcgctgcagctcctgcttcagtagatacagctgtgcggtggggaggcgacaggaagggcgatggaaacagcttctcccctgatcaggagctgggggcatttctcacccttcctcctaatgatgcttttagcactcagggggcttcctgcctcgagactgaaaaacccacgaaagggttcacctaatgaatagtcccaaatattcaactggggctgggaggacagaggcctttcagctctgtcttatagatgaggcaccgcggttgaactccatccagggttagggtcccaggaatagaccaagaggccttgataaccaactcctggatctctacagctgagcagccggcagtgatggccagcatgctccctggcttccctgcttgtccatgttctgctaaatacatcaagaaagggaatttggagtcatggaaatcagtaagaagtaagagagaggaaagtcaggtcggaggggtagacgtgcctgggaacgcgggaccggggctgttcagacagcaaagctcctgtgttgacttgcagtctgtgtgcagggccctggccttccagggactatcccaccaggtcctgctggcctccttcctctggacagcagcccaagagaaacttggagctcgagccacgggcccgccctcttcccgtcctgggtgtggcagccctggggaggcaggactttccccgtgaggcaagcccgggaagtctgcacgtcggggtgggtgccggtgctcacccctgggctgtggccaagaaggacctttccacctggactctcccctcccgacacccggttagcacattgtcaattcgcaagttcccagctcctgcaatggtccagctgggctgggcatgtcaccgtccacagattcaaaaagtaaaatcaagtcagagctggaagggaaccggaaaacatgagactgaaagtgaaccagaacaaatgaaccgaattctatttccaacagacgccataaccacaacgaagagagagacagacagacaaggacagagagaacgaagatacagtgactcacaaacacagtgtttgattacaaaccctcagccttgagcaagattggctggcggggggaggtgaattacaaacaagtccggcacccgtcttagcggggctgttaatggcagtggtatgggcagagtgattctgaaacgatttgagatgtgctgcaggactgagcacgggtctgaaggtgctggtgacgctgggagcagcgttccccctggggaaggagcacacacgtacggaacaggagaaggcaagaaaaagccgcagggcatgggttggaattagaggtatgggtgagaacccatgatttctgaagtatgcacgtgaactatatgtatacttccatgcatatgagtatgtgtgtgtacacagacaagtatgtgtgtgcatatgtgtatgtatatgtccatacatgtgtgtgtgtttcctagctctgtcccctgaaagggctgagaagcaaagacaccctagtagtgatggacacacctacgcccacatcttgttctctaaaaggaggcaggaggccgggcgtggtggctcatgcctgtaatcccagcactttgggagaccgaggtgggcggatcacctgaggtcaggagtttgagaccagcctggccaacatggcaaaaccccgtctctactaaaaatacgaaaaattagccaggtgtggtggtgcgcgcctataatcccagctgctcgggaggctgaggcaggagaattgcttgaacccgggagatggagattgcagtgggctgagatggcgccactgcactccagcttgggaagcgagtgagactctgtctcaaaaaaacaaaccaaaaaataaaaataaaaaaaggaagtggggccctcagagaatgggctgagcctggatttggggtaggccgggtacaagatgaccctggaatatcttgtgaggccagaaaagcagttggttctccaaaaacaagggacccgttttaggacacggagctggttgaagggttccattggtcacatctgggtccatttgagaccaaaatcattaaggacagtgagaggtcagacccctgcagagtaggaacccatgaactgcgccaagaacagagtcagccacgggagaagggaaggcagaggccgtgggcagcagcaaagtgggctggcctggtccaaagtcagccaagggagaagggaaggcagaggccgtgggcagcagcaaggtggagcactggcacggtcgtcattcacagctcccagggtaggggccagctcccgccagagtcaccacagctacatcctgggaaatgtccaccaggagcagggtgcttgctggtctcagcgccccacacccgagatatttatcagttgcagggaagaaaagaaagagccattctgcagtagagcaattggcctgcaccttgacaaatggtggacggtgtgacgtcccctgtgaggggcgacaggacctcgagagccctcgaggagatgccctgagtcaggccagcaccccctgtgcagggtcccggccaaagaacataatttctgtatacatgtgggaaacacaagacaaaccccaaatgagaggtcgtctat

SEQ ID NO: 1243782 - DNA, 4001 bp, Homo sapiens
ttccatcctcaagggcttaacagattctaaaatgtagtaacagttctaaaaatgtatagacaaaatctttgatccaccatccaattccccctatatataatcccattaccagaactcaggagtccactcaacaacccaggaaacaaacacttactctgatggcatctctagtagtttatccaaaagacaggaaactttctcctaaaaacagaaaaatccccacctataaaatgatggatgctcttggcacaaaacattccgaatcctaccctttcaaagtcttcagatagatttggaaaaaaataaccaattggctggcttctcaacctacactgcataaaacaaactgtcaaacatctttcagaggacttcaagatatcctcactctcttatttagaacctcatattcttcagacaggaagagaagccaactaacagtataacacctgtggcttgagacggcgtgccccaagttttccctaggtctaaagtgaacaagaccttctgtaacactttttcagaagcataaatgaagaatacacaagaggataaacacggaggtcatggtacgtttgcaacgaaggtgtgtacacgtttttaaaaagcatttctgatctataccataggaaaaaacctgtcatactcacttccgagtcttctgcactttcataatccgagagaacagctgaaataaaacagaaatatgtggaaaaaaagaaacccagaaacattttttggctgcttattacaggtcagactaagagtctcatttaattctgacatcaacctacaacgtggataaaattatagtccccacttacaaaaggagaaacaggctcagagggtaacttgctgaagactatactgctaaagcctatgctcttaaccactatgttacaaaaaggcactctgtggccctaaatccgtgacagtgtgtgagaatgtcgatgttggaaatagatgacctgagtttatgttaaaaaaaactcttgtcctaatggggtaaaagatgctactcaccatcaccttcaatgccatcttcactctcctgaaagaaagcagaagacatgggttagttctgtgatttccagaggtggggagcccaataaagaaatgtgggtgaaaagctgaagattcagcacaaaatggttggagagggagacagagataggtaaatctttatcaagtagtagccaaggcaggtctggtctccttccctccagccccgacttctgaataaaacatccgctttccatctccagcggctctaccatcctcccagaaacccccaatccttcttcttcccttggaactccggatgcaaactcgcattgggataactccccttttctctcaaaaacaaaaaaaagtcccagtatctactatcaactcacagactacctagcatcacctacaccccgcccccggccggctcgccgcccggtccccaccccgccccgcctgcgcgcactcacacactccgactcctcagcactcttggcgcccccgctctccacccgccgcagatgaagggccccggttcggcctccgcgctgtgaaggcagagagccgctgccgccgcctccggcgctaccgctgcagctcccgcctccccgcaacggggagccgccgctgtcggagcccgaagcaccagattcctcgtcctcggtgtcttgcgaagcgcgctgccgccgccggtccgccatcttacggagaacggccaccaccggcgaggtacttacgcaccgcgcccgtcgcagaggctgctgggaggctggatagctagtcccggcgtgctacgcgtgcggcgctcggccatcccgctgtgtgtgtgtgtgtgtgtgtgtgtgtgtgtgtgtgtgtgtgtgtgtgtgtgtgtgttggggtgtgtgtgtgtgtgttggggtgtgtgtgtgtgtgtgtgtgtgtgtgtgtgttgggggaggggcggggcactgggcggggcctaggcctgcggcacgtttgcggccgacccggattacgtctatcggtgatgtaagggggcgtggcgcggctcctgacttcccttgggcaggcctagggcgaggggaattgagacttcagcagcctcccgggttcctggcccggccatcttgggcttcccgagtggaaggagtcaacctgtcacagcttcactgcaacactagggctgtttcatggttttctgtttccatttctcacttctacctacgtttgaagcaggtcaatttactgcattcctttgcttggtaaaatcacgaatcaaggtaaatcttaaaagctgtagtgctgcgtcagatttgctgcaccagccttgtttaagataacgggcgaaggagaaaccagttgtctgcagtgaagccagaggacttcttgttgcagcgttttctctgtgttctcatttcctcttcacgtttcttcccaccccagccatcacctgtcccaaagtgcaggctggtatgatgccagtattaccggttttgttttggctttttcgaggcagggtctcactctgttgcccaggctggagtgcagtagcgcggctcactgcagccttgacctcccaggcacaggtgacctccttgccttagcttccttagtagttgggacaacgggcacacactaccacacccggctaatttttctgttttttgtagagatggggtctcgctcttgcccaggcttgtctcctggctgggatcaagcgatcctttcgtctcagcctcccaaagtgctgggactacaggcatgagctactgcccttgtcaggattttagaacctatttaaaaataaatggtcagtagaaacagatgttgattcaaaatcctgacattatttccttcttaaggtttatggaaattatttcattttggcaaggcattggccaccattgaaaagaatcagtgtgttttctttggaccattataaggatatacaaagtgcatgagctaagtttttagtgcacctacaggagtgcacgttaataatgtatgttatcaaacaaaggccaccatggcatagaattcttccctgagtaaaatattttttttttttttgagagggagtctcactctgtctgtcgcccaggctggggtgcagtggggtgatctcggcccactgaaagctccgtctcccgggttcacgccattctcctgcctcagcctcccgagtagctgggactacaggtgtctgccgccaggcccgactaactttttatgtttttagtagagatgaggtttcaccgtgttagccaggatggtctcgatctcctgacctcgtgatccgccgttcttggcctcccaaagtgctgggattacaggcgtgagccaccgcgcccggcctttcctgagtaaaatttttataaatgacatggttaaggatcctgatgtttatcaaatttatagataacatgaaactggaagtaattatgaatgccttcagagatgaaaggaaaattcaaggccgggcgcggtggctcacgcctgtaatcctagcactttgggaggccgaggcgggcagatcacgaggtcaggagatcaagaccatcctggctaacacggtgaaaccccgtctctactaaaaataaaaaaaaatagacgggcgtggtggcaggcgcctgtagtcccagctattcgggaggctgaggcagaatggcgtgaacccggtaggcggagcttgcagtgagccgagatcgcgccactgcactccagcctgggagacaaagagattctgtttcaaaaaaaagaaaaaaagaaaattcaaacaatctcagctaattagacaagtggccaaacgtgacaacttataagtccagctccaaaagccaactgcctgagttcaaaatggaggataatatgatttaataagtgttaaagaaaaagaacctggaggatcttatcgatcacagactaaattggtgcaaataaggctgccaagtttagtgtctaaataaggaaagtgatagtctgccactttgtccttcagttgtttagtctgggtc

SEQ ID NO: 1243783 - DNA, 4001 bp, Homo sapiens
cccccgcctcccagctggcccaggggagggggccgtgggagcaggagcctgagggctcctaccctccagggagaaaagggggccccaaaggaatctgaccccaggaggccctgcggagaggcaccagggcccctcccctcactcagggctaactccacgggcgggcgggtgccccctccctccagcccagggacagggcccacagctcgcagcaaatacacttccagggccaagtctgagagggaaagggaccctgggcctcaggatctttccctccagccccacccctggggctctactgcccccacccagcagctctgcagagggacaggggctcccactcacccatcagcatcctggtagttcacgttgagcctctttgtggagcccaggagctctaggggtcaggataggaggtgtcagggccatcagatgactgccctcactcagcatccctccccccacctgtcacagcccggctgacctcttggcgtgcaggaaagcacctgccccatggccttccgcctgtcccgtccctgtggctccccaccctggcccaccggcccagcagcatgagggcagtgagggcaggatgctgctgcggcagtgggctggcttcccctcgccccagtcccgcttgtttatagagccaaagagggcggggggtgggactggcacgatgtgccctcagtggacaggcccacggtgtgcatggttagcattcctgcctgaatgggccaggcagcgagtcatgttgtcctactgggccgaggggtggggagagagaaggaaagaggcactaggtattcaagggcaggccacgatgcccagtcctggggcatcccagaggaaggtgacattagacagacctctacccaacactggctctgccaggcaccagctgtgtgactgtgacaagtcatttaacctcccatgctcagtgtcctcaactgtaaaatgagctgatcagaacctgctcacgggggctgtgagtacagtgcctgaccttgtcatatgcaaagacaggagctctcaacatctagccctcctgacatgtgggcaaataccatcccgatgttagggcgatggtcctccaacaagagctggcacagggcccatactgtccccactgggatctccatgggtgctcagactgcccggggagtcactgctactgctgactccacacctccagggtcttggctgagatgtccatgccctggacaaggactctgcaggttggtggcaagaggagctggggccaccccctctcggggcagggttcaggcaggtgtgctccctgcgagagccagggaactggtgggagtggctcttgaagtgctggggagggaaggaaggcctgtcatgggtggcccctgcctcctgctagaacccaccctgcagggaaggagtgggcctggcttggccaggctgggcagagtgccaagtgtgctggcccaggcctgccccccaggctctggtggacccctgaataccccagtagcctggggaagacagggcttcattccaacagggaggggagggaccaacctggcagtagggaacatggcacagggagggaggggacagctacattgagggccaaactgaaggacactgtgccacaaaggtaaagacagagccagggagggacaaagcgctaaaggggttgtggccactgggaagaaacacagacctccattttcctccagtccccttggaaagtccttgtcatacagaaccatttgaggcagtagaaagaagaggggctctagaagcggaagtgcacagttcaaatgctcactctggctgtgtgaccctggcctgccacggtacctctctgagccccagtggagacaatgcggtcagcagggaagagacacagagcacccttcaagctgcccactcttccattagccctcctcttccaacagcctggacagtttgggatgaggcagctgggtggcgggatgcagtccctcccgagaggagcaggacaatgtgacaggcaggacaggaacagggcaagggccaggctgggtggctccgttcttttcagaacaatagccggaaaggcggtggggaagaggctcagagtgaccgggctggggaccctggcaggagggcagagggtccaggttcctggcagtgactccaggcacttcccctgcggtacaaccttcttcccgggcctggcgctgggggtggaagggtggctcctgatttaggctcccgggcagaggatgtgagctcagccggccgccccagcacaccccatttcctctggccaaagaaggagattgttcagaaaagggagtggtgcggcgaggggcggggagcagggccagggcaactgtacccctcttctctcagccacctgctccctgaagaggacccgggtgggggcagggaattggcctgatatcaaatgcaggaggctgagggagcatctcccacctccctgttctctctctggatagctataaagcgccagctaaaccccagaagaaaaaaggggagtcctgacgcctcccttttagcagtttcccttgccttcttacgatatggagcaagagtccccagcctcacttctgagaactgcagtaaaatcatggggagaactttctgatacacagagtcccaggccctctgtgatgagtctgattttgaggggagtccaaggagtctacacttttatttttacttatttattactttttgagacagggtcttgctctgctgcccaggttggagtgtagtggcacgatctcggctcactgcagccttgacctccccgactcaagcgatcctcccacctcagcctcctgaataggcgggactacaggcatgtgccaccatgcccagatcatttcttaatttttttgtagagatggcatcttactatgttgcccaggccagtctcaaactcctaggctaactaggagtcctgggggactccttcctgtgcacagggccaacaggactataggtgtgtgccatcatggctggcccagtctgcacttttgaaacaatccctaggccagcatggtggcattgcctgtagtaccagccactcaggaggctgaggtgggaagatgaggcaggaggatcactagagcccaggagttcaaggctgggcaacatagcgagaccccatctctttccctgtcctttttttttttttttttttgagacagactcttgctctgttgcccaggctggagtgcagtggtacaatctcagctcactgcaacctctgcctcccaggttcaagcgatcctcctgcctcatcctcctgagtagctgggactacaggcacttgccaccacactgagctaatttttgtatttttagtagagacggggcttcaccacgttgcccaggctggtctcgaactcctgacgtcaagtgatctgcccacctcggcctcccaaagtgagaccctatctctttaaaaagaaaagaacagaacaatccctaggtaatactgatgggcagctgagtgcagagcacaggggacagggtgcagctttgcctctgctctgccatgctatggctgtgtgactttaggcaagtcactaaccctctctgagcatcactttccttatctacagaacggatattgaaatacctatctcacaggcaagtgaggaaattataatatttcatacactataaggtttgcaaatgtcaccttgtgatctcacttttgtcaccagcctctccagcttctcagaggactgggaggggaggcacagtgccagggcctcataaggaatcccaggccccagtcatgctgtgcctgagcctacagcctgcgcagggtgaattctccactttgggactgagggaagggacctccttccccacagacgcttcccactgggcacaagggaacttctcggagcctaagagcccagctctgcagttcccgccactggcctccaaacccctcccgcctgccctcctgagggcctcactttgaggacccagagcggtga

SEQ ID NO: 1243784 - DNA, 4001 bp, Homo sapiens
tcttactgagaacaagacagtccaccctcctcaaatatgcagatcacagtgacccacccccacccaccaagcctctgtgaactgagcgctcggcctcagcgggatgctcgtcccacccggtactcacttgtctttgtggccttgaccttcgccaccagtttctgcacaccggtcacatctccattcttgacggcgaggatcaggtcctgttcacgacccatactggctcctgggctgagctctacactcaggagtccagggcaaaggcaggcaacgggtccaagctggggcgtcagggcgccatgccacagccccttggagggctcccggttccgggggagcaagtcaggtgtcccaggcagtgggctcctcgtcaggtactgagggatactcccaaaggtgctccgtgaactgccaccacacgaaggaaagctaatctttgagggggtgaaggctacatggaaatctggatggatatcagcttgtggcttccgacagctccaggatgggctgggactgggcacaccaatcttcccggcttggctgtggaacaccagtgcccacccagagagcagccagcattcccttgggcctcaggcagcagcggtgcactggtctcagggctctggaaaaagcacggggcctctgtcgaatgctgggccacagcctgcaagggtcccagaagtggagtgcagaggatgagcaggacaagacctccagggagcccccaagccaccctggctcccctcggagtcgatggtgatgctgagccactgaaagtggggaggaagctgctatgcatgagaggagtattggtgggggggaggtggcattctgggagggggaggctgagtcactggggccccagggcacctggcagtacctcaaccttgggcaggaggggccctggcagcatgacatactggggcaggccgggccagcagcctgttctccacagcccgaggctccgacacccacagacaactggcgggccaggaggtggggccgggagggtcaggcacaggcaggcgggcaggggtcactccctgtcaaaggcaccagcccccagattcctccctacggaggcttcaaggcttcgctttaatggctggatgccctagtcctaggactctttgtgaacggagagcatgaagtgcttctggccccccatttctgggggctctgcctgctagagagggaagctgcacagcacctgttgctgacccgccctcgccccttgtgtcgggtggaggagcagctgggcagagaacagagagagctggggcactgctgacaaacggggctcccaagccccccaagcctgaacctgaagcccagaccctggactccaccgcagagaagcttacgtcagtttctcggtggcagcgaatttactgccagagtcttgtggcatgagatccgcgcaggcctggggccctggccgggaacccctcactccccaaacgtcccaagcccaacccaggggcactcccacgcggagcccgcggccgacacgggcggagggcgcccttggcagtgcctggggtcgggctggctcccccgccccccggaatgtccctccagcgcctcgcaaccccccagcccagcccagcccagcccaggcccaccggggaacaaagcggcgggagaagccgggcgggccaagcgcccgaggtataaacgcggaggatggaaaaaggggcgcgaggaggacggaaggagcggggagatggaggtgcccgccgaccccgcaagaaaagttagtttgcgcccgcccccaggggcgctgacccccagcgcgggccccgcagcctcacctctcccggccgcccgccggggtccggctggccctgctcggtccctggcactcaggacggtggctcccactcccccctgcccccctttctccttctccttttccaaggccggctcggcgcctcccgcaggaaatcccgcccctcccccctccctcccgccggatcgggaacggagggaccgtcccggccgcgcagtcaggctgtcagtcagcaccggcggctccgcccccatccgcgccagatcccgccccaactcgtgcccgcccggaccgggggcgctgaccggatcagcgcatgcgcccaggtgaaacggaggggcggggggcgcgggggcagaggtgacctggggctctggacttagacccaagggctagacaccccgggtctgactggtgggagagaagacgtaatgtgaagggggttggcaaccaagacgcgggaccccacttgcagtaccccccgtctgcggccggcgtcgcccacccgcagccgccggccgggcaatggcaccacctagcggacggcaccagtgcggggaccccagcctcgaggaggcgctcgtgccgggcggaggtggcgcttcagcaccgtcgtgggccggacagcgcctcccgcccccggccctcgaaacctggcttcggagcccagccgtagggaccggacggaagacaccgaaggaatggcgaacctccccggaccgctcctgacagttcccgggtggccttcggcctgcaaagtcggaatttgcacaccctccgctcgtccttccctgagcccttctgccctccttgcccagcccgggcggtggggactaagcagcgcgaggctgcagaggggcggtcacaagtgtgaccattcgcactgcactccagacgccggctcctcaggctttactggagagaagccccgaggagggctaggggcaaaagaggggccttctgcatctccagcaacctgcgggctgagctcccagacccggcgtcggggtgcgcttccgggcgggcgctaggaccggggacaatcaggagggcgcagagcgggctggggcggtgcagggggcggggctgccgcggcattgcggatcggcgggcactagggcagcgcggagctccggcggtgggcggggcgtggcggcgcgcgcagcggcaggcggcggcgggatggagcccgagcccgagcccgcggccgtggaggttcccgcggggcgcgtgctcaggtgcggcgcggcccggccggagtgggtgtcgggggcgcggggccagcgcgggtagggaaaccggcgcccgggacccggccaggcggcccccgatgcgcggcgctgaccccgcgtccccttctcccccagcgcccgggagctcttcgccgcccgctcgcggtcgcagaagctgccccagcgctcgcatggccccaaggactttctgcccgacggctcggcagctcaggccgagcggctgcgccggtgccgggaagagctctggcagctgctggcagagcagcgcgtggagcgcctgtgagaggggcgggcccaggggtaagggaagcgggggcgaggcgggccgcggggtctccggaatggactgacgcagacccctccccactcctcgccaggggcagcttggtggctgccgagtggaggccagaagagggcttcgtggagttgaagtctcccgcggtgagcggcgggctcggggaccggggaccgccctccctgccctccctgccctccctcccttgtgacacttgctctgggccccacacagggcaaattctggcagaccatgggcttctcagagcagggccggcagcgccttcacccggaagaggccttgtatcttctggagtgtgtaagtggggcccgggaggtggggaaggagttgggaccaaagaacgggaaggacacgttttatcggagaaaaagcacacacaacccggtctttagagaactgataaccaaacttctaaagcaggaggtggtacgttgcagggagcagggattccagtccacattagtgatgctgccccactttcctggttggccacattcttgatgcgctgctgagagggggagggggaggtatcagagctgggaagttgccccattcctctgtggcactgtagtgagggctcataagctgagctgttggccccacttccagggctccatccacctcttccaccaagacc

SEQ ID NO: 1243785 - DNA, 4001 bp, Homo sapiens
aggtgccaccggtttcaatacaagtgcttttcaatcacaccactttcatataaaagtctataaggcacctagggaggaacaccggcattaatttccccattgtattcctgaatctattccaaagccttggacctttcacaatctttccaaactgctgatgtgactcttaacacaattgaggaggctactttaccctgggctaggggttctagtatataactgattatagctgaactttttgtaaattccacctcaattgcgttaaaccaacacgtctaaatgtaacaccaatttatgaaaaaccctcatttgaaactttgaaaaagaggtaaaatatggccaggcgcagtggctcacgcctataatcccagcactttgggaggccgacgcgggaggatcacgaggtcaggagttcgagaccagcgtgaccagtacggtgaaaccccgtctctactaaaaatacaaaaattagccgggcgtggtggcgtgtgcctgtaatcccagctagtcgggaggctgaggcaagagaatcgcatgaatccgggaggtggaggttgcagtgagccaagatcgcaccactgcactccagcctgggcaacagaggaagactcttctcaaaaaaaaaaaaaaaaagaggtaaaatatagctcactctattcaaattttccaacaaggaaaagctggctaaaaacagaagggcccacgaaacaaatattacctcacaatctcacataattttcctatgtctcccaatttctcgcacctcacacgatctcacaatctctcactacctcacgccgttcctcaactattaactcatctacatatttttacaatttcatcacctttgtgagaccagttacgatcccacacaaaaacgtacggaactaattttgaatcaaagcaagaactgcacttggacttttttaactccccaaaggaatcatggagtgaaggtagtaggaaacctggaaaactgaaaaaagcgtattccatcctttcttcgcacattattcttacagcctccccactgtaaggacccatcaggatgcaagggcggcctgctttccccttttttcttacataccttatagaaatattctcgggatctccgccctacttatcctaacagctcctccccttccagagtcaggcccagcaaacgcctgcccctccccctccgtgtcccctttcccaatttattccacacatctcctcctccaatcagcacaccttgtgcggccctgggccctcttccaattcactcgacgttactcctccgtagtcctgcaaagccaggttcctctggcagtcccagccggacccggcgtcttccgaatacagttacaaacctcgggttgtgcggtcgtatgcgcctcctcacgcctatccaagcctcaagcctgtccccttccgccctatcccgcagccgcccagccaagcaacattgttccagaccacccgggccccgaagagcggcccccaagtgctcggcccacccccaagcactcagtctctggctcaggattcgcgccccgccctctccatccttcacgcagctggcaccgacgcctcagcgacaggcgaagagctcagcgcgggaagcggagaagcaggacgctggacccgggcgcgctccccgctcctaacctccgcctcgaaagcgcgttccctcacgcagggctcccgccgccgccgccgccgcgccccctcccccagctctcccgcctccagcgggctcctcacctcagagcagcgcccaagagcccgagaggaatcggtgctgcgctgctggcgcgtcgcgtcgggtcgcctgggggagtggcgcccaggaaggcagcaagccgggtggccgcagtggcgtccctcactgaagcggcgtaccgcaggccccggccaacggccctcccctcagccgaacaaaagagcctcgcagtctgcgctgcccgccgctcgcaccgcgcaggcgcaacgacccgccgcacggcaccatgggcctcgggggtctgtccaagactacaaggcccgaagcgccgcgcgccgcgcacgcacagtaggcgagggtggtagggacttatagtttttaaactgtaacggtggagagattgcagcgtagagcgttgtaacctagaatattagaacatatgggccaggggcagtcgctcacgcctgtcatcccagcactttgggaggccgaggcgggtggatcacctgaggtcaggggttcgagaccagtcttaccaacaaggtgaaaccctgtctctactaaaaatgcaaaaattagccgagcgtggtggcaggtgcctgtagtcccagctactcaggaggctgagacaagaattgcttgaacttgggaggcggagcttgcagtgagccgagatccagccactgcgatccagcctgggcgatggagcgagactccatctcaaaaaaaaaaaaaaaaaaaaattagaacatatgatttttataagcgagccccctgatgcttggcccccaaaaaatcaaccacttctggacagttctgtaattcacatcctcaaaatttttgaatcttagattcttcaccagaactttatcatatcgccgctgcctcaaatttccaatgatttcttagtcctcaatctctgcctcctcaaatctctgtaaaattcctactcacgccggcacggtggctcaagcctataatcccaacacttggggaggcggaggtgggtggatcacttgaggtcagggtttcaagaccagcctggccaacatggtgaaaccccatctctactaaaatacaaaaattagctgggcgtcgtggcgggcgcctgtagtgccagctactcgggaggctgagggaggagaatcgcttgaacccaggaggtggaggttacagtgagccgagatcgcgccattgcactccagcctgggcaacaagagcgaaacttcgtctaaaaaaaaaaatactgttcagtgttaagattacttcccctttgaggtcttccctgattccctagagtaggttaggtccccccataggcctctcatagcttcctgaatttcccccttttcactggctgcgccacaaaaatgtcctctttttcattgtaagttgtgctcacctttttcagtgtcattaatctccgtcagcacctttcacccaatcatcccaaggaaacacacaattaggaaaaaaacatgtttttaagccacaatataactaaagttttatttttttattttaaagtatccttctaatcaggaggaagagggaaactctattgcactctaccccaaaaggcaagagtttgcatttataagacagttttgctgatgcaggcactgttcagggcaggagtttgcatttataagacagttttgctgatgcaggcactgttcacggctctggagaactgtcatgtaagaaaaacccagcccagcaatatcataatagagtttagttaaaagggcttcaagaaagcacagagaagatgagaggtgaagccagctggacttcctgggtcgagtggggacttggagaacttttctgtcttacaagaggattgtgaaatgcaccaatcagcgctctatacctagcaaggggattgtaaaatataccaatcagcactctgtaaaaacacaccaatcagccctctgtagctagcaagaggattgtaaaatgcaccaatcagcactctgcaaaatgcaccaatcagcgctctgtaaaatgcaggaatctaaaagtagccaatcacagggaggattgaaaaaagggcactctgataggacagaaatagcaaatgggcagggacaaacaagggtgtaaaagctggccccctgccccccacccattcctgttagcccgcagcagcaacctgctcaggtcggtttccacgctatggaagccttgttctttcgcgttctttcgctcttcacaacaaatcttgctgctgctcactctttgggtccctgccagctttaagagctgtttttaacaccatgaaggtccgcggctt

SEQ ID NO: 1243786 - DNA, 4001 bp, Homo sapiens
ttcaagcgattctcctgcctcagcctcccgagtagctgggactacaggcatgcgccactaggcccagctaattttgtatttttagtagagacagggtttcaccatgttggttggccaggatggtctcgatctcttgacctcatgatccgcccacctcagactcccaaagtgctgggatgacaggcttgagccactgcgcccgaccctactatttatttttttaatgagaaacaatttaggatacagcagccattgaagaaaaatatcaccacagggaaaaccgtaaacgacttcaggtcctccactcccgtgaagcttcattaaggtgccaccggtttcaatacaagtgcttttcaatcacaccactttcatataaaagtctataaggcacctagggaggaacaccggcattaatttccccattgtattcctgaatctattccaaagccttggacctttcacaatctttccaaactgctgatgtgactcttaacacaattgaggaggctactttaccctgggctaggggttctagtatataactgattatagctgaactttttgtaaattccacctcaattgcgttaaaccaacacgtctaaatgtaacaccaatttatgaaaaaccctcatttgaaactttgaaaaagaggtaaaatatggccaggcgcagtggctcacgcctataatcccagcactttgggaggccgacgcgggaggatcacgaggtcaggagttcgagaccagcgtgaccagtacggtgaaaccccgtctctactaaaaatacaaaaattagccgggcgtggtggcgtgtgcctgtaatcccagctagtcgggaggctgaggcaagagaatcgcatgaatccgggaggtggaggttgcagtgagccaagatcgcaccactgcactccagcctgggcaacagaggaagactcttctcaaaaaaaaaaaaaaaaagaggtaaaatatagctcactctattcaaattttccaacaaggaaaagctggctaaaaacagaagggcccacgaaacaaatattacctcacaatctcacataattttcctatgtctcccaatttctcgcacctcacacgatctcacaatctctcactacctcacgccgttcctcaactattaactcatctacatatttttacaatttcatcacctttgtgagaccagttacgatcccacacaaaaacgtacggaactaattttgaatcaaagcaagaactgcacttggacttttttaactccccaaaggaatcatggagtgaaggtagtaggaaacctggaaaactgaaaaaagcgtattccatcctttcttcgcacattattcttacagcctccccactgtaaggacccatcaggatgcaagggcggcctgctttccccttttttcttacataccttatagaaatattctcgggatctccgccctacttatcctaacagctcctccccttccagagtcaggcccagcaaacgcctgcccctccccctccgtgtcccctttcccaatttattccacacatctcctcctccaatcagcacaccttgtgcggccctgggccctcttccaattcactcgacgttactcctccgtagtcctgcaaagccaggttcctctggcagtcccagccggacccggcgtcttccgaatacagttacaaacctcgggttgtgcggtcgtatgcgcctcctcacgcctatccaagcctcaagcctgtccccttccgccctatcccgcagccgcccagccaagcaacattgttccagaccacccgggccccgaagagcggcccccaagtgctcggcccacccccaagcactcagtctctggctcaggattcgcgccccgccctctccatccttcacgcagctggcaccgacgcctcagcgacaggcgaagagctcagcgcgggaagcggagaagcaggacgctggacccgggcgcgctccccgctcctaacctccgcctcgaaagcgcgttccctcacgcagggctcccgccgccgccgccgccgcgccccctcccccagctctcccgcctccagcgggctcctcacctcagagcagcgcccaagagcccgagaggaatcggtgctgcgctgctggcgcgtcgcgtcgggtcgcctgggggagtggcgcccaggaaggcagcaagccgggtggccgcagtggcgtccctcactgaagcggcgtaccgcaggccccggccaacggccctcccctcagccgaacaaaagagcctcgcagtctgcgctgcccgccgctcgcaccgcgcaggcgcaacgacccgccgcacggcaccatgggcctcgggggtctgtccaagactacaaggcccgaagcgccgcgcgccgcgcacgcacagtaggcgagggtggtagggacttatagtttttaaactgtaacggtggagagattgcagcgtagagcgttgtaacctagaatattagaacatatgggccaggggcagtcgctcacgcctgtcatcccagcactttgggaggccgaggcgggtggatcacctgaggtcaggggttcgagaccagtcttaccaacaaggtgaaaccctgtctctactaaaaatgcaaaaattagccgagcgtggtggcaggtgcctgtagtcccagctactcaggaggctgagacaagaattgcttgaacttgggaggcggagcttgcagtgagccgagatccagccactgcgatccagcctgggcgatggagcgagactccatctcaaaaaaaaaaaaaaaaaaaaattagaacatatgatttttataagcgagccccctgatgcttggcccccaaaaaatcaaccacttctggacagttctgtaattcacatcctcaaaatttttgaatcttagattcttcaccagaactttatcatatcgccgctgcctcaaatttccaatgatttcttagtcctcaatctctgcctcctcaaatctctgtaaaattcctactcacgccggcacggtggctcaagcctataatcccaacacttggggaggcggaggtgggtggatcacttgaggtcagggtttcaagaccagcctggccaacatggtgaaaccccatctctactaaaatacaaaaattagctgggcgtcgtggcgggcgcctgtagtgccagctactcgggaggctgagggaggagaatcgcttgaacccaggaggtggaggttacagtgagccgagatcgcgccattgcactccagcctgggcaacaagagcgaaacttcgtctaaaaaaaaaaatactgttcagtgttaagattacttcccctttgaggtcttccctgattccctagagtaggttaggtccccccataggcctctcatagcttcctgaatttcccccttttcactggctgcgccacaaaaatgtcctctttttcattgtaagttgtgctcacctttttcagtgtcattaatctccgtcagcacctttcacccaatcatcccaaggaaacacacaattaggaaaaaaacatgtttttaagccacaatataactaaagttttatttttttattttaaagtatccttctaatcaggaggaagagggaaactctattgcactctaccccaaaaggcaagagtttgcatttataagacagttttgctgatgcaggcactgttcagggcaggagtttgcatttataagacagttttgctgatgcaggcactgttcacggctctggagaactgtcatgtaagaaaaacccagcccagcaatatcataatagagtttagttaaaagggcttcaagaaagcacagagaagatgagaggtgaagccagctggacttcctgggtcgagtggggacttggagaacttttctgtcttacaagaggattgtgaaatgcaccaatcagcgctctatacctagcaaggggattgtaaaatataccaatcagcactctgtaaaaacacaccaatcagccctctgtagctagcaagaggattgtaaaatgcaccaatcagc

SEQ ID NO: 1243787 - DNA, 4001 bp, Homo sapiens
agtgaaaccaccccccatcttgccattgcttgaacagtactccctggcccttcatgccaggtgggcacatccactgccctctcctcaccaccccttgcccttgaacatctcaaggaggcctatctcttaacctaaacttcctacctaaaaatagaaatgacatctagaattacagaaacaagtctggcccaatccggcctcatggtgctacttggtactgtatgctgcaggccagagcaaaataaatgtttctttcttgagagagacatcacaataggcacaactgcgtgctgtgtgttccagctccctctctgagccttcttgcctgatggcacacgcgtgcagggctggaagggcagacctgcgtcactgtggcaaacctgctctcctggttttctgttagcgccatgtgcaaattactcagcagaaaaggccaagagaagctataacatctttatctgaagcaactgaaaaagttggtttttgcaagtatggctgtcggaaacaccaaagcagcacttacttaggttcttctcagggatggatacaggctggctaggagaaggtgggagaggggctggctggggacttttacagccagccacagagatggccctggacacaatcttgctaagggacctcagaccacagccccagctccagcctcccggcaggcgagcagcgcccagcacgactccaaccagccaccgtccctcccccacaccctccccagtgctgtcagcgtcctcacttcttctggaaggccaggagcagcctcgggtccaggatgttctcctccggctcccagctgttatgtctgcaaagcagaggacagggcagcattagacgccaggctgatgatcaccgctttgcaaggcagcccgagggggctcgccctcaccgctcctcgacttgggccgatggcagtggcaccgtagcaccatggcacttctcaaagtccaaacccaggttttggaggctggccaccccccaccaagccagcactctaacctcagacccaaagggaaactgccgctccaaccccccaattaaaacaaggccacaagaggactcccacagtctctgcctgggagaaaaacaaacccccataaaacgcaaagttgcagagagggattcccccaaaccctggcccggagccagaggaggaagggaaggcaggtccagcatgcagggaggggcacaggcgcccagcccgagatccagaacaatgtggcgcgcgggccggggcacctcgaggggtagcgaagaaagagcggggtccgggaagacgcagaaacggggccgcgggagcagctgtgcagagagccccttccggggatgccaaacaccctcccttccattaaaagaaagaaaaaaaaaaagaaactctacatccatcaatagcaagctcaggttacagcggggagaatctggccaagaggaggggggcttgcatcccgcgcctccctcccggccgggacgggggttggggggagcgcggcgcggcagccgaggaggttctggcgcggggggccgcccagctctgcacccgcgggcgtgtaaacaaagggcaacctcgggccgggcggcccccgcccccctcagagccggaggagcccgcggggaccccgcgaacttcccgctctgcccgcgggcgcccccaggccaccggacggcgcggccgaggggctccacgtccccacccccgggcgagggggcgggaggggggcgcggcgtcgcgggggactcacttggaggaccagccgcgccacttgaccaggtactccagcttgccctgcggggagagaagaggggccgtgagccagacggacagcgggcggcgggcggggggcccggcgggccgcacgcaccttgcggagccgcttgctcaggatgcactcggcggcgaagacctgctcgcccacgctgctcagctcctccatgctgcccggcagccagcccgaccgcggcgcccgccgccagtcacccgcccggaccgccgcgcgccccgccggcagcacacaaagcaccgcccccgcccggcgccggcccgccccgcgcacgcgcaccgccgctccgcgcccgcgccccggcccgccgcccgcccccgcgcgctgcccaaatcccgtgcgggccaatcagcgagggggggcgggtgcggggcggggcggggcgcgcattgtccgcggcgggctgggcctcgcgctccggcggggggtcccgcgcggggccccgggcgggggcgggggcgggggtgggggcgcgggcgggcccctggctgggggaggaggtgcctagggacttcgggcctggggcgcccaccgagtcccgcgtgattcccggggcgcgcccgcccttgctcccaactccgttttccgggcaaaaagccattgttctggcccgaagggagggaagcgggacggggcgcggcggctgcttcctgcccccgccttcgaggggcgctgctccggggcacgcggggccccacccttcccccggcttcttgaactggcttttcctcggcagcgggggagtcgctctgttttggacgagagcaaaacgggtcgggggctggggaaggaaaggaagacgaagtccgggggaggggcccacaaaccccagcagccgaggctttttcccccaaaggcgagagaggaaaatgctttaacttaaaccaccaagcactctgagaaagaagtaatacgaactgcccggagttcttattaaacagctatgaaaagtggatccagcccccgagttttagggcacgtgtagggagaaaaccagctgcaccttttctgaatttgttccccgattttgatgaaatggagggggagggggcggtttgcaaggctgttcctaacttcggactaggtcagtagtggcccgccagggctgggcagccggcgtccttcggatcaattgtccgcggcagaaaagggtcaggccatgttatgaaagtgggggtgaccccttgtcctccctgtgatcgtcgtcagcaggctacccttttattccggtgttaagattcgaattccatgaagaatcaccctttaagttatttagattttgaatcaggacaagtcaaacacgtaatgaaagagacctgagccttagcttcattcgtctcaacgcagtctaactccatgaaaattcactctctgcttttcttgcttccttgaacacagctgcaaaattctctttctgttgagcagatccaaaagtcgtttcttgttgtaggagactgtctcaatgtaattgtgatcatcaaaaccatatttataaagggttctgcaggagaaatgtgtttttttgtttttacagaaaggcctactggagaaaatactgaactgtaggaaccgatctttcaatttatggcgtgttcttcagtttctttggttagataggttacattcatttgatttcctggagagtacgtgcaaattcagatgttgtttgcaaagagggcaggagaaagggaaatgtccttggggggaaggtgtttgtttactcaggggcagaggcagtaaagaatccttgtgttgggataaaactggcctctggagtgaagggatccgctaacagtgtctccgccggctccttttgtatccctgtcttgtgcagcttggcagtaaattgtggagttgagggcaaaggtgtatttattgtaatcctacaaatagctggatcagtttcacatcacgtttccttgcagaattcatcttgggtctaagattttgccctggaagtttccagtttcctctttgactcatggtatgctgggatacttgcttgatttctttttaaagaaaagaaggctttgaaaagggaatgatttctttgcttaagaaataaatttgctagaatttgatactaacacattgaaaaaaataaatcagcgtccaggaaggtttaacatgtacatcatctacccaactgcaaacagtttgggtaaaataatatttagataattcatttggagaaacaaatatgacagattt

SEQ ID NO: 1243788 - DNA, 4001 bp, Homo sapiens
gccagctccctcagagctgcaccgcgaggtgctggtgccaagcggccagtggctgcaggacagcaacacctaggctccgggggtggggctcccaggttgcaacaggaggggcccctggggaaccaggcacagccccaagttctccgggcagctgcatggccacccacacacacccttcccaaacttcccccaaaacccaagcctggccttccctggccttgccccgcccccaccccaagctgcagcaaccgccaaggacgctggttagaggagctggggccgcagcgtgcccatccaggccggttggggagggggctcccaccagccccctccacgcccctttcctattgctgcgtcgcccactttgccattcccatatacggtcacgggtggcaggcggtggctgcgtgggggacgctcacctgttctggaaggcgatcagcagcctggggtccaggatgttctcctccggttcccacgtgttatatcttgcaagggaaaagggagggggacacggtgtaaaaaaaaaaaaaaaagccacctttgccgcggcctccaggtggggagtgacataaggccctactctgtctttatgaacatttagccgtggatgtggaaggtagatttccgcaggcctgacgtagtccctgatacacagcccccccctcaaataaacacgcaagggcaggaagaaaggggaggggtaaggaaaatgaaactagcagtttattttgcagttgtcaagaattttaagcatgttactgcgacatgttccaaagccactttgctcaccaggaaccctgcgtgcaaagcagccgaaatgcaaagtcgcagtccccctcctctccccagccccgagtccccgcgagggcttcagccgttctccatttgacccctaatccgatagccaacagccaagcgtcccccccacaccccctcgtggcccaggagcccgctgtcacgggcgagcaaaccccaaatactcagcaacacaaaaatatgcctccgtgtgtgtgtgtgagtgtgcgtgtgcctgcgcgtctatctccatccggtgccttcgcatttcaaattaaagaaaaaaaattctccaccaaaagcgccgcagtgacagttcccaacattttctgcctttcttcttcccctccctgcaccactaggagggagaaggcacacaattgcattttcgtcgctttttaattttttttttttggttttgcaatatggagccgttcggtggagggaaaggggaaaggagccattttctgctgcacatcagtcagtgcctgcgccctccctccctccgccggcctccccggctcggccccgcgtctctccagctcctccggctccttttagtgcataaattagtgatggcatttcccggagagcggagcacaacacagggcgccgggctcgggctcggcggctcggcttccccagtgcctgccaccgacttccccaccccctcctccctccaccccacctccaccccgcctcccgtccgctccccccacccccccagcagctcggcgggtccgcggccccgagccccgcgcctcggcccccgggcccccgccctccgccgcgacttacttgggcgaccagcctctccatttcaccagatactccactctgccctggggggaagagacagcactccatcagcttccgcgggatccccggcccggcccgcagcctccccaccccctccccgcctcctcgcgggccgctccggccgccgctcgccgcccccgcgccgccctaccttgcggatccgcttcttctcgatgctctccaccgcgaagacgtgctcgccaacagctggcagctccatggccgagccggagcgcgccggggcgctggcggccggcgcggctgcagacgctgctagctcccgccggcgcccagctgccgccccggccgaagcgcccccgccgccgccgccgctcgccccgcacagcccggccggcccgccgctgcccgcgcccgccccggctcccggctcgcgctcgctcagacaactgagcccgggccgcggctgcacaagaactcatgcaaatcccggacgtcagcgggcggggcctcgccgggcccagctcggcgtcagggggcgggccgcggcgcggattggcgcagccgggcctaccggaggccccgggcctgggcggcggggggaggaggaaagggcgcgggtgggggacgcggaggggagggcgccggggaggtgcagggggagggatcggcgagcctgggagagggaggctgcagagagggagcgggaccgggaaggagaggtgtgtccgccggggcggaggcgggcggagagcttgacagcccggaagggtctcggcggcgacccctcgcccacatcccggtgcccgggcctccccctcgcggcacgttctcagtgttcacggccccgggacccctgctgggggccacggaagcatccgccgccgctcccagttgcaccgaattgcgtcaccagcgccccgggacgcgcgggccccgccggcagggggcggaatggggcaggggcagctcgcgccccactgcgggccccgcctcgcctccaggctccgggcattttggagcgcgaggagggaaagggacagggcggagagaaggccgaggactgggtgccaaggagagattgaagaacgcacgaggaaggggaccgaggagcagccaatcccggggccctggcgcccaagaacctcggcagaaagggctccaaatccgatcccaccccgatcctcaatggctccgaatttacacttggtcctcttattgacggggcgagatgtcctgtttctagcagcctccagagccaagctaggcgagaggcgtaggaggcagagagagcgggcgcgggaggccagggtccgcctgggggcctgaggggacttcgtggggtcccgggagtggcctagaaacagggagctgggagggccgggaagagcttgaggctgagcgggggacgaacgggcagcgcaaaggggagatgaacggaatggccgaggagccacgcattcgccttgtgtccgcggacccttgttcccgacaggcgaccaagccaaggccctccggactgacgcggcctgagcagcagcgagtgtgaagtttggcacctccggcggcgagacggcgcgttctggcgcgcggctcctgcgtccggctggtggagctgctgcgccctatgcggcctgccgagggcgccgccgagggcccgcgagctccgtggggtcggggtggggggacccgggagcggacagcgcggcccgaggggcaggggcaggggcgcgcctggcctggggtgtgtctgggccccggctccgggctcttgaaggaccgcgagcaggaggcttgcgcaatcccttggctgagcgtccacggagaaagaaaaagagcaaaagcagagcgagagtggagcgagggatgggggcgggcaaagagccatccgggtctccaccaccgccctgacacgcgacccggctgtctgttggggaccgcacgggggctcgggcgagcaggggagggaggagcctgcgcggggctcgtgttcgcccaggaatcccggagaagctcgaagacggtctggtgttgaacgcacacgtggactccatttcattaccaccttgcagctcttgcgccacggaggctgctgctgcccggcggctgctacccaccgagacccacgtggcccctccccaggggtgtaggggtgacggttgtcttctggtgacagcagaggtgttgggtttgcgactgatctctaacgagcttgaggcgcaaacctaggattccctgagtgttggggtgcggcgggggggcaagcaaggtgggacgacgcctgcctggtttccctgactagttgcggggggtgggggccggctctcaggggccaccagaagctgggtgggtgtacaggaaaatatttttctcctgccgtgtttggctttttcctggcatttttgcccagggcgaagaactgtcgc

SEQ ID NO: 1243789 - DNA, 4001 bp, Homo sapiens
tcctgcccttgaggtactctccgaggccggcgctgggttcgcctaagggcctctgtgaggggtccgggagctccttccggggcttggggcctcgcttcttcgagctgtcccccggtgagctgggcttgtcatccactctgctggtaccccgctctcgttccctctcacgttcccgctccctctctcgctccctctccctttctcgatcccgctcccggtccctatcccggtctcggtcccggtcccgaggggcctctgcgcggcaggtgctgctggtgctggtgctgctcgctggcggggacaaacccatgtttcgaaggccctcccgggcccgggaagtggaggccaggtcctggggcgagcggccagggtaggggatccggatgcccctggctgagtcacttcgaaactcgtaagttttggcctttgccttggcctgcgcctgcaggagagaagatggtctcaagagtggggcagggccctgtccacccccacaggactcctcctctatccctgacctcctatctttaccctatgatgcctgggaatttctacatggatgcatggatgggtgggtgggtgggtgggtggatggctggatgaatgggtgggatggctgttggagctgagaggtagaaggatgagagaagaggtagaagatttggctggaagtagtcatttgcaaaaagtacactttttgcatttgattattgtgtccatttgggagggggagcgtaaaggaattctagtgtggccaagcccgtccccccagacacagttggtgctgctactgacttggtgacatcttgtcagggaactccctcctacattacaaataggcaacatgtgtggacaccccattggctcacagccctcagagcccccttcccacaaatcactccataacatggtcctccaccattggacactgccaacctactttgaggaggaaggttttgggcttgggtccacgctttttggggccatagagctccatctctctttccctggagaaagaagaaaaggagaaagggtgcgtgagtaaagaaagcaagtgggactctagtccaggctggaaagaagccactctacttgtttctaagtgagcggctgggacttggaagggtctgtacctttcctcaaaggctgcgagcaagcgagcatccaggatgttttcctccggttcccatgtgctgtacctaaagggaatcaggaagaagtgggcatcagtcccaggagcagggtgagagcagagggggtgtgtgtgtgtgtaacttttctcattgcattgtattgtatttcaatgtaaaggcaaaaagaggaagaaagaaacctcccgaataacagtctggggttgagaattgcatataacctacttacttctgcgaccatcccttccatttcacgaggtattccatgcgtccctgcgggtgcaaaggcgataatgtgtgtgcatggggagaaacgcatgacgaggatacaagaaatgcatgcgaaaatgcatgcaccagatgaatgctcgaaaccccgccgcaaaaggcacgcgcccgctgcatcacccctgcacctaatgctgcacaaagtgcatgcaccggcattcattccccaccccgccccccacccatgcaatccgtgcatcgctgcaagtctaaggaaagcgcctgggctcagagctgccgccgccgccgccgccacggccgcggccgctgctgggacctgggggaagggaagctgggctgcagcagggggagggaacccgggccgggaggggagggcccggccgcacggaggccctaggcccgggggcacctactttccgtatgcgccgcttcaggagggcttcggccgcgaacacccgctcccccaccgctgaaagctccatgttgactcgccgcttccccccttggccgcttccaggagcagaaaagcagcagccagcgcacgacagaccataatactctcccgctgacgtcagttctcctccccctcccggcgctctcgctccctcccgcggcccccctcccgcgctcctccgctcggccccctcccctccgcccagtgcttcctcccgccccacgtgttgctaacgacgttgctaaagccgagcggccggaggcctgcgcccccgcacgctgattggacgagctccgagccacgcccctctgcctttctcccccgcgttgctacgtgaccagcgttccaatcgccagggggcggagtccgaggcgactccagagaccgagcgcgcgagtgggagggggcgccgccggaagtgacgccaggggaaggcgggcccggccgctgtcagtctgcggggctggcgaggggggcaggccgccctctgtcctcgccggggcccccctcccccgccaccaagttgtccctccggcgttcggcgtcccccacagctctcgctgggatccccgcggcgatgtcagcccggctccgcccctcggcagaccccggcccgccgccccacccccaccgcccaggactcgcgcggtcccctcccccagccgcccgcgccgcacaatgcacaatgcacaggtgctggggcgccgcgggccgcgcccgaaccccgagagcctgcggcgcgcccatcggctggcttctcccccggcccccgcccccctcccccggagccgcacacccgacccccggtctccatggcaacgtcccccccccccccaagccgggtcccgctaacaaatcaatgtgcatgtgtctcaggctcctgtcgcgcggccctgccctcggccaccctccgggccctgcgagccgggctggctggagcgctcgtccccggctccgaagccgaacacagacctggtggaggccgggctgttccctccggagcccggctgcagcccaggaccccacagaggatgtcgcgcggcttcttcctgccccccgaccatccccgacgcccgcagccacctgcccctgcccttagcccaagctgcccgcccccgccaggcttcggccccgaacctcgccttcccctcgccgccccctgctcggggcctgggtgggctaagggcatctgggcggagccggcagaggatggggcgagcggctgggggtgcgtctggctttccccgaaccccggcgcccggcccgcgcacttcctgtccaccgctcttcccaacgtgggcggcggacatcctgcgagaaacgccagcgcgggaagctgggggacgtcgccgggtccagtgcgggctgggcgagagggtctcacgcgcgaagatggcgggctcctggaaagggacaagggccggccgcgaccgccttgccgtgcgcacacaagcacgtgcaccgccgaccctgccgccagctaggctaccggtgacccgtggcgggggcggcgctggggacagcagcctcactctgggcccagctccctcccaccctgttctcttattgctcaagctccaaatcacaactcccactccttggaacccacgatttagttcaaacatcgatgatcagcctgactgcaagcagtttcccttggccagagatggggtggagaaagagggggggaaaagagagaggcagagagagaacgataggaagagagagagaagcagccaaggagtctgacacggaggggcaggaagcccagagcggaaaactggcctcctgtccaaagtgaggcgcgcgcaggcggcggcagccgcgaggtcctcgacccgccgggcaagcggggcgcttcgcccatcttccctcccagtcgtgccccagcctctggaaacacgggtttcaggttttggccttgttcctaaacttcacaaggtggccgcttgtcgaacagtcccatctctccggccgttctgtctgaacgaacagcgcgtcgaggacgctcagatctcccagtgaccctcgcgggccgcccgtgggaggccgccgacggccgcgtccttaatcataaaaagtcattcccggtaacaaatagtttcgtcggccggtgccagcgatacagctgtttctgtttaagctta

SEQ ID NO: 1243790 - DNA, 4001 bp, Homo sapiens
caggattgaagctttagggcagagaatcctgctggactaaaggggcagggcctcacctaccggggagatttcagtggccacatcctggaaggtccttccctgaatagtgtgacagttccagggcacagttctctttcctcccatcttatccttccgctccagtggcttcagatgtgatgcaaggacaatacccctgtaggcaaaggacagaaattaggcaatggacttaatgctgtgtctgtgggtgtgaggcagctagactttgcatggtataggataaacctgttacggaccaatatgaccataataataacaacagcgatagctgactgctttcaagcacctcacatgtgtcagacacttgctcagtcttatgtgcaagaactcatttaattataacagttactgttctacagataaataattgagactcagagaagttaaggaaattgcataagatcaaacagtagacggtggggccaggactgaagcccagaatggtttgatttcagagttaactactataatccaccataacaggagggcctgagaaaaatggcagtgagccaacctgaactcctcataggaagccaccctctgttccactgcccgtaacttggcagcattctcccgtttgtacttctcatcagcagtgagtgcagcctgcagctctttctccaaagccttgaagttgatgatgtcattcctttccatggcctgtgcctgggaaggcaaagggaatacatgtcagtggacagtcaatatcaggggaaagagggtacctctgaattattcaccagaacacaaaatgaccccaaagcactctggacatcatgtcactcagattgggaggtgttacaaaaatctggttttctattttacaaagacaagttgaatttcacagtgaggacttacacaagacttgtccctgaaaatagaatacagagtcctgactttcaatttggagttctgtcttaattttgctctttgcctctaaaaatatttttaattttggtgcttcagtcgaggaggcattgggatctcagaattcagtttcttcactcttcccccataggattgttctacagcaagtcgtttcgacaggggacctcacacaaaggcagaactcttgttagttacccttgagctcggggataaagtttcattcttcattgaatgtctttaatgaggaaggagactttcacccaaaccagatgcaatgactgagcaggaaatcaagtagaaggggcaaaggaaggagctcaatgaccccatccccaaatccctctgtccagcccagggctggaacagaggtccctaggtacctgggcaatgcctttagttctatcactgtacttctgtagtttctgcatatctgaggctgactgatcatttctacagagatattcttttctttttttttttttctggctctgttgcccaggctggagtgcagtggcgcgatcttggctcattgcaacctctgcctccggggttcaagcaattttcgatcctgacctcaagtaatccgcgcgcctcggcctcccaaagtgctgggattacaggcgtgagccactgcagagagattctctacgtgggttctagtcgtggctctggcatttacttgtgggacctctctgaactgcaaactcctagtgagttgagctagattttgtggcggggtcatcaccaacagccctagcgcaaggaagcaggaagtccccaaccaatcccatagccaccctaccccaacgtagggaatctgaacgccaagaaggggctggggtggccagtaaccgaaatcaggtgtccagttctcagccctccccaggcatttaatacatagaactaacccttccgtccccttactcagcctcccggaccttcaccccagcagtcccggccttggtccccttgctttctttggggatcccctgataaaccagaacaggagggcaaccccgcgcagaccacgcccgcagctgtggttgcctagcaactgcgctaacagcctgaccacgtgatctgcccgaaggcccctccccccattttcagggtggtcccgaggcgcctgatcagattcgttcatcctcagctctcaccctctttggagcagcccacgtcttgggctactcgtcttggggacccgctactccgccttgccagtccgcggcgggcatacctcggaactggtcctcaggcagagggttgtcctcccgggcagaaaggcgacagcggcgtctgcggggtccttcctggcggcgggcgcaggcgtttcctcggcgtggggcggaagcacgatctccggcagcggcctgggaactcttagctgagcaggcgagaggtaagttgaagcgggtcagcggcacggaagggttgctccaggtgggataggaaattaaaaagcgtcagatctggaaggggccttatatgctattggcccctttcgctttacggatcggtaaattgaggcctggagcgggaaaaagaatggaagaccctgtcgtcctcgtgccttcccaaggcttccgaagcgcgcacacacgcacacacctcgatttcggggctgcctctatagcctcagtccgtaaaatcgtatcgctaggtaggagtggtgctctaactgtccagtcccctcgctcacttcctcttctatccgtgccgctttcagccgttctttgccaagttccctccgaagtcctctgagctcctgcattgtagcgggaagcggcagtgaggtttgttaccatgagtcgctagttttgtgtaactgtgggcaaatcagctatattctgtgtaccttgttagagtcattcattagttcagtaaatacttattgagggcttagtctatgctaggcacagtactaagtgaacaaagtctttgcttcaattgtagttggggaaatgaacagtaaacaactagatacaagtcagctagtgataaatgtataacatttgtgaatagcaataaaacagtgaaagtgggaagttggagagtatgtatgggggactttttagagtgacagagaagatgacattttagtggagacttgattgaaataaaggaacaaggtgaaaaatatcaaaggggagagcgttttggacaaagagaaaggcaagtgcagtggccctgaggcagaaatgagcttggcttgttccatgaacagctttctataacagtttcttcaatcggccgggcgcggtggctcacgcctgtaatcccagcactttgggagaaagacgcgggcggatcacctgaggtcaggagttcgagaccagcctggccaacatggtgaaaacccatctctactaagaatacaaaaaaattagccaggcgtagtggtgcactcctgtagtcccaactactcgggaggctgaggcaggagaatcgcttgaaaccaggaggcggaggttgcagtgaactgagatcgtgccgttgtactccagcctgggcaacaagagcaaaactctgtctcaaaaaatatatataaaataaataaataatttcttcaatcccttgactggggtcttgggagaatgagataagcataaatgcgatagtagctttttagaagtaaaaagaatatgcatgtgaaagtttccataataatttacatttaattattggtccttggagctccaattctctctctacattcagcacccagcaggtggcattgagggagttggaggtatcagtctaatccaagaaatatcagcatcttaaaattaaacatcccattcagttaacatttatccagttcctacttatgcaaggtgctgtcttggctattggctgtgttagcattggtacttttttctcaattatttaaaaatgtaaaatgtggccgggtgcggtggctcacacctgtaatctcagcactttgggaggccgaggtgggctaatcacctgaggtcaagagttcgagactgcctggccaacatggttgaaaccccgtctctactaaaaatacaaaaattagccaagtgtgatggcgg

SEQ ID NO: 1243791 - DNA, 4001 bp, Homo sapiens
aagactccatctcaataaataaataaataaacaaacaaacaaaggtgccaattcaatgcagcacggttcagaacgtgccatgtgctacccaggccagtgcgcctcctccctgcaccttcctcacctctatctcactatccctttggcagccatataacccccaacaagaagcctacagtttatacacaaattataaaacagctttgctgtaaaaccagtgccacgtttgggaagagaaatgtgtctataagcaaaatatacacacagtggactccgtttcccaacatgcccagagtgttacctctgggttgcagcggtggacatgtggacaccctacccagacttgggggaggaaggcaagacttctcagaggggcctgatggaatttcctccttcagctcctgactccacccacttctctctaccattgcttcagcactcttgtcccaagaatcatggcttctccctggcagtagccccgccagttgccaggtccactctccctcactccatcatcgctcggtgaccctttttttgcttagagtaaacatgaattggccgtgccctgctaaaaactctgatgaatcttcgctacttttggggagaaaaaaacgccgctccttagcatggatcctgaggccccataacgggtcctccccgcccaccccacagcctccttccaagcctcgtctggaaccacagcgccaccagctgccagccactgctttagctttggccacgctcccccaccttctgagcaccgggtcttggcatatttcctctgcctgaaacgttctgaagtatttgggcgattgggcgggttgagacacacaaagcttcactgccgcccagtatgggcctgcacacacctgctttcttcctcttcttgttactgatcgggtttttcatctcttggcggctcctcataatctcccggagccggaaaggaatctcctgttcgtcctggttcttgggcttgcagttcactttcttcttctctttgctgggagaaagaacacgggggtgagacccgtcccaagtaaagcacaagcagaatcagtaagagaaacaatagttgggtctggcaatagaatctacacgggctggccgggcttggtggctcacgcctgtaatccctgcactttgggaggccgagatgggcggatcacgaggtcaggagatcgagaccatcctgactaacacagtgaaaccccgtctctactaaaaatacaaaaaatttgccgggcgtggtggcgggcgcctgtagtcccagctactcgggaggctgaggcaggagaatggcgtgaacccgggaggcggagcttgcagtgagccgagatcgcgccactgcactccacactccagcctgggcgacagagtgagactccgtctcaaaaaaaaaaaaaaaaaaagaatctatctatacaggggccacatctggcttctgtggtgcgagccggtccagcagtccagggagcagggatctttcctctcggtctcactcagtggctgtccctgaaccccttcctcacgggacgcgaggccgaaaggcactccgaaagcccaggaggcctttccgccctgacctcgtccagaaccacaaagacgggacactgggacgcgggaaaggcaaaaccaaggactcgctcgcgcctccattcattcaaccgatcctggcggagcgtgggccgcgggcacagacagaggagggcactgagcccgacctggggaaggggtccgagcgaacgctccctagggggtcccgggcggagccttcaaggcgtccccttctctggggaagtgtggcggcctcgcggggcagcgcagtcacctgcgaagcccgggccacggggctgggcgctgcttccccagcggctgcacttgctgccgcccccgcgctcgccggggactcccaggacccgcctgcaccctggacaccgctgctccgcgaccagctcccgccatctccacgccgggaggctccctagcgaagccacttccgccttcctgcatggttccgccccaccgatcggcacttccgcttcctgcgctcagcctcacgctggctggagcggcgcgacttcctgaaggtccgggattggccggagcgcccgccgctcacggtcaggggttgccggatcccgtccgcgggcgatgctgctgcggagggtggtcgagggaggccgggcggtagccgccgcggtccgtggctcggcaagtaccaggacgggtcttggcagcgccgaagggcacgtccgagaggccgctgtccgggggcccgcacgtaccgggaggagccccggcccctccacccgcatgtggggacggagccgggaggatcgcgcgctggccgccgccgaaggacccctcgctcctctcctccatcggctcttaccgagtccccgccccggaatctgtggaggggccgcttagccttgggagaggaagcagcccggtgaacggccactttcctgtttctcagtatctgccgagcgcctgtgtgcgagccctcctgggctctggggactggccgtggacatggagcggatgatgcccctcgcaggactagttaaataagtgaagttggtagcgtgtcagtccgtgatcctgggtagatagagcagggcagcgacggaagactgcctataggacattcacgctgggatgagaggggcctgagaggcctgggctttgtgacagggaaacttggataaagggtggtgcgattcttccggttggtccctcagaggtggtggggcttggttatactggtagaggtgctgggctggccaggagcttacagggttacacctctcgcatactggtgtccacagagcagccatcttagctggaggtgtcgagtgcctcccccaccccccaccatgtgcttgagtgcacacccggcgccaggccctgatcctggcacttcttgtgaatcacaccgtgtcatacccatgacttccattgcacagtggggaaactgagtctagagaggtgaaataacatgtctaaagtcacaggaagtgaaaaagctgaggacatggagccagttgcccaatgacaggagagctgaaatgtcctcactgctgggggtagaccgggcctcaccagcttcctggagagtcacatgtttgtctgcatcctcagggggctcgccggttctccagcccggactgctgccagaggcttcctggaggtggcagctttcttcaaaggcaccatcccggagcgcaagcccctgatgggcgcagaaaattcgggacagaccacgtagaggtgggctcccaagcaggtgcggacggcaccaggccgcccaaggcatcgctgccacctgagctccagccgcccacaaactgctgcatgagtggctgccccaactgcgtgtgggtggagtacgcggacaggctgctgcagcacttccaggacggtggggagcgggccctggctgccctggaggagcacgtggctgatgagaacctcaaggccttcctcaggatggagatccggctgcacaccaggtgcggaggctgagccatccctgctggactccctaccgcaggacggagtccaggacgcagccgcagcctccttccttcacaccccctcacagactccttgtgtccaacgggaataggaagaattagttactgacttcacctgagaaaaaaataaattctctatggtggtttcacaggaggtttttgttttgggggtggtttttttggcagtatgtctgccaaccagaatggctgctgatttggcctcaacaggaggcttttgtgtggttgtccgtaaggcttgtgttgcatcttcaaagcgagcaggtccaggtcggcattatgcacctccggagctcttgcagccatcaccctgccatgagggtaaaataagacccccagccgagtgtggtgaaaataagacccccagccgggtgtggtggctcacacctgtaatcccagcactttgggaggctgaggcgggcagatcatgaggtcaggaga

SEQ ID NO: 1243792 - DNA, 4001 bp, Homo sapiens
aacactgtccactattactgagctcatcaatcacgccaaggggagaaagctaatagatgtcaagacctagcttggactactgttccatacagactcaaactctgaatcggcagatctttgttagaaggatgctcaatccccatgttcatctccaactgacatggaaaacaaaatgctacttttctttttcagttccatgaaagacatgcaagttgacattctctcatttctgagatacatactgacaatatatttgcacacaacatcccacgtgttactcagctccattgatcaccttactgcatatttttgtagtgaaaaatcacaattttaatattaggtgatacccagtttgctttgactcacactgtctttggaactagtcagcaaatagtcaaatgaacttctagtgactgcgcaaaatatggaccacttcaaaaatctgtgcatcatccttatgcaggcaggggccatgctaatttctctccattttgttccaatttcagtatatgtttgctgctgaagcaagttttgtttgtttgtttgtttgtttgtttgttttagactgagtctcgctctgtcacccaggctggagtgcagtggcgcgatctcggctcactgcaagctccgcctcctgggttcatgccattctccagccttagcctcctgagtagctgggactacaggcgcccaccaccacgcccggctattttttttttgtattttttagtagtgacggggtttcaccgtgttagccaggatgctctcaatcacctgacctcgtgatccgcccaccttagcctcccaaattgctgggattacaggcatgagccactgcaccctgccaaagctctcattttatacatggatattcatgagtcatggatgagacttagctctgttaaatccaactaacatacttgagactcagaattctggtgatggcttcctgccacaaatctgggaaaggataatatgggacattccacgatctaagaaaagggtcctcagcatacagatctggtagcaatgaaaaaaggaaactcctctctttctgcaacattatttgaactgaaccccgagggcctaaaggataatttatcatgaaggtcttagctaagtctaggctgagacaaaagcataacaggcggggtttcaccatgttggtcagcctggtctcgaacttctgacctcgtgatctgccctcctcggcctcccaaagtgctgggattacaggcatgagccaccgagctcggccaacatgaagttcttaaggatggaaggaacctgagcgacagtagaatatgtctgctgtataataggtattcagcttatgtttgatgaataaattgagaaaatggataaacacagttgggaagtgcaatatttttaaagaaaactcctgtaaagtagaccaacacttttgcaatagtaataatcctttatatttgatcccgtctcactaagaggcctgggcccctgacccctctgacgtttccccatcccgggtgccgtggggcctgcgggcaccagaaagccagtgtccccgacaggacggcgcatccttcgcctggccattacctcttcttcctatccctcttgtccacgccagtgtctccaggagctaagatgtgctccaccccagggacgtcgcccgaccgggcagctctgtggagctcgccaagatcttccaggcggacgtcgtgctggggctggtctaaggcgccctcaccgtgcttgctctcgctgccgacgctgtttttccaccagctgtaggggaagcccgaggaccactggtcccccgggtagcccaagtaccactggtccccctggctcccgacgctaggggtcttcctcgtggcgtagactgccggcttcggagacccctcagcccctccccgcttttctccaccccaggaggccatcagtagcgagctactgcctcggccacaacctcccagcaggatagcccgcggtttccaatctgcgaaaggaggaccgccaagccagaaatgccaagccaagcgatcactgccacgccaagccaagcgaccaccgccaagccaacagccaccgcaaagcctcgtgggtaaggccaagccaatccgttacagaccagtgcgcctgcccacctgtgacatcacggaacctgtgacttcactgcatctgcagctccagcctcccagaaaaagactccttggcctgcaggtggcgctgcagctccagcctcccagaaaaagactccttggcctgcaggtggcgctgcagctccagcctcccagaaaaagactccttggcctgcaggtggcgctgcagctccagcgccaacctgggctggctggtcctccctcggaggtttcggggtggcggtgcccagcctgcctgtcatgagtgccgcttcacagcgccgccggcgcacctgctcctaggcttgctcggttcaggggtacgggtcagttccgcccccggcttggccactgcagcaaagttgccctagggtccgcgctgccaggacgcaagcggagtcagatggctgggtcagagcggcctgtcagcccggctggaagggcctgcccgacgccgctgcccgcccagctcctactcggcctgcgcctggagccagggaccagctctgggcattctgctgccttaggatggggccaagcagccgctccccgccgtgtgccgcagccgctgcgcgcatctgcccagggtccgtgcagctggcgacccgggcgggtcggggaacgcctggtgccaccaggattgctcgcctctagtccgtcctgacccttcagcccgcgagcaccagtgagattgaagaaaagtgacggccaggcgcggtggctcacacctgtaatcccagcactttgggaggttgaggcgggcagatcacttgaggtcaggagtttgaggccagcctggccaacatggtgaaaccctctctactaaaaatacaaaaattagttgggcgtggtggcgcgtgcctgtagtcccagctactccagaggctgagacaggagaatctcttgaacccgggaggtgaacgttgcagtgagctgatatcgtgccaccaaactccagcctgggcgacagagcaagactccgtctcaaaaaaagaaagaaaagaaggaaggagagaacgaagcaaagagaaggaaagaaggaaggaagaaaggaagaaagaaaggaaggaagggtgacaaaggagaatctagagagcactcaaatactaattcttgaggacaattaagacagatagcattatgaaaaacagattttgtcactgaagcctcagggcttcagcctagatcctgcgctgctcacccacagaaagccaatcactgagatgagtattgcaaaggaagaaggctttaatcagatgctgcagccgaggagatgggagctcagtctcaaatccctctctctgaccaactaaaattagggatttttagtatagcaaagaagaaatgtaactatgtataagaaaacatgaactagaaaggcgtaaggaagcaatcatttacaaaatatctgtggccgggcgcagtggctcccacctgtaatcccaacactttgggaggcagaggcaggtagatcatgaggtcaagagatcaagaccatcctggctaacatggtgaccccttgttctctactaaaaatacaaaaattagttgggcgtgctggcacgtgcctgtagtcccagctactcgggaggctgagacaaaagaatcgcttgaacccaggaggtggaggttgcagtgagtcaagatcatgccactgtactccagcctggcgacagggctagactccatctcaaaaaaaaaaaaaaaaaaaaaaacagaaaaagaaaaaaagtatcaccctgcctcctcaatcttggcataattccccctatgagtggtttctggggtctcagttggcatttagtcacacgtatgacattgcacatatcgtgtgcacatctgcacagctcagcagtgtcctgggtaggccttgaa

SEQ ID NO: 1243793 - DNA, 4001 bp, Homo sapiens
caatcacgccaaggggagaaagctaatagatgtcaagacctagcttggactactgttccatacagactcaaactctgaatcggcagatctttgttagaaggatgctcaatccccgtgttcatctccaactgacatggaaaacaaaattctacttttttttttcagttccacgaaagacatgcaagttgacattctctcatttctgagatacatactgacaatatatttgcacacaacatcccacgtgttactcagctccattgatcaccttactgcatatttttgtagtgaaaaatcacaattttaatattaggtgatacccagtttgctttgactcacactgtctttggaactagtcagcaaatagtcaaatgaacttctagtgactgcgcaaaatatggaccacttcaaaaatctgtgcatccttatgcaggcaggggccatgctaatttctctccattttgttccaattttagtatatgtttgctgctgaagcaagttttgtttgttttagactgagtcttgctctgtcacccaggctggagtgcagtggcgtgatctcggctcactgcaagctccgcctcctgggttcatgccattctcctgccttagcctcctgagtagctgggactacaggcgcccaccaccacgcccggctatttttttttgtattttttagtagtgacggggtttcaccgtgttagccaggatgctctcaatcacctgacctcgtgatccgcccaccttaggctcccaaattgctgggattacaggcatgagccactgcaccctgccaaagctctcattttatacatggatattcatgagtcatggatgagacttagctctgttaaatccaactaacatacttgagactcagaattctggtgagggcttcctgccacaaatctgggaaaggataatatgggacattccacgatctaagaaaagggtcctcagcatacagatctggtagcaatgaaaaaaggaaactcgtctctttctgcaacattatttgaactgaaccccgagggcctaaaggataatttatcatgaaggtcttagctaagtctaggctgagacaaaagcgtaacaggcggggtttcaccatgttggtcaggctggtctcgaacttctggcctcgtgatctgccctcctcggcctcccaaagtgctgggattacaggcatgagccaccgagcccggccaacatgaagttcttaaggatggaaggaacctgagcgacagtagaatatgtctgctgtacaataggtattcagcttatgtttgatgaataaattgagaaaatggataaacacagttgggaagtgcaatatttttaaagaaaactcctgtaaagtagacgaacacttttgcaatagtaataatcatttatatttgatcccatctcattaagaggcctgggcccctgacccctctgacgtttccccatcccgggtgccgtggggcctgtgggcaccagaaagccagtgtccctgacaggacggcgcgcccgcatccttcacctggccattacctcttcttcctatccctcttgtccacgccagtgtctccaggagccaagacgtgctccaccccagggacgtcgcccgaccgggcagctctgtggagctcgccaagatcttccaggcggacatcgtgctggagctggtctaaggcgccctcaccgtgcttgctctcgctgccgacgctgttcttccaccagctgtaggagaagcccaaggaccactggtcccccgggtagtccaagtaccactggtcctcctggctcccaacactaggggtcttcctcgtggcgtagactgccggcttcggagaccccccagcccctccccgcttttctccaccccaggaggccatcagtagcgagctactgcctcggccacaacctcccagcaggatagcccgcggtttccaatctgcgaaaggaggaccgctaagccagaaatgccaagccaagcgatcactgccacgccaagcagccaccgcaaagcctcgcgggtaaggccaagccacgcgggtaaggccaagccaatccgttacacaccagtgcgcctgcgcacctttgacgtcactgaacctgtgccttcactgcatctgcagctccagcctcccagaaaaagactccttggtctgcaggtggtgctgcagctccagtgccaacctgggccggctggtcctccctcggaggtttgggggtggcggcgcccagcctgcctgtcatgagtgctgcttcacagcgccgccggtgcacctgctcctaggcttgctcggttcaggggtatgggccagttccgcccccggcttggccactgcagcgaagttgccctagggtcggcgctgccaggacgcaagcggagtctgatggctgggtcagagcggcctgtcagcccggctggaagggcctgcccaacgccgctgcccgcccagctcctacttggcctgcgcccggagccagggaccagctttgggcattctgctgccttaggatggggccgagcagccgctccccgccctgtgccgcagccgctgcgcgcatttgcccagggtccgtgcagctggcgacccgggcgggtcggggaatgcctggtgccaccgggattgctcgcctctagtccgtcctgacccttcagcccgcgagcaccagtgagtttgaagaaaagtgacggctgggcgcggtggctcacatctgtaatcccagcactttgggaggttgaggtgggcagatcacttgaggtcaggagtttgaggccagcctggccaacatggtgaaaccctgtctctactaaaaatacaaaaattagttgggcgtggtggcgcacacctgtagtcccagctactccagaggctgagacaggagaatcgcttgaacccgggaggtggacgttgcagtgagctgatatcgtgccaccaaactccagcctgggcgacagagcaagactccgtcttaaaaaaagaaaaagaaggagagaacgaaggacagagaaggaaagaaggaaggaagaaaggaaggaaggaagcgtgacaaaggagaagctagagagcactcaaatactaattcttgaggacaattaagacagatcgcattatgaaaaacagattttgtcactgaaggctcagggcttcagcctagatcctgcgctgctcacccacagaaagccaatcactgagatgagtattgcaaaggaagaaggctttaatcagatgctgcagccgaggagatgggagctcagtctcaaatccgtctctctgaccaactaaaattagggatttttagtatagcaaagaagaaatgtaactatgtataagaaaacatgaactaggaagtggtaaggaagcaatcatttacaaaagtatctgcggccgggcccagtggctcccacctgtaatcccagcactttgggaggcagaggcgggtagatcatgaggtcaagagatcaagaccatcctggctaacatggtgaccccttgttctctactaaaaatacaaaaattagttgggcgtggtggcacgtgcctgtagtcccagctactcgggaggctgagacaaaagaatcgcttgaacccgggaggcggaggttgcagtgagtcaagatcgtgccactgtactccagcctggcgacagggctagactccatctcaaaaaaaaaaaaaacagaaaaagaaaaaaagtatcttcaccctgcctcctcaatcttggcataattccccctgcgagtggtttctggggtctcagttggcatttagtcacacattgcacatatcgtgtgcacaactgcacagctcagcagtgtcctgggtaggccttgaagggtgatcttcacgtaagcctgtggccagagcaagaaagctgcacacgggcagcggaggaaccagcaggagcccagtccactggaaaattccagcaccacccgcaagagcagctgcagtggagactgtgacctgacaaggatatatgcatgaagatgctggtctgaaaac

SEQ ID NO: 1243794 - DNA, 4001 bp, Homo sapiens
actctgactcaaactaacaaaaaacaatgacaacaaaaaaactgtctaaagttaaagtagggttgcagcccttcgtggtagatggctattggatgggtattacaattaaccatgggtcacggggtccttttgggaagcgcagcttgggagttccagatgtttaaatcttatttggagagattctatgacagaaggaagagggagaatgagactgccacagaagatcagaggatatggaatctgctgtaagcccagaactggaaagacagacttgactttctgttgaggcactggctctggtctccaggcacgtctcttctgctgtttagaggagaatccctgctgcatggcagcatttgggtagccagagagaagatatatgaattgatgaagtagaagactaattggaaataaaaggtatagtgtcagctaatgaactcccaagtcacccatgtgacaacctcagccttccagaagaacacgtccatgaacagcctgaagtggttccaaaactggggagcagagaaggatgcagcaggatgcaaatgagcacagctgacctggacttaaaccatggccctgccacttactagtgtgcagaccttgggtactggacttgccttcctgcggccagtctcccagtgtgaaccatggaaaatcaacactcacctccaaggtgcctatggaagtaagtgggatggtatgtgtgtgttgcctgataaatggccaggcactgtgacaataattcctgctccatggatcgaacacagaaatcagtttccccacttcctagtgccatctcagaggtgttgcattatcggttgctaaagctcagcgagttccacccacacagtcccaataagctctgtcattccgattggccagtctgcagtctaaatggaaaggaagtagaggtagaaagaggcagcaaagaaaagtgagatgtgacagtctaagagtagaggcagacagaaagaccatacagacaagggttagaatactaaaaacagagcaatctggggtagtgttagtgcacgggcaagcagtccgacccctctggggagatcatgtgttacgtgatgtggtatcagttgaccaggtgttaagtctcaaatcatgaaagcctcaaatcattcaaaaaaaaaaaggtgaatgttcaacacaatcagtttaagaatatactatacaaataaagaggtatacattgagcaatagtaccattacaaacaggaaaacagttcaagtgaaagttacaggggcctgactcagtactggggtgcctccttcctttagaatgctggataaatggaatttcaccaaaaaaaatattgaagtctttttgcctctcagcaaggtgttatttaggcagaaggaaagcaatggaaatgaggaagggaaagcaagggggtagggacttggggtttctccttccgttaaaaaaaatcttcaacttggtgcttggctagtgccacccacgaggttcagtcagcctggctcttcttggtggcacgcagggcgtcacgtcccctgtccagcagcaggtcctccagccgcttgcagtgctcccggagctgtttctcgcgcggcaacaggaaggtgagaaccttgttgcgcacgatgccacggtcctcctcctcccttagccgctgcctcacgcgagccgcctgctcctcctgttgcaccagggctccattcatctcgcagaaggcgtcttcaaggtaatgaatggacttcaatgcctctttcttaaagtcctccagttcccgttgcaccccggccaccttctgctgcaggatctccaagtcagcgggtggtgggaggcaggagggccatgactgggacagggaaaagtctccagactggaggccactctctatcatttttttcccctgtagggtattcaccgtcatgagaatggacccagcctggtagaggggttccattgtctcttctacgttggacaaagagaggaagccaagagaccaaccaggtcaataaatatttttggctagagacacgatcattcggagtggagaaaccctagaattgtgacatcagggccccttcagccaaccagaaagaaagccacaatccattcatttgcatattgtagcttccttggttggttacctagagctttgtctgtttatctgaccaagtcgccctcctgagatgtggatccttaactcatcacccttctagaaccagaactcaagttcttctttaacctaaggaacaaaccaagtcccagagcagggaagtaaactggccagagcaaggcaggccaggccaggctcactggctgccaggactgggtggtctcccacactggcaagggacctgcatggtcttggactggtctctgggctttagtacctcactagtaaaacaaagacattgtaagagatgatacctaatcccacttgtagctctaaaatgctaaaaagtaatctcttattccaagtccatactcctataatgatgtcagaattctataaaatcttagaaattgcgaaaaatgtacttagattttgatgtatggtccacagcaatggctgattcagcaggtgcaaggtaaaaatgggttagtcatatttattcaataaatactaagtgctcactacacactaggatcagggaacaagtgagtgcatggtcttccaacatacctgaatgttaacaaatatgagaaacaacacatagaaaggtaaatcttgtactttttacctgataattagaacaaaggaaaatacttctagctaatctacatttggtttagtcaggaacaaaccttcatcttgcacatctcagtctcttgcctagacttctctcctggtctccaaatctaaacgtctcccccacaatgggcctccaattcaagccatccaaagctgaattggtgatctctttacccaaaccagttcctgttccagtgttgctgtcagattaatgagagcaacccagaacagcacacacaccagagccctcatgagacaactggtgctgtgatgctaatatttgtcccctcccaaactcatgttgcaatttaattaccattgtaacaggattatgaggaaggacctttaacagatgattaggctaccctttaagagataaatggattaacactgttatcttgggagcaggttccttataagtggataagttcagcccctttatgtctctctctcaccctctctttgcccttctactatgtgatgtcttctgctgtggaatgacacagcaagaaggcccttgccagatgccagcattttgattttggacttcctagcctccagaactgtaaggaaatacatttctgttctttataaattacccagcatcgggtattttactatagcagcacacaatagactaagaaacttaggatcaacctagacccttccatgtcaaagtggctctaagtcctgttcaatctaccattgccaagcactctagcatcaaaccacctgggttagagtcccagctctacttataatctacctatctttggcagattaccccatctccctgagcctcaatcttttttataagtaggaatactaattcagtggtgtgcagttctatggggaaaagtgaataaaactccgaattattttgatagctgttgccaatttccatggtgtaaatactcccaccgtggccagtttcaagctaccaacatgatgtcactgggaagagatgcacaaaatcagctctcatgagcctctgcaagctgactctcgcaccacagggaccgtgatgagggcagctgcctcctccgagatgcagattaacctatctagggtgccttgtagtaggcatcagagagggcattttgcagggaggttcatggctaaactaaggtggcattttctgggggattttgtggggtttttagcataataaagtgtcaagcaataaggtgaaattttaaatggcaagatgaaaaaagcaactttgattattgagacagaatggtggaaaaagcatttttccag

SEQ ID NO: 1243795 - DNA, 4001 bp, Homo sapiens
ggatagtctcgatcttttgacctcgtgatctgcctgcctcggcctcccaaagtgctggaattacaggcgtgagtcaccgtgcccggcctatttatttatttttgagatagagtttcactggtcacccaggctggagtgcaatggtgtgatcttggctcactgcaacctctgtctcccgagttcaagccactgtcctgcctcagcctcccgagtagctgggactacatgtgcgcaccaccacgcccggctaatttttatatttttagtagagatggggttttaccatgttggccaggcttgtctcaaactcctaacctcatgtgatccacctgccttggcctcccaaagtgttgggattacaggcgtgagccacagtgcccgtactctgattctctttaattcctagtaaatataagcccggaataactgcccatagggaattttaccatgtggctttcattattcccttccttctctccctcagaagccgatccatcttccggatgggacctggttttagagaaacaattgaacagtttcaagcaacagctttctttttcttggtccttatcccctcctgaattctgcacatctgtttatttacttgttacttctctgccacccccaggctgttgtcacgtctttgtcctgtttgtcaggaaccatagcactatatcatgcctgtcaggtggcggagatgccacaaaagcaaagctccatgaatgaatgaaaaatataattattaaaacatcgaaggaacagcaggattagatcaccccagaaaagtcacctcaaatataacttgtgtctgggacaaaactggggaaaagaaatacaacgtagagaaagtagcgcgatcagagtaagtgttctggggactctgagtttctccacgatttacgtagcacaggaatatatatatatatatatatatatgtatatcttttttaaaaaattaaagattcaagctatttttatctgtcaaaggaatatagatatgttcaaagagacagacagtgacagttccctgtgatcttccctttccttcccaagataatcattgataacatttaggaccacattctttcaacatttttctatgttttaaacacacacacacaccctgaattagagatcatagtatacctacccttttacatttatgcctatcgttttattaataatacctttagtctttccatgtcaatacatacagacccacctttaaaaaaatgaaacaataccgatgtgtctaaggtaaaaaggccaaactctttccaatcgtttctatccttttaaacagagcctaagcgagcagaggcccggtggcagggatcttcactcagccgccctccctgtgcgcgctcagtgcttccacccaggccccaggacggtgaccgcggactatcgcgggccgcctaaccgcagggacccctcccatcgcgggtcacccccaagcctgcgagaggggatctgtccttgcaggagggaggcgcggggccgggctggtctccggccacagcgagtggccccggagcaaggtcaggggcggtatccaacagccccgcgccctgcagagccctctactcttaggaggactgcgcgcagggaccgccacgcagagtggttgccatggtgactgcagagtgagcggtcccgggttttagagggagtcgcgcgcttggagtaggggaaagagggaggccgagagaggacaaagggacaggaggggagaagtgagaagggttggcgggggggtgaggggctgaacgcagtggacgggaaaggccagcaaaatggcgagagaagggacacaggcgagaggaagggggagtggaggcgaaggggcgaggcaggagccgacgcgggggccacctggagcggtgaacggagagcgcggcctggcgactccaagacccgctgcccctcggcccggcttaccggcccgccgcgccgcccggttccgccatttcccgttgctaggcgacgctgtcaacatccggccgggccgggaccacgcgcgctgcgagggcgggggccgccgggggcggcgcggcctttgtgccatctccacgcacgcagaggcgcgcgccgtctcgacgtgtcgtcccttagactgtaatgattagagcacgaccatgcttttcctttatcgctctctgcgcccgggtcccgcctcggctgcgctcaatttctgtaaagcgacagcggcgtcagcgtgtgcccagcgggcggctcgaggtcccgaagggacctgccgggcacctggggaccccggactgctaagcgcccgggaatggcaggcgggctgggggcaccgggggccggggaccccgcgcatggcgagcgcttttccatctcctgccctagggggctccggtgcccttctccaggggtcctacggagactccttgcatggacgcccggggggtcttccggagcgtatcttcccttcctagtccgaaataggagaaatctccctgcagagggcggcagcggagggccagcgcgcacgcggagcgtccgaggagccctgcctttcctttggggacgccaggctcgggacggggcacagtccccgaggccgggacgcggcgaggcctgagggagggccagcagggaactagaggcttgggcccagggctgggccagaaggtgggcggggagaccggcgggggcaggcaggggccgggccgggggcgggcccgggggcgggccgggggccgggcctccccgcgcgtccccgccccgccgcgcctcactggcggcggcagcggcggaggcgacggtggcggctctcggagccggcgcgaatccggcccccgcagcgggacccgggtgggtatcggggcccggacggggccgcgggggcggggtccgaggggtccaccgcgcagcgagcagcgccccctcggcggagctggggcgggggcgcgcggggcgcgtggggcgcgtgggcctgcagccgcgggaccggggaggggccggggtccggccgccgtcctcggggtgcggggcgccagcaggagcgggagcgttgtgggaggacctggatcacggaggggcacctggggacttttccccgcggcgagtgagggcgcccgggcccggaatgggcctaattcggggagactggtccccgcctgtctggagcggtggaccggggaacttgcggtctttgtctggctgaatcggcggagcagacggatgagaacttgtggggtgccggcgcgcgcccacacagcctccaaagtgtgcgtccccccagcagcgcgcgctcagctttcccggcctgtcgggcttggtggtctgggctgtttaagatccgcgtgtcgggatactcacttccgttccgcctgggctcccttgttctttcctttgggaaaaaaaaaaaaagaaaaagaaagaaagaacgaaaggaaggaaagaaaaaaaggaaaggcaactgaagattgctaaacataacctaggggatcctgccggaagccgctgaatcctgaaatcctgtgattcccacactcggaagctggtgtcgtatattggccacaaagtagttcagatttgattcagaaataggaaatgaatagaaaagacataacaaaagttagtctcgccttatggtaaagtttgttttactgtctgggtcaagttcaaatgagaagctgggctgattggccagcctctgcgacttgatcctgaagatctgctttcttttctaccagaaggctcctaattcttttatctggaataaaaagggaactccgtcttaaagatgctcacgtgaggcggcatattgccagagggtgggcgcaaagactgggggctggagattccattccaaatctgttactgattgatcagaacactttttcaaatccatgcctcagttttagaaaatcctcattagaaacgctaacagtaaaattggtgaatactaaacacttttaagaaccatgaaagcttttgtaaataaagaataaagtgaggagtaacttttggta

SEQ ID NO: 1243796 - DNA, 4001 bp, Homo sapiens
tactgaccctctgagagccatttggagaatgcctcacgcccaaatctcttctgccccaaccactccataagtgtttctctggctgctaagaagaactggacctctggagaatgtgcccagtccaaggacttcctgtcccacacggcttaggcacagagcaggaaggaaggtgcttaagagcggggcttctttgtggccgacggcaatcattacccactcccggagctggaccaggcccttcagggctgcgtaagtgctacctggagtgggtctggataaatctggatttttaagacgattaaagtgctccactaaagactgaagtgagagaggatgtcttggaatggactctggtgcctggtccttcaaccatcccctgcctggaccttcagtgcaaggacaaggatggaggggtggggtgggtggagggactaaaactctgtctcattcatcactgtatttcccaagtgtttagtcctaactgtagcaccttcattcattcatccatgcattcatttactgaataaactgtatgtcctaggtactggaaaagaaataggaaacagccatctagagggagcagagactgataggtaaatggaaaattacaaacagagacaggtgggggacataaaggacgcctagggacatgccaggcaatgttggagcactaaggatgctttttaactcagggcgaggagtcagcagaagcaaggaggaggagtgcagtttgcccacctgcggactatggatcccctggccactgcggccgcccacaccccttcaaacctggatgaactgctcagacttctggatgtgagccttcagttgggcttccttaacgcccagttcctcccagcgcaggttcagggtttccattctgcgctgaaacatctttggggtgggggtgggagagcagagaggtcaggagggctcctgacatgagtaccaaggaagaccccagcatccctgccccagaggctccatccccaggcccaagagggtccataggagcctcccactttctaccccatgcctggcccagagcagagcatccctggacagtggtacccccaagacccagatcctttctgttctccccaaagagaccagatcaccatagaggactcctggctctagccaccccactcagacaatggagggctgtccacaggctctcccagagccccagcccacccccttcctttcctgcccctctgcactccatccctgagtccccaccttcttcttctgcaccatagtttgatgcatgatttctgtctcctttttcttctccagtagccagatggatggggactccgacgccccctcaacattggggagtttcctgtccaagatgtgaacgcgagagggctgtgtgttctgacatggggtaggctggggctgggagtaacccgtggagacagatacccatggggaagcagaggggcctctctccctttccgagggaaagggctgttgtgttgagaagcatagagggccatgcaggagtgagcagggggagggtgacggggtggagaccagcgtgatgaggtggactggtgccaaggttatttggggcactgggttacaggagaggaggggacagacggttggaagatgaggtatggggtgggtgtgagtggtcccaggcacagaggggtgggcaagccaggcctcagacactcactggagcatctgcagcagccgctccccatactgcagccggaagtactcggccaggtcttcctcttccatgatgcccagactcatggtggcagtgacctcacggcccaggcagctgactcttcacagtgaaattgtgggtagcagagccacaggtggctcaggggtggtggctgcactcttgtttctcccttcggcctacagggtcccacagatgatggagtttgagactccacagaaggtggctggagacaggttgggcggctcaggacgatgtgctggggcagttatgggagatgtggttacctagcaacaggctgcctggttctgtggccggcacgtggagtccaggcgctgccctctgccccctgccccctgcccccattggtcctccccttgctggggtcctgctctctgctcctgccctttgccctcaggaacttctgggaaggcattaggcctggttagatgctggttgccatggagcccagggccagaggcagtttctggtgagtgtggctgagaaggggcatcgggtggaggagcggccttgtgcgggcgccctgctcttagggcctccctggggttcaggtgtgggtgagggtgagggaggggccgggccttggtgaagaagagcagagaaagaaaggaggtgcttagcggcggcaggggtggagtcgcgaggaggcgcgaggttagaaaccaggcggcgggcccagcacgcggtggggccgggtggggaaggggggacgggcggggggtgcgcggggacaggcacaggaggagggcccaggccaggcccctcagaagaagagactcggggcctgcgccagttttttgttttgttttggttttggttttggttttggtttttttttgagacggagtctcgctctgtcgcccaggctggagtgcaatggcgggatctcagctcactgcaacctctgcctcccgggttcaagcgattctcttgcctcagcctctcgagtagctgggactacaagcgcctgccacaacacccggctaatttttgtacttttggtagagatggggtttctccatgttggctaggctggtctcgaactcctgacctcaggtgatccacccgcctccgcctcccaaagtgccgggattacaggcatgagccaccgcgcccggccctgcgcgtttttgtttgcataaacttaaaacgggaagaaatgtcaaaacacggtaacggaaatgaccctatttaaaatgttgactccgtggtggccgccttccttgatcccgtcaggctgcgtgcattaactcatctggctggaggtcggacgtcttcgcgtgggacggcgggtgtgcggagggcgccctggggtctccggctggactctggccgggaccttgagctcgctcccgccaggcgcaggctccctcttctctctgcctccctccctcccacgcccgctactgccgccacgcccgccacaccgcccgttccgcttctctctgtctgggagggggagcggggtggggtgcgtgggttgtggtgggctaggggtctcgggcgggggcgtgtcccgagcgcggccagtccgccccgccgcattgccggtcgtctggcgccccctgctggccgtctgccgcgccctccatcccggcccaccccagccctgctcccctcccacgctccgccggagcctcccctccagagcggaccatcacacacacctgtcgcttccacctagtccggtgggctcagcagagaaagcaagacagtccctaccccacgcagaacacacccacacaatggccaccccaaccctaaacaagaggtggttctccaccggagccccggaggaacacgcccagcagggcgacaataagaccgccaagaacgattcaagctcctcggaggggcatgtttccttgtttatccacagaggctggcacagtcaatctgggcttcccctccctttctttaaggtcgtgcctaggagctgtgcaacgccagcccttgaggaggaagccatctgtttctggaatcaccctccccgccacgtatatgagacatatccttgattgtccgtgaaatcaggtggtccagggccaggttggtccatagaggtaggtgtaagacatcctctgctcctgcccaagggtctcctcgtatctggaagctctttctgctgcttggtttggtacctatcatgggagttttcgtgatccttgcacaccaccatccctctctggagtctcactgccctcccagggaccctgagcaagacgcagggctgtctcggatttacagaggtctgtcctatccccatcttttccct

SEQ ID NO: 1243797 - DNA, 4001 bp, Homo sapiens
aatctgtaatgttgtggtccaaaaaaagaattgattccactgtcttgtatttccagtgaacttccaagcttcctcacaggctgtgttaaagttttcccatttataagccaatcttgccagaagaggctctggaactcaaatgggttactgccagaagaatctgggacagctgcactagtgttatatttcaaccatgtacccaatctatgaactgcttccaccaaatgtgagtgattttttcctagcacttgtttccgctttcacaaaacacttttggatttgaaaatgtttctgccttctacccttttaaaaaaatgagatatgaatatgtacatttatatctatatatatttatactaatttttttttctttgagacagggtcactctgtcacccaagctggagtgcagtggcacaatcacggctcactgcagccacagcctcctaggctcaagtgatcctcccacttcagacttctgagtagctgggactacaggtatgcgccaccatacctggctaattttttaaatttttttgtagagacagggtcttgctatgttgcccagtgtggtgtggaactcttggcctcaagcaatcctcccacctcagcctcccaaagtggtgagattacaaacatgagccactgtgccccacctcatggtacattttgattctattactagcctttcaaaattggttttgagaataacaaagaacccatttttctaacctgtccattgtaataaatgccagaggataaagcctttgatggacagacaggtggctctcacagtagcaatcaggtatccaggatctcctctaatccatgaatgcagagacaactctagcttctacagcatttagtgatgattcaagtaaattttatttttaagcttgtatttaaaaggaaacaatttgttagacagccacaggtagcacctacaaccaatttaatctgtaataaccagtctaataagtgtgtatgttggaggtgtgggaagtgaagatgaaggcagcagaaatgatcaggttgaaaaagtggacatctgggtgacttactatgtaaacatagcttaaagtacacatttctgaataccttgcttctaacaggctaaggactaagtttctctctcttcgttaaagctctgatctctctcataccctccttcccaccaccaatgattactgtaaatactgtaatggatcaagcacgacgtttgcttcagttctgcgtgggcatgaaaagacttctaccaccagcttaccttttatggactcctacatccatataagaatcaaaagggcacttcctgcaggcttctgtcatgggacagccctgggaactgccttgtaataggcacagacctcccaagagcattttaatacccccagtgaacactgtaaacggatggaaatggaattggtcgtcagatatttatgataacattcccattctgacatttcaatgccttcggaagaaccctcctcggctcactcacaagcatcggagagggccttgtccccaagaatacgagaaagcccttcctctctgtgtacctgcagctttcaggcttcccacacctggttggggagcaacctccttcccccgccgcccagatatcagaggagtatacctctcccaggtgagaccactgagcctctgggatacccggtaggggagggagggtgcaaagtactgacaggtcctcagatgctggccagaggctgaaggaatgtgtccaggctactcaccaggaaagcagagaggatcccctgcagagcgtccagcttctcttcttcctcctcctcctgcaggatacccaagatgtaggctccataaacggctcggtccactcccagtgcctccaaccgtccgtccagccaggagccaaagccgccgcctccgccatcgccttcgccaggggctatcgcggccacttcgctgggcgccgccatcttggggtcagggtcctgcaagcccctagggcgcctaccgcagtgcctgacgggccgcgccgcaggtccaccgcgcatgcctgaagaggaagcccaggcccgtaagtgcaaagagcgcagccgtgtcggccggcttgagagttttgtgctttctagatgaagcgcgtcttcgcatacgtgcggtcgcgtgatctcacaagatgcttggcatgtgagtattcttaacagactcattctacagttcgggaagttgagagaggtgcagtaatttggccaaagtcacgcggctaataactacccaggactggagctcagcgtggatgccatcgcttcctccacccgaccgagctgccttccccgcgctttcgggggatgctggccgcccactcccacacagctgtctggcaagaacctcctgacagcctggaataccctcgtcgtcgctaccgacggctaccaccttcacctgtacaagcccttccctgtcaaagtaaaggttgcagaaaaccttccctgattccatggtaggcactcagtaaataaacaggcaacctcaagttatttcttccactcattgattcaacgcgtgcacgggactattctttgagaagcgtaccccaccctctgctaggcactgtgccaaaagcttttcatgcattatctcttgtaatcctccctacagccctgtggggagatgcttttattgtccacattttaaagataaggagacaggccgggcgccatgtctcacgcctgtaatcccaacagtttgggaagccgaggcgggtggatcacctgaggtcaggagttcgagaccagcctggccgacatggtgaaaccccgtctctagtaaaaatacaaaaataaggccgggcacggtggctcactcccgtaatcccagcactttggaaggccaaagtgggcagctcacctgaggtctggagttcgagactagcctgaccaaaatggagaacccccgtctctactaaaaatacaaaattagccgggcgtggtgggacatgcctgtaatcccagctacgtgggaggctgaggcaggagaatcgcttgaacccaggaggcggaggttgcggtgagcagagatcgtgccattgcactccagcctgggcaacaagagcgaaattccgtctcaaaacaaacaacaacaacaacaaaagccaggtgtggtggcgcgggcctgtaatcccagctactcagaatcgctggaacccggaaggcggaggttgcagtgagccaagatcgcgccgctgcactccagcctgagcgacagtgagactccatctcaaaaacaaacaaacaaacgaacaaacaaaatcactaaagataaggagacagatatggagagagtcacacaactagagggcgcctaaccagtggcaagaactcttctttggcagagttatgagagcttcagctgacgtcaaaacacctggctctgggctggaatgaattacccaagaatttggttggctttagctgaagtgcagaggaagctggcaaggtcctggctaactccttcctcaaatatgtactgagtaccttcagtatggcattgttgctggcactgaaaacacaaaaatgaatgtcacaaaatatatgtcctcaggggtttttaatccattaggaacagacatgtttaaacaaatgatgacaatatagtgatataaatgttttaatggagctttatctagcggagattgcagtaggatgcctagaagattgagttaactttacctgttggagtggagttggaagcaggtggggagaggttcataggaaatccaggaaggcttcccagtggagatgatgcttgaactttcttgaagaatggtaggagttctttacataaagggactggagggaaaaagggggtagatccagatgcaggggaactgtgaattcaaaggcttgctagggggcctccagagagtcatgtatggcttgagctacaggattcaaatagaagatattcaggggataacaacaaaaaaagaaggaaaggagtttgtataccttgcagaggtcct

SEQ ID NO: 1243798 - DNA, 4001 bp, Homo sapiens
aaaagtggaagaaatatagaaaacagcacatactttggtgaaattagacttggtttaaaatgtcagctctaggccaggcgtggtggtccacgtctgtaatctcagcactttgggaggccgaggtgggtggatcatttgaggtcaggagttcgagaccagcttggccaaaatagtgaaaccccacctctactaaaaatacaaaaattagccgggcgtggtggcaggcacctgtaatcccagctactcgggacgctgaggcaggagaatcgcttgaacccgagagatggaggttgtagtgagccaagattgcgccactgcactccagcctgggcaacagggtgagactctgtctcaaaaaaatagataaataataaaataaaatgtcagctctaccatttaccagcaatatgaccttagcctaattacttaaaattccctgttctccacatacaaaaaagggataccatttgctacttgcctcttagggctgcagtgggtattacgggagatatgtaccaagggtttttttttttttttttttttgagacggagtctgactctgtcacccaggctggagtgcagtggcacgatctcggctcactgcaagctccgcctcccgggttcacgccattcttctgcctcagcctcccaagtagctgggactacaggcgctcgccaccacgcagggctaattttttgtatttttagtagagacggggtttcactgtgttagccaggatggtctcgatctcctgacctcgtgatccacccgtctcggcctcccaaagtgctgggattacagacgtgggccaccgcgcccagcctccttttcaaatcctactcttaaaacttttttttcatatagaagcaactaaaagttaacaccggaacagtcaactcgattaacagcctgccaaaagatccgatcatttcaaattgaatttccaattagaatattcacaccatagaaacacttctgagataactcagcactataatggagatccttcaaggttatttaggttacaatcatccaagccatttttaccttggttttccctcttagaagtctccgctgcacctgtcagttctcaaatgcacaagtccttgccagaccacccagcctctatgactcctgaagcaagcaacacaggaccaaggaaaattcacacaagcgctaacaagtctggtttgattattttctgcaagctcatccaatagttcctcagcgactgagtctagacttgaggaaagaggactgagtgaggccatcattccttgttgtcattttagattaggtcttcctgacaacggccaaaacgagtattctggaaatcatgcagactttcctctgtctctttatatgtgttggatacaaacacgtttcattttagaaacctccagaagagactggccacagaggtttttgcttctattaaacccctttgcctagtttctccccacccaagagaatcaatacatcctaatgtcatcctccggcacacactgtacatttcctctaactctgcccttttggctatcatttgctcacagctccgtgggaaagttcccccaaaccattacaattatctcaaccggaccgggctacaggccaagcaactcggagtcaccgctcggcctggcccggccacgccgacgagcgcgtcctggcccgctccttacctgtggccgaagccgaaacccggcccagcgccctgcgtccgacacccctgcccggcctgcctctcggcctggccgccgcctccgcgatcgcagcggttttactgccccggatgcctctaggacgcagccagaaccgtagctcagtcacgccgcgcctctcttcacgtagcctccgccgtccgttacgtagaatgcgagcggctcgtcagcgcctgcgcgcagcctgcggggcgggacgcaaccccggggaaagcgcgagacctccctctctcccgcccggctgaggcgaggtggggcttttgggaaaattacataatccccgcccctgggccggaactgccctcgcctatcccaatcctcctacctaggattccgtcaagttgacgtcacacggaaccggtgctccggaagctaaaggtggccatgctgtgtgggaccacgtggccagaggcaagagtgtcgctctagtagtatatgcaacagtttaaactataggcatgttcatgtaaatatggtttctgtccaacccgttttctcttgggatttttggctagccccttgacgccactttttcttcattcgcagacccactttctagatgggtcatgaacactgtccacccaactgcagtttcccgtcagagtatctgaggagcctgtgaggcgttctggagctttaaggtcaggcgccttccgggagccgtagccccggccccgcccttctgcccgcgcgttcctcactgcgcatgtcgcgtttttgttcccctccccccttcagcaacgggccgtgaggcggtggcggtggtggcggtggcggcggcggtggtggtggtggcggcggcggcggcgaagggggcggagaggaaggagcgcggcgggaccgggccgggacagcgcgtactttgggctccgggattcgctccgcgcccgcggttgtagcagctgccgctgcagccatagcagcaggtttgtgcgtggggtttctggacgcaaggccgccagtccttgggggcactggaggcaactgctgggcctagcgagggcggaggaaccgcggcctcgcttaacaaagagtcggcagagcctcggggcaccggcggccggggtgccgggaaggggtgggagtgggggctgaggcctctagggttccttcctagccgcgtcgccctcccacagctcccgcttccctcacaagtcttaccgaggcccagttggcggctttccggaggcggcgccccctcgcctaggaaaaggatttgcagggtgcccggctccagggcaggaatagcgcggggagaattctgacccaaggaggcagcgcttgggagatgcaggcctccgaatttggggtcctgagaggcaaaagctgccaaatgagaggagtgaaaagatataggcgatgatctttgtgcagcgttgagtaggtcgattattagcatcactgtagtcacacaaacttttttgcggcctacttgagagcgtatctgatgtgaataaataatttacatggaattgcaaacatatgcatcaaaaacaggagaagctgtcgagagttttggggaattacattctcatcactgagaatttccctcttgcccccactcctataggcagttatccaatttcttgtggcttccctgtgttttctttttgtcaatgatgtttctatgtctgtcctctctcgtatacacacccaggacttcctcaagcgcagggactatgtcttaaggcgctttgcagagccaagctcatttctggcacataagaggtgagcaatgagtgtttcgtacaaaaattaatgtttatattttgacagctgggaaaagaaaatatatcttcctgtacctggaagaagcattgtgtagcctaatgtgcaattcgttcattcaaggggtatttttattggtgcctattctctagcgccgttctaggtgatagggataggtgttagacccctgcctttggggaacttaactttctagtagcgggaggagaggcaaacagatacatatattatactgaatgttagaagatgatcagtatcttagggaaaagaaagctggaaagggggttggggaggtggtggtgttggaatttgcaataaagtggtcagggaagtccatacagacaagctgatatttaagcggactagaaggtggagtgagagcctacgtttatctggggaaaggaacgttccaagctagagaataacaaacataaaagccttgaggaggacaaagctggcccgttaagagtgtgaagaccaacgcgtttggagcactgtgagctgagggagtattaggagataaggtcagggaa

SEQ ID NO: 1243799 - DNA, 4001 bp, Homo sapiens
cgaaacctcgtctctactaaaaatacacagattagctgggggtggtggtgggcggctgtaatcccagctacttgagaggctgaggcaggagaatcacttcaacccaggaggcagaggttgcagtgggccgagatcgcgccactgaactccagcctgggcggcaaagagagactccgtcttaaaaaaaaaaaaaaaagaaaaaaaaaaaagaaaaagagagaaagaaagaaacatcatcttttacatagtggcaagatatttccccacaaaatatttattatttacaaagggaaggaccctaactttatggacacacttggcagacaccacctcagcccccaggacgtgactagcaccaacagccaggggcatcctgtgtctcgtaagacgctgggaagggcacaatttccctgttgaggttttcttgccaaaaatcagtaatatgaaatcaattatgacaaaacatcagagaaatgcccccgaactggggggcattttataaaatagtggactcatcattggatcctggaccacggtaaagtcatccatgaggtagctgctaagcaagaataaatactggagaccagatcatgggatgataccaacatgaacgccagcgtctacatgttgctgaatgaactgtggttctctaagaggtcagcattctaggggctctgggcaaaaggcacacgggaaatctgtgctccttttgtatcctttttctaagttacagataattttttttttttttgagaccgagtttcgctcttgtctcccagactggagtgcaatggcgcgatcttggctctccgcaacctgcgcctctcggtgtggtaccctactttgttttaacctgactgactctctcttagctgagagggccggacagacaccattttggtttcttcgcttgcagccccttgtccccgtcccttaaggacataactggggcaagctgactccaagcacatccaggaatgcgcttactgataaaatactgataagaaactggagcaagctgtaccagcagctcctgggaacgcgctcggttgatggtacccaaagcccctgcgtttatcactttgtgataatttaagcccctgtacctggaactgtttattttcctgtaactgtttctgtaaccatttatcttttaactttttgcctattctgcttctgtaaaaaaatcgcttcagctagcctcccctcctctatttagaccaaggtatcaaaagaaatctagccccttcttcggggccgagggaatttgcagctctagcagtctgtcagtcgctggcaatacaggactcctgagtagtctcagagtgtggcgttctctctataactccctcagttacaacatcgggttcaagcgattctcctgcttcagcctccggagtagctgggattacaggcgtgcaccaccacgcccaataatttttgtatttttagtagagagggggtttcaccatgttggccaggctggtctcgaactccgggcctcaagcaatctgcccgcctctgcctcccaaagtgctggattacaggcgcgaaccaccgcctccggcctttttttttcctctctttttttttttttttttttaaactcacagacactgtaaggctgcctgggcgcggagccgtccttgccggcggcggaacccggggaattctcccggggctgcggggccctggtcggcagcgcccaccgccccaggtcacccacgggagaccgagggaacgctcccgctccacgcggccgcaacccccgccccgccccgccgcagcctccgcgaggggatccccggtccgggcctggccgagctctgagggtcgacctcgcgctccaggtccccaccaaagcgctgcgtccgacaggacggcagctgctggggttttctacaggaagagtggtcggagcggcgccccccacgcctcccacgcctcccacgccgcccgcccgcacctcaccctaacgcccgccagcagcgctggccaggtcccgccgcgttgccacagcgaccgggtcagtcggccgcgtccggctgcgctcggtgcagcgctcgggtcccgccgacaggaaacggggtccctggcgctaggttccggcccctcccgccccgccgggttccgcgctgcgcccgggtccgaggggcgccccggccgacccgaccaccgccgcagatcgaaggagggagcccggcctcctcaccggtcagcggggcgactccggacggggctccgggctatggggacggcgggttccgccgcgcgaggcgcccccaccttcgccgcccccggcccggccgagggtccccaggcgcccgcttcctgaggccgcccggctcgcggtcccgaagggttgacttgagcttttgccctgagatgaagggagcacggggcggccgaggctgcccgtgggggtctgttcgggccgggggcgccacgaagtcctgcctaagggtcggctgcggccaccggggcacgagttcccggcgctgcccacgggctcggagaccggcggggcccaggggccgtgcgcgcggtcgctcagaccctgattagggaactgggggaaggaggggggtcgggacccaccgaggcccgaagtcgcccccaccatcctgtgggaacaacatcctcaggcacagccattcccaaccattcacatcctcagaaaaaggcacgtgtccgtatccatctgcggatggatgaacagagcccggccccgggacagagcagcctggctcacccgaaccctcagcccgcaattctgcgtgggagtggagggggtgtttggtgtctgggaattcccctggtggggcaataagccaggggtctggtgtcatcctccacccacattgttaacactggatcactcctctccgtgccgtgcctgcagcccaggcaccctgcagcctgtcctccccgaaccatgcgtcctggtagagctgtctccctcgcccacagtcctcagtcccgcctcacacaccaaaccctcttctgcctcaggtcctttgcgccagttgcctctgcctagacttggttccctggatgccccctccccaccccatgtgtatgtccggctccctggacccaccccccacactgtgtgtctagccccctggacccaccccccactctgtgtctagtcccctggactcccctccccaccccctgtgtctagctccctggacccccaacctggcccatgtgtccaactcccaggacccccccaccctgtgtccagctccctggtttcccccaccaccccatgtgtttggctccctgtcctgctgccttctcagtgcttgtgcacccccagcctcatcagacttgtcactctattagaacaggatgtagggcctggactgttggctccctgctacccccacccacaggacagtgctggggttgacccgactttggctgcacatttgactggcccctggatcagctctaggactagatgtacccaaaaggatgcccacatccttgcctcagctcctgcctctgcccacccagagagctgccttgcccccatgtccacgatgcagccaccaggcctgggtaagcgtgggtgtccgagacgggctgggacacccagaagaggagccaggacttgcttggtctgtatcccggctctgcatgcctcagtgtccctgcctgtaaagtgggatctatgggaacccatgtgtgggccgggcacagtgctcacacctgtgaacccagcaccttgggaggccaaagggaggatcctttgagctcgggagacagggtctcgctctgttgcccaggctgtagttcagcggcgtgatctcagctcactgcagcctccgcctcccaggttcaagcgattctcctgcctcagcttcctgagtaactgggattacaggcacttgccaccatgcccagctaattttgtatttttagtagagatggggttttgccatgttggccaggctggtctcaaactcctgacctcaagtgatctgcctgcc

SEQ ID NO: 1243800 - DNA, 4001 bp, Homo sapiens
cccaagaggatcgacagagagaatatacatgaaaaagccttaaaatactgactggtttgtgaaagctactccaattaagtttgtaaagaccctgtgatacagctatgtttatgacccttcacagataaggaatacagaaggatacacagacaattcagtacaaaggagttacctgtccacggtcacccaagactatgggttccaaatccaggggcaggaactcatcctggttcccttgctctttccagtgcacaataacccctcatgcttttgttaaacctctgagctcataatgctgggatacaatacttggcaccttggagtttcaggaaacacaagccactgcaggagcacagatgcatccttcctcacacctgctaggaagctcagcgctccctctagcgcccaagtgtggcttgcacccaggtgctggcagctctgggtttagaaaccttattctggtaaaatactgtcatctagtgtctactcttgtaattccaggctggcggggttctgttctctagggagagattgagcaggtgatcacttacattaagccctcattggagcagatggagctggtatttctgtaacacaggattgccctcaggggaatctcttgctccgcaaatgagaagcaacatctggagaagggtacctgcactagaagaggaacacagacgatggtttgcatccatttctcaacctctcacctgtagcacaatttttaaaaaacaaacaaaaaaacgcctcccaggacaagccctggcttggggaccacatccagacggtgccggcatagctctgcctcatcagccaccttgttctggggctaggtaaagagtcagaagattggggttcagatctgagctccccgcaccccagctgagtggccctgaggaagatgtgccttcaccctggccccagacttcccatctgtaaaataaaactttttggagcctggtttctaaaggctcatccagttttggtatttcaccacatgtgcatggttctgccccagtattcatgtccaagggctctggaccccacaccctggggacctggttagtctgatgcaggacacagtggtccacagttcacagacctgatctggggaagattaggaattgttcgaggagtccaaactgatgagatgacaagggaagagctcccaggaactagctagctgccctactcagtctcttgaatcccctcctgccctggtccttagctctttcccagcccccaacccccactctgtccatttgtgcattctcctcccacaccacatcccgcaagagacctgcattccaatcccagcttcttcctcctagtttttctgtttgcaccccctttcatgcctcttactaggttggtattctccaaacagtcttggagggcagacatcatcaactccatttcactgatagagaaagtagagtttgagagctaaagtgacttgcccaagagtgaccaattgttagagcccggtcttgccttctgactctacttggtgtctgtcacactgtagaagctacacccaggctgtcccctggaccttaggcctcccagctttacccgagtaacctcacaggttcccttccttgggtctggatgaagcagagcctccttgtactgaagctgtcagttcagttctctgtgtttgccccaactcatggttctcctactagccctcaccccagcctgtccaagttcaccattcctcctctttaggtaggaagaggggagatagagttggtgagttcaaggagaagcctgctccaaccccagagtggctgaccacgtttctgccctccccagagagaagcaaaatgatgcctgccacactcactgctcttgctgtccacatcttccggccacatcccagctagcagcaagcacaccagggctgtggtgatgatctgcatgtcttctggtctggcttgggccttcctggagcagctttgatgagcctggtgaagctaagagctcaccactgtgccgtcctgcaatgctgagggcttttatttgaaaaactccacccaaaactccaggccatggtgggagccacaagtgggaagccatagggacagggaacagttgctcacacccagcgaccatgtggtaaactcctttccccacctctcctggctggtattcgtggtggtgatggattgataggttgcattgggaacttccctaagtgtgggagcagataagaatcttgaaaaagtgcgtgggaactgtcctggttgagtgggaagcaaagaaaagtaagtgagaggaagtggcctctgtgtggcttgtccaaccctacgtcattccatccaagtactactgcttcagggcagaagagtctggacctgaacagagatacacctgcatttgaatcccagttctgcagaggagggattacataaacttacccaaattcatattcacacaaaatgcaaatagcaatacatgtctcaaggacgtgcgataagaattaaataacattctctatgtccagtgactggcctagatatttgccatttctattttttctatttttttaatcctcaacaattttcaatagcttattctgttctaggtccttggttagccccagagaaggcagttaccaatgaggagcactgcctgacctcaagcaacttctcttcaattcacagataaacaagtgaaagccacccagtgtaagcacagagatagatgtgttatgtttgggttacagagaggactgagagctactcagcagcatctgagagtcctgccaggggaattttccctttttgtttttttttttctagagtctcactctgtcacccaggctggagtgcagtggcacacactcactgcagcctcaaactcctgggctcaagcaatcctccagcctcagccagggaatttttcctttttgtttttttttttctagggtctcattctgttgcccaggctggagtgccatggtgcaaactcactgcagcctcaaactcctgggctcaagcgatcctcccgcctcagcctcacagtgggtggaactataggtgtgcactaccttgcccagataatttttttattttttatttgcgtagagatggagtctcactgtgttccccaggctggtcttgaactcctaggttcaagcaatccttctgcctcggcctcccaaagtgctgggattaccagtgtgagccaccaccccagccaggagaatgttctttaagcaatatctcctgtgtgctgatgtggagaggggaaagctaagtagaggcagggtcttctatgaggacaacaaggcataagggagcacacttcatttcaaatcatcaggaaaagcagaagtgtagggtccaaggagagtgacaggagtgagagagtggttgcagagagatgtggctgtacagctacagagaagactgggtcataaagatgtatgcagtactcggaataaagagcacatagtaggtgctcaagaaaaagtagctgagccaaatctaggcattgaaatcatgaagcctgtgtgcattatatagagtgatggctagactgatctactctgattgtgcagtctttagctcaaaaacctgcagtggctccacaccatcaattgggtggagcaccgagctactcacctggatatttgtggttcttcatgtcatgcctcagtggaggccagcacattcgggtaattgcaattcctgattgcaagtaactgccacttgctgtactatctctgggattttgctcctgctgtaacctccacctgcagagcccacctctctgtctcactctgtgaacatcctacccattgcaaatgtcattgtctccacaaaggcacttctgccatatctagcagataggatctcagcctcttgtgagaactctcatgcctggattgccatacaattcctgcaacactttcctttagtccactctccaaacatggaaatgtccaagttgaaagggctcttccagactatctacaacagtggctcttg

SEQ ID NO: 1243801 - DNA, 4001 bp, Homo sapiens
ttttggtccagatacttcatggaatcctgcacccacttcttcttggggtcggcacagatatccttggccagtttggtcttgaagctgtgggagatacaggatgcaattggaaggattgtttttgaaaattctgcccatttgaccctaaatatttaaggaccatctgcccctggacaaagggttgctacggagaggaggaaggatgagactcttgggttagttgctgctcttaaaggcccagtaaaaccatctttgctcttgacttgaagaaattgatatgactacagcaatctcccaggcagggagctgggagtgaacactcacttgtgaaaattaatgaattggaccatagaggtcaaactatcagagtctatgactcccagcaactgtgacacagttcttgactctgtgccctagacattatttttttgtctaggggagggtgaactttatttacttacatcacagctttctggggacatttgccactggtgattctcctgtagctctctagtcgctgaaggggtatcttcctattggccaggttaaagcagcaggtggttgggacagaagctgaattttggggaaaaaaaatgaacagagaaaaaaatgagccacatgatgatacatagacatttccaagcatgactttgtaaaggaagttaggagaaagcaaggaattgcgagaggtggagggagaatccctctgctctgaagtcttatgtgtctggaggatgctgtcctgtgtcttcagcatcctcccctgtgcactgaggactcatcattactgtagagtgtatggacaaagcttggtcaatgtgacaaatgctagctctgtcattataaagacctacgtggccatgtgatggtcatggtaattttcaccaaatattctccatcctctgttttgagacacaaggtagacttgcatttcttggccacttttgtttggttggaggcattaattagttttgatcaataaagaaggagacaaagtgatgggtgtcatttttgagccacagtgcattgcctatgcaagactcctgagagctttcttctgctttatcacagtatccatcaatgttcccccacatgggcaacttctccatcagtctagaatcctgagtataaaatgcagaagcctgagcccatacattatagatatttagtacaagtgagaaagtaacttttgttaatttagttaattctgttaagtcattgataatttagaactgtttgttaccatgctatgcactggctcagtgggaccgatacactcagtaaatttgtcaccagagtatgggaaaatgagttatggaacaaatctcctagataactttcccaaagagtgtcaaaataagtcacctcaagagatccccctgggacctcgttcttctcttagccactgtctctgaaagctgtcctggagtcgaattaacatactgagcttctaatcaacagattttccttctctcccactgccaaaaatgcccaccatgcccacagtaagacagagccattccccattcccaaacactgtaaggatagctgggtatggatgcacccagcaaccctcttgaatgtggggaaaagactcgggagctttctagttctggctcttccagtgactggatgtgaggttgaggcatttcttgtccacccacaaaacctgtttccctatttttcaaatggagaatttgcagtgagtctgtaaagattcttgctgacctagtagctctggaggtggttaccttacctttcctgtaaggagttggggggcttacctggcccagcgagcccctgggggctgaaggcagctgctatgagcagcagccacagaagtgctgcggagaccttcatgttggaggctgaaggtgtgagctttggcgtgagaggtggtggtttctgggttggtctcagcctctctgctcctctggcccatctgcctgccttttatagggagcagacagtgtgggagattccagggaagcctttgcccatgcgggggtcacgatgaagggattcctgattgctgaccagattccagatcctaggaagtcaagcagaacagaagagaggcaagctagtaggagggacttggtacattttttaatccatctggatcttgccttggaaaaggaggggaatatgtggttatgaaatgaagttaaacatctgtagtgggggaagagagcaagaaaaccaaggccctaggggatgagttgaaatgaaacacctgtagttggggaaaggagcaaggaaaccaaaggcctgggggatgagtcgatctaagaaccttccttgattcctgtgttcacatggtggtcttgaggattttggagaccaggaaggagccccaaaacttccattaggctcccacccagatgcagagagagctcagcagccctgcacatagttgcatctctgaaccaggaaggacaacacaccacagctttgctgctgtgtttcaatgtaatgatcacagaatcttagtccctgaaattttagcatgataggacatcagaactggatagtttctattaatcttgacttctgaggcactttaaaaccatttgcttagctgctaaagcccttttccaaatggaattaaaacaaaccccaactcatcaaatacactgtagtgaaggggatttgtttgaaatagaataggcagcctctcgtgcccttattccccagggaacacatttagggaacacatttggaaaatcaatcatctagttcccccctcactctctgagcacacattgcagacaaggtatctgatggctaaaaatatcaaagagagaggcaacacaagaacctatacatatccctttgttcataacactaggcaccctagttggagagggtataagggaggcaaagtctttaatggagtcactgcagcggattacagcattgaatactggtgtggaggtactgcaaacctgtttcctgttttttcctgcacactctcatatcaaattgattgattggtacagtagcacaaacaagaatgttaaagattctgaggagttgacttgcgttagttaaatactgtgttgtggttgactggtgatgtctgtcatgggcacaggattagagacagctcttgctgtcctgcaaagtctctaagtgcccatctaggataattggtctataattacctaaaaagttaactataattaccaaatagaggccaaaaatgtggagtcttccctgttctttcctgctccattcctggtgggttagtctaatgtagaacctgaattcaggatatctgcatttggatgatggctctgtgactgactagctgtgataccatggacaacttacttaaccactctctgctagggtaagagcaggatactaatcatgtgtactttagggaattgtcgtgtgaattaaatgagttcatgtatctaaactgcttagaagaatgactaaatcactgtaggtactcagtgagtagaagttactgttttttattattaggaaatagggccgggtacagtggctcacacttgtaatcccagcactttgggagactgaggcaggcagatcacttgaggtcaggagttcaagaccagcctggccaacatggtgaaaacctgtctttactaaaaatacaaaaaattagccagccatggtggatggtgtttgtagtctcagctactcaggaagctgaggcatgagaattgcttgaacacaggagacaaaggttgcaatgggcagagatcatgccactgcactccaacctgggcaacagagtgagactgtgtctcaaaaaaaaaaaaaaaagaagggcagattgggaatgctggaaagacctcagagtctggatatttctccaaatattcttccaagttttcccactgcttccaagtaaagatatgctaccgcagggatggtttccaagaatgcctgagttgcacatgtggcagatacgaagttttaaaaaattctcggcagaataaatttggaatattattgacctcaga

SEQ ID NO: 1243802 - DNA, 4001 bp, Homo sapiens
tgctctcaacccctgggaaccgaatacaaacccactgccagcagctcatagtggaagggaagggggcttagagacagcaacctacttgctcaaggccttgctttagaaaagatcagcaatactcaaataaactccaaaccagcaacaagtcaaataatagccaatattacttaacacatagtacattttgaatcacaaaaccgaatgcatcctatttgaaaattatggtagaagtattccaaagcatagaagaggaggccagaggagaatggaaaagtcatttcacgtactccagcttgatttcagtaggggtagcagagttcaagtcttcagggtgtgagctttccggcccaggtgtttcatataattctggacccacttctcctttgggtcagcacagatctccttgcccagtttggttctgaagctgtggaggaaggagatctggcacagttagatggaaccctttgagggtttacccaggagatgacacactgggttctaaacctgcctggtccacctactacaggtgaaggggcacccctccaggacaggaagtaggaggtgtgtggacagaaggggtctctggaggcagccactgctcttgctgcccctgggaaactgatcctggcatctgctaaagggtgtgggctggtgcccatccaggaaacaaggtgtgggaaattataggtcctctttggacctgttgtgcagccaaaattggaggatttgcatcacacagtctggctagatctcatcctaagatctcaagtcagtctgacgtctgtctcctggggcagaactttggattggggaatgtgggagtggggaggagccaggtgagcagggatttttctacccacatgacagccttctggggacacctgctggtggtgatcacatagctcttcagcctctgcaaggagatcttcttactgctaaatgtgaagcagcaagtagatgggacgttgagtgcatctagaaatagttacaaagaaaaagactttgaggatgtgttaggcttttctcagcttgaatacagcagggagcatctgtatgggatgcaaagcaaagaggaagaaatagatcttactcacccccaagcccagcactcccaccctagaccctgaggtgaggtgggacctgtgacatgtgcctcaggatctcaaaggctcagctgcatggtggagacatgtcacagccatctaggggaggccacgggcaaggccagtgggaaaggtcctgggtgtggtcccagatctgcagagtttgggacgatcagatgaggtcaaagaaaaggccctaaatctggagtcagaagcttaggtttcattcttgctctgcaataacctggaggtggatggctagggtcccttctgcctccaacatgggcttcagctttctatctttaaaattagatgttaaagtgaacctctgaggagccttactattctggtgggcttagaagtggggcacttggctgggcctggtggctcacgcctgtaatcccagcactttgggaggccgagacgggaggatcacttgaggtcaagagtttgagaccagcctggccaacatagtgaaaccccttctctactaaaaatacaaaaattagctgcacgtgatggcgggtgcctgtaatcacagctactcagaaggctgaggcaagagaatcgcttgaacctgggaggtgaaggttgcaatgagccaagatcgcacccctgcacttcagcctgggcaacataatgagactcaatctaaaaaaaaagtggaggagcactcgggcttaggtcttccttgaatagagaaacagagggaaagagagggagagtcgaagggaggtgacttacctggctgagcaagtccctgggggttgaaagctgctgtcatgagcagcaggcacagaagcactgcagagactttcatgttgaaggttaagagttggagatttcacaatgtttctttgcctctctgctcctctggctgttccgccggccttttatagggagtggagaagcttggaactctcagaggaccttggcctgagcagggcgttgaccaagtcatgatgaagggggatcctgaatctgctgagctggagctgggcaccaaagacttttctaggaaatgcaagagggaagctgagggctgaaacagcatggcatggcttccttctggctgttcaggccacaaggagccagagaggagaaagggacacagacgcgccccagccattcaccatgggaagccataaaggagctgttttcttcttactttctccaacaggaaagagaaaaacaatgaaaattaactcctgtagagaaagagtgctgtgctaaggactctgttcacgttatatatttagtttgaggaggtacataccattattatcatgcccatttcatagaagaggaaacggatgcagagagattaaataacttgaccaaaatcttatgggaaatgagagggaaagctagaagagaaagctggtctgcttatattttatcaccaaggcagtttcaacttttgtttagcagcagaagtctttttccaagtcaacttttatgtggaagtctaatatctgaaacagattaagtcagatttctgatgacaggggctccttacattacatattgtgtccccttctgcccctcaggcccagagggacatggttcaaacacctctgattgatgcaggccccgtgtttccaggaaggaccattgggtttctagagctgttgatgggagggctggggtggccctcagagcaaagaagtgaggtgtttggcccattcctgggctcctcctgcgaggggcacatatctgggagctgggaggtggggagggaatggcttaaaatggttgaacatgtccctttcccactcatccctagctccaagacttggcacagtttttgtgccttcctggaatactcatccctctgcattccactatagcaaaataagcccagtgaaagtaaagggaagaaataaagagctaggattagagaaataggaaacagtaaatattagaaaggatagatgaagcccaaagctggttctgtagcctataattaagctaaaactctcctgaactgaaaatgaaaaaaaaaagaaaaaaggggctgaggcggggggatcacttgaggtcaagagttctagagcagcctggacaacatggtaaaaccctgtctttactaaaaaaaatacaaaaattacccaggcatggtggcacatgcctgtaatcccagctacttgggaggctgaggcaggagaattgcttgaacctgggaggccgaggttacagtgagccaagattgcaccactgcaccccagtctgagtgacagagtaggactctgtcccagaaaaaaaaaaaaagaaaagaaaaaaggaaaaaggtacatataaccagttgcagagcctgcagacaccaaaaagaaaatgataagaaccttatgccaaaaatttagtttagaggaaatggatgaatttcttaaaaatctaactgaccagggtgcacaaataaataaaaaatagaaagtcattctaaagctattaaagaaatggaatcaggaattgaaaatcttcccacaaaacattctctgggctcaaagggcacaaacagctaattcctccaagcactgaaggaagtggtcatttcaatcttgtgcaatctcttccagagaatatcaaaagattgtacaccactcaattcattttgagacctacctaactttgacacaaaaatgtgtcaagactcacctgagaaaaggatattataagcttgtcccttcagacacacattccattcttttccattctattctctgccctaggaagccaatcttggtgggttacatcagtgaggttgctgaccttctagcttctgactgggtttaggcacaagggagcttctgaggacattagagcagggagaagagttaagttgaggttcttctcctctgttgtctccctgtgttcctcaacctggatacatccctc

SEQ ID NO: 1243803 - DNA, 4001 bp, Homo sapiens
agcagcacactcagatcttcttacaccatctctgggggccgactggcagagaaggctagggacttggccaatatcatgcagccttcatgccttattcgggaaaggtgctccaaataggaggaatatttggaagaaatcccaatagggatttggagacatgccatttgggaatgcaaacccagcccctcctagtgctccaccctgcccatgtccccattgaaccgacaacctgcagagagagcaggatgcccacagcaagccccaaggacaaaggccacagagtcagggcacccaaatcctaacctaaccttgcctgtgcttcctgtgtactgtggccattttactttccccctgttccctcctctgtaaatgaggcccttggactgcatcagtggtttttacactgagctccctggagctctgggggcctcagggactattgtggaggccttgctgcatttgagagtggtgtcttgtaccctactcaacccattttttctgttttacatattgggcctctgtggaagatattgcttgaagaaaaggttttgtggtctaaaaagttttaaaaatcactggattgggtgattttttcatctattttctgattgagaagtttcatggcttttataggagaagcaaggtgacagcagccaccccaagcttgaattatagaggtagcaggaaggacattgtaggccaagagccctgtacaaacaggcacatgttgtggttatggagtggagaaatcaggtgtgtgcatgttatgtgaccctgcttcatagaatcatggatgtgcatcacaatggcctcagaggtcactgagggtggccagatgtctgggtggaagggtctcatcctgttttccagctccattccaggcagcatcctcacgatccaaagaacggcataaggggcccctgtttcctgagacccagtcagagctcctatactctcccaccttgttcctctgagctgacaaatgacatcggagagggcaagtcaaactgtgcacatacccaccaactttagctgtattttaacaaccttcggtttccccccagtttctgaaaaggagagtaggtaaaatggaagagtgataaatagttttggttatctctaaaggcagcttattctaagaaatcagctgagaaaagggggcctaggatggaccccacactgtcgtgtttccccccagcccatacccaagcaatgctgcactcactgggcacaggtgacgctggaagcaggctgggcccaaacctcaggaggccaatagaaaaatgcccttgaggggctcaagacactgctcctaatctccctgaggaaatataccccaaatggggtgggccactcttttgcttagcggcaaagagagagaaattgagggagtagagaggcaggctggtctcactccatgtccttgagggcaaggggggactggtcctggggggcaatgataagagatcaaggccatgtgaggcctggagattcaggatctgtttatttggagactagagggcatttggggtagtggaatgaagcctggagtctcccaagtcaagtctcattggtcaaggctggaagatcccaacttaaactcttaagcagaacctacagtcctaagtctcatctccatcctgctcaccacaccatggggtgaagtgctgtggtgctcagtagataattcatttatataatgttgctatacacacaatttcaagaagataccagccctcctttctgagtccctgctcctggtcttcccctgagccccaacctcactcctgcttatttccctgcaggctctaggttggaaggaagacaaggcattgcactcacgtgaggaggattcagtcttggtccctagggcgatggtgatgaggaggaagaagggaatggcagccacggagatcttcatgctgtgggaagctgttgtgggaggagagctggcctggtgggagcttcagaggctcctgcggtgaggaattgttgagaaatgatcattgaggccaaatattttttaaaataagggagctgagacttggaagggaagtaggaaagcagtgatgcctcagcaatttcatatcctgcacatgtgttgttggtggcctgaaggaagcagggagagccaaggtttaagggaggaaatggtcttccatccccagtgggaagaagttcaactcttttgatagaagcctttccctaggcatgaacatgagcacagggctgggggcactgtgtcacacttagcaaaagatctcaaggctggatgtgtcctgtatccaattccatctcaggccttagaacaggccacgtggggcctggacattcaggatctgttcatctagagactagagggtgtttggggtaatggaatgaggccaggactcctccaagtcaggtctcattggtcaagggaaatcctaacttaaactcgaagcagaacctgcagttctctgtctcatctccattctggtcaccacaccatggagtgaagaagtgctgtggtgctcagtagataattcacttatataatggttgctatacacacaagccactgtcccagttgccttatgaatattagcctatttaatctttagaacagcagttgaggaaacaggctcagaatcaaagcctaagcttttgacagttggtaaatggaactggggttcaaattcaggtggtttggcttccaagtctgtgttctcacccattatgccataaagaaacatgggactcccaacggagctctgtaaaagcttatgggttttctataaagcctttagtcttagtcctttctgaaatcagatagtggatctctttgggaccttctcctggtttctctgacttttgctgcaaagaagcttggtgggaaccctagaaaatgtctaattcagggatagctagtaggtttcattgattagtggtggactggagctctgtgttggaaatgattctgaggccatatccaggcacattgggaagatacgctgtgaccaacgtgcagtttctgttgcagtgcagcttgcatgctatgtatctgccatttgatttgtctaaactggccatttactgaatggaagctgggaatcagaaaggaccagtgactttctcatgtgcacacagtgatttggatgcaggacagatctcatctccgcaggctctcagcttagtgccctcaccatgctgttcttggaggtacatcccccattctgcttgctgatgtggttagatggttatttaatctcctctcctcatctgaatcatcaggatggagaacatctattatttatctttgcccattcacgcagaacctagtgtataccaggtgctttatgaatatacattttaaaagaaggatgaataaacaaattgagccaggtctacatatgtgtatcttataggaaatggctgaaatctcatggttagttgtggagacagtcatcaattaaaaattttctatatttcttatcatcaataacaacattatgtaaacccttcaagttaaatgataataattgttatcaggaacaatctcaggaaacaagttgtttataggaaaagtgagttggaaagaaataatgcttacttcttgtttttgtggaaactagccaacctgccaagttgtttctaggagacttacaggaagttcctgtacttttccagcaagtattgagttcctacctacattagtctgtgtgtgccaactgctatcataaacaatccagcagactaattaaataaaagtttatttcttgctcatgttacagtccagtgtgggtcagtagtgggatgatggtgtgtgtgttgggatcctccatgtactcattcaggaaccaggcctttttctaccttggatgccaccattttcagcacaaggcctccaagcttgatacaaaaagggagaagcagaggaggattgggagatttttgtggatcagttctgaaaatggtacaaattactttcacccacattccatggccagcatcaagtaacc

SEQ ID NO: 1243804 - DNA, 4001 bp, Homo sapiens
tactcgggaggctgaggcaggagaatggcgtgaaccggggaggcggagcttgcagtgagctgagatcgtgccactgcactccagcctgggcgacagagtgagactccatctcaaaaaaaaaaaaaaaaaaatctttacagtggccaggcgcggtggctcacacctgtaatcccaacactttgggaggccgaggtgggcggatcacctgaggccaggagttggagactagtctggccaacatggtgaaaccccgcctctactaaaaagacacaaaaatcagctgggcttggtggcgcatgccttaatcccaactactctggaggctgaggaaggataattcattgaacctggtaggcagagctttcagtgatccgagatcgcaccactgcactccagcctgggagacagagtgaaactccatctcaaaaaaaaaaaaaaaaaaaaaaatcttgacagctcgggagagactgcccattgcagggctaaccaattcatagagatagctaagggtttagacctttcatatacaaatcaaaaaatcctgagcccatatgcccatccacctcctttgctaactcacacacaccaagccagtatttccactgctctaaatcatcctaaggatgagtactagacagctagagactatccctataccccaaagcctgaaaggcttattcagactacccagccctaaagtgtatgctctgtgctgccttgctttcccccgagaaaccccaataaaggttctggcataggttgtcccttccctcctgtttgtgactcctgcccgtgactcctgcccgtgactcctgccctggatgcttcccttggggccccgtgtgtcacggtgtacctccttctcttgggaaatgtaaataatacattcttttttcaatgtcattgacctctttgcgttgacattcacctccacaaattaagattccacaggaacaagtgagacagtgatcttgggtgagtcacttacctggctggttccttttcctctcacaaatcataattttacaccagatggtagatagcagttctagcaccataaaattgtatgattctttttacaaatttacaatttaattacagttcttttgttccagctaaaatatcagctaagggaaaaaatcagataatttttgctgtgaaaagggaaataattggccccaaatgggaccagtcatctgtgtacctttccccgccagggtccaaaggctgcagacagagccaggtctataccctgctggtgctttttaaataagttccataaccatgtctgggctggagagtagtcacaacatgtctccgtcccagagcttgagttaccatggacctggtcacctgggagaaagctcactggactcaccatttgtgaactgggcctgggatccaaggacagcaacaagcatgaggcaggagagggcagccacggagaccttcatcctcctggtgggcaggcagggctggccgaggactcctgggctcactgcttcctggctccccgggataccagctctgcccttgtatttataagaagaggaggatccaggaagtcccagggcagaggtcagaatgctcttctttagctatataatagttaccatgcagtttctaaaaagagaacaaggctgagagtgcaacagaaagtagaggacaaagatgacttgaactgtccctgtggatttcccgaattatcccaatagctacaggcagataaaaaaaaatgtttcaaggaagagtcttccctccaggagattaatctaatcctctaagcctgagataggagtgggggactatcttagactcttggattcaggattgggatgtggtgaatgctgccttttttccctttccagttctattcctgtagttccaaccaggaggtgttagcagtggtgaatccatatcagtctgcagcagcctcagttcttgcctcctcagaagaaataattcaactgaggggtataaggcagagtgagagaccgagacaagatttagagcaggaatgaaagtaaagaacacttggaaaagtgccaagcaggtgactggagagattcaagtgcctggtttgacctttggattggggttttatatgctggcattccgcatgcgcagtggtctgccagcactagggaggggctgcatgcacagtgtgcttactggagttgtacgcatgctcacttgaggcattccttcttgaccagtcaagtgttcctaggtcacataccagttgaactctgccattttgcctcttagtgcacatacttgagcctacttgcctgactcctgagatcttaatgggaaactgttgatcaccagtttgagatatttctatctattgggagactgtctttgctggtgctggctttgaccaattactgttttagagagacagtgtaacaactgcctgaccatcatctgatggttgtctgacattcatggtggggcagggggctctcccgccctgctcatgtctgaataactacctactatgaaacagggattttttttttttttgagacggagttttgctcttgttgcccaggctggagtgcagtggtgcattctcactcactgcaaactccaccttctgggttcaagcgattctcctgcctcagcctcctgagtagatgggattacaggcatgtgccaccacactcagctaattttgtatgtttagtagagacgggggtgttcaccatattagtcaggttggtctcgaactactgacctcaggtgatccacctgcctcggcctcccaaacaaagggacttcaaaggtaagaatgagtcaagctggccacgaaaatggagaactggaaaatctcaagattagaggctagaagaccttcccaggcactgatgatgccacgtcaagttctaaccaccccatcttggaccttcaagtgcctccaaagcctatgataaagggtggccaccagagggaattctctaatctgcgaacttggctgtgatttttcaaacagaatctgccagtggcttctcatggacttgagtcaactccaaggtttgtgtatgagtgtagaaagtccttcagaatagggttctccttatatgcacaactcctctagtttctaatgtaatggcatttaaatgcatattaagtttaaatagtgatgcacctattaatttagattttatacttttttcttttggagttaattttttttttcaggaccccaatactaaatgcctaatgggtaaattggccctgtgcaatactaattcctagcaacccattaactctactcagcagtcagctctgccagaaagacttcttggctgtcgctcccacgaggctgggccaggtgtcccttttcagtgtttctggtacagcatctatctggtacttaaatctacgatagcaccagtcacattctattttaagtgcttatttatttaatggctctcctcattcccccgcccccatacaacaggctgtgtgtgtgtgtgtgtgtgtgtgtgtgagacattaaaaaaaaacatggccaggtacagtggctcatgcctgtaatcccagcacttaagcttgagctcaggagttccagaccatcctaagcaacaaagcgagacctcatttctacaaaaaaaaaaaaacaggcttggtggcacgggcctgcagtcccagttacttgagaggctgaggcaggaggatttcttgtgcttgggcgtgctgcaggctgcagtgacctatgatcacaccactgtactccagcctgggtgacagagtgagaccctgtgtcaaaacaaaacaaatcagccacataacatgagatttacccccttaacaaacttccaagtgtgcagttacaaggtccttgaagaatgtctccaacggtgagatagataccgtacctgctgcacaaaaaccatcgcattgcagtaaagagttattactcagatcaatctcatcgaaggctcacaggttaaaagtttttgaaaggtagtttgggggaggagatgaatgtg

SEQ ID NO: 1243805 - DNA, 4001 bp, Homo sapiens
cttgatttgaattttgacttgaatcatgggcaaatttcttaatctccctaggtttcagtttcctcatctattaagtgggggtaaatgatacttacttgtatcctaggatcatggttagaattcggtgagaaaatgattggaaagcccttaactcagagcctggcacacagaaaggctcaatcagtgcttattataattaagagccaatggtagtaatgactgctcttcttgccttggaaatggcgcttccccccatctctttgatgtatgcaggatactggacttgattggttattgtcactgtgtttcctttgagctgtcctgactacccatcaattggggatactacacaagaggtcagtccagagatctctcccagcccccaaaccttcagagtgcaaatctttttgtagcttgacccctttgcctccagtgagtggcaaagcttgggacatcttgagagcaccatcttgctgatccatgctttgggtgggccattttctctttcttgaagcctgaacccactgcactggcctgattgactctcccaaagagcactgttcccccctcccacacagtccctctgtaagtgatgctcatatcactggttctcaaagcaaagtttacaaagaccagggtcatcctgagagtatgtgggcagattacatggtgcacttgacccttgctcctttgtgtttacacaggcagagtcaggccagactacatgccagggtgaccttaagagagaaaagaggccaggcatggtggctcatacctgtaatcctagcactttgggaggccgaggtgggcagatcacgaggtcaggagtttgagaccagcctgaccaacatggtgaaaccccgtctctactaaaaatacaaaaattagctgggcgtggtggtgtgtgcctgtgatcccagctactcaggaggctgaggcaggagaatcacttgaactcgggaggcggaggttgtggtgagccgagatcgcgacactgcgctccaacctgggcaacaagagcgaaactccatcacaaacaaaacaaaacaaaacaaaacacaacaagcaaacaaacaaaaaaacaaaagcgaaaagaatggctggggcagcctagggcaggtacacgtctttgtcctccccacccccgtcaccaggtcctcgtaaacaatgatagagggaggagatacggaggggcaaaacaaaccccctcctccataggccccaattctccctttccccacagctccaaaacctttcaacccctttcctcttttctgcagattttatttagtcataggctgggggatggagaaggggaccatagattcccaagcagccattccactgggactcattttggttgtctgatagtcccagcaacctgtgccagccatgttgaggaagggctctctcggttcagactcccaattcctggacttagacccacatgattgtttgaaccttccttcctctcgccactcattcttccagggcacctgccacttttctttctcatccgcgtgcctccccctccctttcattgcatgcacttcttgttgcattttctgctgctttcttggcctctcctcctgaatgatcattcctgctcaccacgcttgggactcctgaggaaatggtgacccagtttcctggaactacttaccccagaaagatccggaccaaccccagctctacttacaaaggggagaattggaggtcagaagctatgcatgaaggtggggagagcccacagggtcttatgaggccagagacccgacagcgcccttggcactacctccctgccagctgctccatccccctttctcgttcctgccctacagagacaagtggactcacttggctggctgcgagaagccgaagtaatgataaggatgaggacaaggagagacagggcagcctcggagaccttcatcctctcagcgaggcagtacagcttcagggagagccgaatgaagatgttgtctgttgctggtggtccgcttgccaactactcagctctctggaccttgaccgcatcagagccggtagaggaggagaaacaacaggcctcagtgtttgctgaaacagagggcagcagaggatgggacttggtgcagagctgaattcagtagaatctgaattcacgtgaagaaatgggcgaatgtgtgtcagctaccttacatgccctatcttatataatccttaaaatagtgaatagcgattattacttccctgggactactgaggcctagaggctaaataaattgtccaaggtcacctgggtggataggcggatgaaaaaccagatctgtttgatttcaccatgttacctgccaccatctgtatgttggggaagggcaggcagggttgaaccaccccagcttcccccaggtgatcagtcttggggagatgagcacaaagcaggattacagagcccagactgaggcaaaggtagggcttagttgcctctgagaaggaaatgccctctcccagtccaaggccacatgattgagctcacactctttcctgtcacagtgtatgctaatactccaaaaaaaaaaaaaaacaatgtgcctgatccttgggtccccatttgttgctggaccgtttgacttatttgtcaatgtttttatttatctctttggacctcggactttggactgatttttaggtgtagccagctcgctgatccctcctgggtgcccccatggccaaccatgaccagcaggggaccctccaactctgtgcacctgacaacctgcgtctgtgctccaggactccagcttctgcccctctggcctgggctctggctggacctgtcccacagcttcctctctcttcaggtgcctcaggacccttttccatgttgaaagctgcatttagagaagagatcaaagatataagggattttgctgttgatggacagcaagctttagaggcataggtgatgtgtttcaggtgttgagggcagtgggaggcaggggcagaaacagggactgtgcagatccttatggggctttctgcttggcatgactgctcatagataggtaaaccgtataatgcagttactcctggtgggttcaaggcttcacctggtggtgaagctgtggctttttgtgagggcagggagggtacgtatgtggggcatcctcttgacctctgtttatggaggtgacaaggcctgagaagcctggttgtgactttggcatgcaggcccccatatggcccttaatgtggcccacaagcccttccttatctgtggaaggctggaggccaggaaagggtggtcataatccctactctgggcaagctcttattccaagtacacagagctcctccttgggccctgaagataggtttgagagcttattcttggagcatagtcctcctcttgatttctgtcttattccatctgtccctctatccctccctccctctttctctccatccatccatccatccctccctcccttcctccctcccttcctcccttcctccctcccttcatccctccctgcttccctccctccatccattcctccttcccttcatccttccatccacacattcttcccttccttcatccatccatccatccatccatttcctgaacacctggtatgggctaggctttctgctaagccttctaggggataaaaaagttagtaaaacaatatagtataatctgatgtgtgtaagcgaaggggaggggttggataaaatgtcttcatgcatcattcctattccagacagcagtgaagaaaggccttgaaaacagcacagaaaaaaggactatggagtttgactgctatagagagccctttatgaagtgttacctaaaaaatcaaatgatgatttgtagcttttacacttgtcatgaagcttaaataagataatgcatacagactgcctagcagagtgcttggagtatagaaagcattaagaaaacggggtctgctactgttgttgctgaggaggagacggtctttacactgcttttc

SEQ ID NO: 1243806 - DNA, 4001 bp, Homo sapiens
ccttgtcctttcttcattttagagttgtttccctatgctctggacagacatttaagccatatcacttaattcttgtggattaagattctctaagtaaaatcaaagaacttcacaaaaggtttcaaaatgttctgggctattttctgaggacttagatatctaacctagatctgaaaggcaggagagggctaggacccattgttagttgggaaaactggggcctaactcagtcattcacaagatgcaaactctgggtctagttggttcctagggtgaggaagtggcagagttccttcagttctcctgagaagctctactcctacagcgatttagagacgatggtctcttgctgggaaaagtctctgtagactgaatgaagttcctacccaaaagagatggaacaaaggccagccattccaagagctatactccctgaagagggagcaagggagtgagagtaagacagaggcagagatttaaaagaaacactcaaagtcaaggatgaatgcctgacttccttagttccttttgtgccctacttcacagtcctgagcagtgaggtcttcatcaacttcttgctggtcccttttcaagagtggaagaaatttacttggtttttctcaggttctggatgctggttccctcacggttaaggcaccccattgtctcctgcctctcttatgtttctccatatccactgcaaatttgctgactccagcagctggtgctcttaccctggcgtaatgtcagcatcagtccttctgtctgcaaatagggcatatggaggagacaacccatgggacaagggacaaggagcacgtaagcacaagtaggaggtgggagctactatggactttcatatccagtgtgaaggtaaaatgaaggtaaaatgaagacatttccaagcaagcaaaaaatggagacttcactatcagaagacccacagtaatgaaaatactaagaggattcctttaggcagaagaaaagtgattgcagatggagctcagagatgcagaagaatttaagaggacaggaagagcaaatatgtgatgaaaactaaatgaatattgactgtataaagtaattaaaatatatcataggattttaattttaagaccgctcaccactggttttataataggcaaccgaaaatttgcagtgcatctactgggaggtgtaggagaagcagcagatgcatggggtgtgaatcttatctgagggaacaaagacaacaggagttgctcaggagaagaagcccaggcgggtcacaaaggagcaaagggagacagcatagctcagagttgaggcctgcaggaaaagaaagctggaaataatctggctttttgtttgtttctccttaatttccctagtcttgtctctccattttagtctttattttacgctacagggaatcaagctccctgaatagtctatgcccttctcctaactctccttggggaattttttttctaatagattaaatcacaagatagctgagaaaagtatagacatcttttatgttacccaaggggttgaactctaggagactgctgaggtcattgtaaaacttaccagcaccagtgagaactaaatagacctagattctacctcacgctaataacccaatgaattagacttcaaccatctcatttatctcagtaggataaaacttctctgactcccatcctgctgcccagatcaatagactgcttttcaaccttcttgaagaaaacaatgatgtcactttgaaaccccatttgaggatccctaatttcacacgagggttttcaggccacagcacttggaagatgtcgcctgacttctgcccagggagccatcaaagcacatggatgacagactcaccttgtgcacaggagcagagggccatggtgcagacgaggacaaggagggcagctgcaaggcccttcatgatgctgggcaggcagagaagtggtcagagtgagctggggcttggaaactcacaactcctggcctccttctggggtatgagctgttgtctctcctttttataggcagactggaccatgggaacattggaggtgctgatgcaagacattttaactatggtggtgtcatgtgagttctcagcccagggttgcctatggttacttgaaaggtttagggtacacaaacgagtggttcacttgttgattgaggggcttatggagaagttgtatctccagatgggtgaccaggagttggaagcacccagggattatgcttaggattatgcataatcatgtgattatgttttcacatgacagatatttctcagaaatgagtggtcacagcctcctttgatagagcagaatgctttaatggattttcacaattgtttttccttttaagagagtcacatgcttcaatcttttatatacagttaggcctttcgtgatctaatgagaaatcttcccctatcctaaggcaataaagatatcctcctatgttaacttgtagaagctttattgttttagcattaatatttaaattacaatccatctggagttgatttttatgtttggtgtgaagaaggattcaagatttattttttgccacatgaatacccaatggaccttggcaactcattggtaagaccattgtataagtcaggattccccagagacacagaaccaatggtgtgtgtataaaaaataagaaattagagaattggctcatttaattatgaaggctgacaagttccaagatctgcagggtgagctggcaagctggagacccaggagagctgctagtgtagtcccagtttgagttcaaagacctgagaatgggcaggcttaaggcccaggaagagatgatgtttcagtttaagttcaaaggcaggagaaaaacctatgtcccagtgtgaaggcaatcaggcaagaggaattccctcttacaggcaggagggtcaggctttttgttgtattcagaacttcaactaattgaatgaagcccaccacattagagagggcaatctgctttactcggtttattgatttcaatgattttgtggtctgcttttggaatttctgttctgttccaatggtttattttcctatccttgtgctaatacattatgttaatttgtttttcactttgaaggagatatccctgtatgcccctgacaactggactcataaaacctttcctgaaatgacaagtccataaatagttaaaagatttatctcccacctcatggaatacatacgtttttttctttgtatttttctttctttctttctttttgtttttgagatggagtttcgctcttgtcatctaggttggagtgcaatggcgcaatctcggctcaccgcaacctccacctcctgggtttaagcgattctcctgcctcagcctcctgtgtagctgggattacaggcatgtgccaccatgcctggctaattttgtatttttagtagagatggggtttctccatgttggtcaggctggtcttgaactcccgacctcaggtgatccacccgcctcagcctcccaaagtgctggaattacaggcatgagccaccgcacccagctggaatacatatgtcttacagagtgtccaacatatggccacttcttgtctatcatgccctatcaacatgatgtcaccaatgtaatggatcaatgtgttgttttgagagatacatgaaaattcagatctcttcagactacagtatgcagaagatgagagttaatagtctacaggaaaactgtaagtgaatattttccattcttatgaatgggaactttttcttatcctctttcctacttgttatgggacagaatgcatttgccaaatcaataggtacataacatgtacttaatacctggcatgtgtcagtacctggttatagaagctgcaatcaggttactacctggttgagctcacagtgttctacagtcattctctaggatccatccagtttctgcagaagccagacttgcaaattaaatagatatgataataaccattttccttgcat

SEQ ID NO: 1243807 - DNA, 4001 bp, Homo sapiens
tcatgttcctttgtcaccaccaagctcatactctcagctttgtaatttccttcaagaaaacactggaagtcaggttttgtacaaaaatatatttatttggtgtaatagttacaaaatattcatttccacaataatattttagcaatgcattggaatgttaaaaaaaattctttgtattaatgattcttgcaaagaccctcaaaacatcccaggggtagaactgtggttcaagaggaaaagcaatttccccaagtctctgtatctaaaaaacactagtaccatgaaagataaacttaaaacatcaataacttaaataagaattaacattacttaaggcataatgtttcacatcaacaaacaaaattcattataataaaataaaacagggtgtctggggaaagctaggggaaaataagttagctgcagattcttgggttgtggagtgagtgttcaagtcttcggagtttgggtttgcttgtccaggtggtccatggaatcctgaacccacttctgcttggggtcagcacagatctccttggccacaatggtcttgaagctgtggggagggaggacagagttagatgaagttcctttgcagttttggtctagaagtgcagcccattctgcaccaaagggctgccatgggagctagaggaggaacgcaggtggaaggagggaacccagggcaaactgctcctataggtgtccaggtggagccatcctgacttcaagctaaagaaattggggtgttctgaataggcacccaggtggagagtgatgttggggttcactttttcccttggtgcctcagttttcccattgggaacctttgtacattaagttaaatagtgcactctctgactctaggtttatgaggcttgtcccttgctccacaaggaagaacttcaggccagggaaggttggtgtgctgaactcacatcacagcttctttgggacacttgctgctggtgattcttctatagctcgcgagcctctgcactgagatcttcctattggtgaagttataacagcaggtgactggggcattgattgcatctggaaaataaaccacaaagaaaaagcattttaggatgaactggattattctgatcttaagagcagaaaagagtcatgaggaaaaagcaaaaggcaggcaggagaagacaaagagctcattaaatcccagtgcttctgcctatacctcagagctagaatgtgatctttgacccaatgactcagtttcctatgctgtaaaatgggtatataacattgataatggacagagagaaggaggagctgttaaagctagataatgcctacaagtgtcattaagacggaccaataatccagatgatcagcaccagggaagatcagctggggagccccactatgagcctccttttagactctgaataggctatgcctggtcatgagtttccctgatactcattacctctgcagagtcaccgtctctggaagctaaggtgaatgaagcacagaccagattctgggtctccagcgtgtctggaaacagcctacacacccaccctctctttgattaccctgatccccaaactctgctggaagcagctgggggagtaactgcgctgagtgtgttcccagagctggaatcctggaaggagctggatttggggttcacagctggaattctagttcaggctctgccgagcagcagctgtgtggttgggctcaccccttgtccttttctgagtcaccttatcttggaaaagtagcgttaaagcaagactgtgggtaccacgtctgcttggatggtccatgataactcagagagaagacaatgtggttcaaggagaagaagagggggccttacctggctgagcgagcccttggggaatgaaggtggctgctatgagcagcaggcacagaagggcggcagagactttcatgctggaggcgagagtgcgagcttcagtttgagaattggatgtttctgggttagtctcagcctctcggttcctctggctgctgtctctgcctcttattgaaagcgggcagagggagagagggcggagtcaagcaggaggagggatcttccatgagtgataagtgggctgttaaatctgctgagcaaatgcagcatcctgtggatttccaggaagtaggaaagggaagcagggggtcaggacgagacactttttccattcactgctgagaccaaatgagcaaatggggaggatggggtgccattaagcccagactgaccacagatgtgaactaagagggttatttttaaggattctgctttctctgaagcgaaaactgcagaaaaggaaggaagcgaggaaactagatgaaagcatgtcaggctcgctgccagcttaccttcaggccacattccaaggggcctcccagccaggaaggagctctcaagctttggccggctccctgacaatgcattaaatccatttgctcattcaaatgcagaatagtagcatcatagaagcctagcagaactgtaggattgtgtaaacattgaactgaattctaagagttctagggtttcagacttggacaaaggcatagacagcatgtagtgctgcagaagaaatgccagtgtcatactcacagagtgcttactctgccaggaatattctcagacctttacaaatattaactctgtaaattccccaactttatctagtagggattgctaattttcatgttatagatcaggcaactgaggcacagaagggttaaatagcctgctcaaggtcccctcgagcacagaacccaggcagccctgtccccagtgggctgccacctctctgacatactgctggaaggaaacgtgtacaagtcctccaactagttgcctgcttgggtcctctctctgtcctcagcatcttccaaatgggcagacagctaaaggagaatctagaaacattcctcatggctaagtcattatgagttaggaggctgttgctagcatagcaggcagcagtggacaagaagttcatccctggttatggcagctattctcctggcttccttcttaatttccaagggacatgagtaagcagtggaggagtatttcgggaattggaaagcctgacttcattcctcagttgtgccttagatttcctcagaaactacagaagcacactgataaaaacccaaagaccttagaattcatttcagtgaactgttgtctcttacaaatatgataggagtacttgaggcatgttaatggctgggctgagtttaaaattctgatctctcgattctcctagcccactgcctcctccttctgagccttgcggtgcccttgcccaatgggcatacaaagactagtgacttctttcataaagggtcactgaggcaatgtctataaatgcatggggtttcttgaaagaaaacacttttcactacacttgtaaaaagaaacgggttgtattcaacaaatgactgttttatttctagtaagtggtcagtaatggcattgttgagtgcattcagggagtcaggtatggtgctgacatactttccagcgctgcctgcccagtcctccaaccaacccagctttcgttaggttaaaactgaagttatttgtccagtaactcagacagaatagtagatgtgctgagactcccacccaggatgtttccattccagaatctcttcttcctgggactagacttgatgtctcatgatggatattggtttcctggagaatcccagagcagagactctatggagtggccatttcagactctggtggaattacaaaaagcaggatgaagagagaacaaatcaactcgagccctgctttgcttgtgcctcttgaggagccttattcttgttctgcctgaatctcactagttactccttttctccccaaccagtgttgaaacttctctgtgtttgtctcagtcctctgctcatgcctcaatccattcttatccaatgaataaaatgtttccaggactagagactgtgcaactttgtgtaggaatttcttc

SEQ ID NO: 1243808 - DNA, 4001 bp, Homo sapiens
aggaggtagaggttgcagtgagccaagatggtgccactgtactccagcctgggccacagaatgagactccaactcaaaataaaataaaatataataaatatttacttttaatataatttaataactattaaatatattttaaatataatgtaataactattaaatagactttttctttttttaaagttaaattaaattaaattttatttgactttaagttctggtatacctgtgctgaacgcgcaggttcattacataggtatacatgtgccatggtggtttgctgtacctatcaacccatcatctagggctgctgcatgcaccaggtatttgtcctaatgctctccctccttttaccctccactccccgataggccccagtgtgtgatgttcccctccctgtgtccatgcattctcagtgttcaactcccacttacgagtgagaacatgtggtgtttggctttctgtttctgtgttagtttgctgaggatgatggtttccggctttatccatgtccctgcaaaggacatgaattcatttctttttatggctgcatagtattccatggtgtatatgtgccacattgtctttatccagtctatcattgatgggcatttgggttggtttcaagtctttgctattgtgattagtgctgcaataaagatacatgtgcatgtgtcttttaatataatatatgtgtacttttcatatatttaaaaataaatatacttttaatataatttaatgactatattaaatatcttttaatataatttaataaggatattaaatatacttttaatataatttaatgactatgcatttaatataatttaacaattatattaaatatactattaataattttaaagctggctttaaagttgatatttacttaacattttgaaacataaagacttggcaataacgattcagctgccgaattagtcccccaattgctttccagtgttttcaacttatttcttatatggttacattaaatgaattatatgtaatgagacatgtgggtatattttaatatgctcaatatggtttgggtaaggtaaaaaaaagatcttaaatggccttgtcgttccataactacttcctaattagctcatattttaattccaccgcttaatagttgtgtgatctaccaagttatctaaggttctgtgcctcagttttctcatttgtaaaatgtcaataataataatatgaaaaaccatataaaagttgatgttttgtttcttccctacaaaagtaaaaaatttgcattttttaaaatctaatacatatcccacagggttgttaggtggaactgatgtgttaatatctgtaagacacttagaacagtgcctgccctgtacataggaagtactagaagtgcatttgttaaacaaaaaaatacgatggttaggtgaccttggttgagtcatttgtgtggcttgttccatttcttctccaaaatgatatgatagatactactagatggtatgtaacagttttagcatcatacaattctatgcttctttctacaaatttgtaattttactacacttcttttaatctagcacttaatagtcctatgtctgctaagggaaggtatcaaataatttttgctgtgaaaagggaaatgattggccccacattggaccagccatatgtgtatattcccctcccagggtccaaagcctgcagacagaaccaggtctatactctggtgctgcttttaaatgagtaccatgaccacgtctgggatggagagtagttacaggagggcaatgtgtctctgccacagagcttgagttaccatgaacctggtcatctgagagaaagctcactggactcaccttttgtgacccgggcctgggatccaagggcagtaacaagcatgaggcaggagagggcagccacggagaccttcatcctcctggtgggcaggcagggctggccgaggactcctgggctcactgcttcctggcttctcgggatgccagttctgcccttgtatttataagaagaagaggaagttacagggcagaggtcagaatgctgttttttgacttatgatagttaacaggctctttctaaaaaggaaacaaggctgagaatgcaataggaagtagacgacaaagatgacttggactgtccttgtggacttcccgagttgttccaataagtacaggcagagagagcaaatactttatgatggatacttccctctgggagattcattcatcctctaaacagtggagttttttttcctcaggagctaaccaccttcagatgctcaaatagcctgtacacatggggaccaccagagagaacacttcaacttgtagagctgtgatctctgctggtaaacacagctcatacgacatcccgtaatgtacagcccatgatgtgtactcacacagcatgattgtctagcataagctgagctactctagaatataatggggagagtgtagggcaaggatgagcacatgggagctaaaatgtcgccttgttggggtagcctgccttccttctcagccctgcgcttagtctctgggaaaggaatagtcctcgtccagtgtctggagatatccttgactcctctgtttatctcataccccatatctaattcattaataagtatttttggccctaattccaaaaatatagccagaatcttattattccttcaaaagaaaactcccatttattctctactactattctcaatgcttcacttctgagactacctggtgttagcatagaccacacaggttaagggctcggtcccgtgaggctggcaacacttcagatgccaatctcaaatagtgggtccccaggttacccacaacttctgtttgacttggctacacatcagaatttcccaagaccccctcctcagattccataattactaaagtagctctcagaactcagaagaacagtttacttacagggttatattataaagcatacaactcaggaacagccaggtcaatgagatgcatagggaaaggcatggggagtgggtttggagcttctgtgtcctctccaggtgtaccatcctctcagtgcctccactgaacactgttccaagttcaccaacctggaaactctctaaaccccattctgttaggtttttatggaagatttattacataagcatgattgattaaatcattaaccattagtaatcagatcaatctccagcctctctcccctccctggagtttaggggtagaggctgaaatttccaatcctttcatggttggctcccatggcaaccagttctcatccctaaggctttccaaaagtcacttcattgacataaactcaggtgtggtaggaactacttgtccagacttccaggttgtacgtgcctgagtaatgagctgatccttcttatacctcagcatcagagaatccccggtgcaggaaaagtggggtgtgcatgatggacaaggtgaggtgctgtcagattataccgtcttgagctgggcagagcctgggtgcaactggctgctgtagtggtggctagagtcagagataaagctgatagaatggaagtggtgtacagaggagcctgacacagtattagatgcatatttttttagtgaaagaatataaggaatagatttcacaatattcaccaatcagtatgttgattacacaacatattgtcatttcttgacagggattgctttcagcttttgctcattcagtatgattttggctgtgggtttgtcataaacagctcttattattttgagatatgttccatcaatgctagtttattgagtgtttttagcatgaagtgttgttgaattttatcgaagaccttttctgcatctattgagataatcatgtggtttttgtcattggttctgtttatgtgatggattacatttattgacttgcatatgttgaatcagccttgcatcccagggatgaagccatggataagctttttaatgtgctgctggatttggtttgccagtatt

SEQ ID NO: 1243809 - DNA, 4001 bp, Homo sapiens
ttccctccatttcacctcttcctaatctttgcctatgattcctcttaaccagtgattttgatttgccagaaaaacaaaaccaaactcaatactggtttaccttttaaaagagcatctttattatttccccaggccgatcacagccctgaacaaaagcatccgatacacatttgtcagtctggtggctttggtgccatgactgcctacacaggctgatgacagccactcggttgtcaccagacgcggtgtgagggaagggggaggggacaggggaactctcagagcaaacaatcacaaacacactgtgaaatcgaaaataaattacaaaaactaaatagtataaataaattaaaatttaagttaagaagagtcccacagtgtggctgtttggcaacaaccagtccatagaagaggtagctgtggaggtcacacgcatgttcccaaggctcaggctcctgctcctccccactgggcccaccgaggtcgctgggcctcgaagcttctggacccctcaggcactcagctccaggtcgctgacatatttctggacccactcctcactggggtcagcacagacctgccggcttcgcttggttaggaagctgtggagaagggaggaagagttaagcactggggaatccagcaggggaatcctgggcccaccatggccccaccattctgctctctgtcctgggcagctcagggcttgctcctctttcaggggccccctgcctatctctgtctagagagcttctctcagtgactcagtaggggtggccctcagagtgtcccgctgcctccttcttcctgtccctttcctctgggctggggcagcccttcctgactctgtaacacatgcctcactccagctccaagtcaggtcacacctcggagccctgcgtcctgtatccccgataggctcctgaaggctgggcctttccaggatagccttctggcctgtctctgccccaaccctgaccctccctacctccatagaggtgagcaggaagactggcacttacatgacaccgggcttggagcactggctgctcgtctcaaagtagtcagctatgaaattctgtggaatctgccgggaggtgtagctgaagcagcaggcggtcggcgtgtcagcagcaactgtggagaaaggaagagaatgagcccgagtcacagctcagaagaaaaggccaggcagcttctgatccccgagcagttgaggaaggcaggcttgctcagaccaagtgactggaaggcatttgggcatttttgctgagaaatgtctctttgtttctgtctgtatccttctttctccttgactcttcatagtgggttctctgtttctctgtgtgatccagatacctgaacggactgttctcttatctcagttctcttcagggaattttgtctggttcaagaagtcataccccaacccaagagaagccttggacatctctcataagacatccaagggacagagctcctgggagacctagagtgagctggagagtgaacaacataccccactgggaagtaagcagccctggattctgcctcttgctaactgattcgtttcgaaccctgtttttctatctgtaaaagggactgtaactcccctgcccctgcctagattctcatacctggagactagggggctaagaccccttctagagataaaaataaaagtcttaaagagaaagaccaagatgtttggcagccctttaagaagttctcttttctcttgggggcttttaggccacaagaaaagattgatgtggtctaaccatggccagagagtggtgatacccacaacgaaactcagactcacgtgatgcagagaactggttgcagagagccatggtgcagaggaggacagcaagggcagcagtggagacctgcatgattctgagcaggtgacggaatgtgggctcgagtgtcagcagagccaagaaaggactgaccactgtctgctgcccgtgtccttctgaagtctgaaaccagctctcctctttataggcagccctggcggatggggaaatggaatctgggggtgaggagggaaatttttaagcgtagtgatgctgtcatgctaagttgcacaactcagggtccctggtgaccacaggggctcaggatatccaagaatagcatctttgagctattctctaactctcagctctcaactcatgacttgttatagtttcatagggaaatggtttctcctgtgagtgtgaagaggggtatatgtcaacccaaggctattcttagtcagtcccttctcataagaactggtctgtgcatgaactctccagccccattccttcccacagagctgcaattctgcttcctcagctgctataaccacagggatagggttgatgggctgatgctgtggagggctgcacaacccttcctcctcccagaggcaaagaactgaatgaaagctggaggaatagaaagcatgaggtcatgtttcagtcatttgtctatttattagtcatgtagtgactagggcgctgtgttaaacgctagttgtggatcataaaaatactttagaggtgggtgtcaatatgtcaggtgcctagaaatatctgtagccattaacctagaaaaagcatttctaggaaagagttctgtggaaacaacccaaatatggagccatcttcaaacataaagatacctgacccagcatcgtttataactctaaaataaacaaagctaaatttttctccatcagggaatgataaattatccactagatcatttattattaagtctctaaaatgaatgaagtggcataaatatgcttataacatcagtggttaaaaaaagcaagatacgacattatacaaattctacaaagtctgaagaattgtacaaatatatatatatatttgtactatatatacatgtatttgtacatatacacatatatatttgtacaaatatatatatattccttgccaaccctaagcatggaaaaaaatacaaaggcttggaaatacatgccttaaagaatgaatagttcttatatttgtgtgataggtccctgggtgatttattttcttatttttttctttttctgaatttttctcattttacttagttagactttattaccttcttggtcagcccacaaatttataaactaatttttaaaaaaacatttccaacatcactggttgaaaaataggttgttgtcagttgtttaatctgaaagaaattattgataaatatgctgaagtttctgttcaatggttttggccaaaatgaagtcttgatttcccatttctttgaaccattttaaggatcctatactatacttacataaatcatgccaaattgaagcagttttttacttattcttttcaatacataatttcagtggtgtggaagggtctctaccttctcagccagattatatgcttttttttcttttccatactttgttattttattctttcacaatcaatcagcatacctcattttataatgagaaatagatttagttggttttaatgatctttgtttctgagatgcccctgatctcgtgggggcaggtagagtgtatgaacaggtaattgtagcatttagccgaaagtgctaggactcctagtagaaaaagaaatgaaagctcagaatcccacgaggggaagaagtgaccttccaccagagggttggggaaggcttcatggaagggatggaactttagttgtgtctggataactgcccgggatttaggcatctatagatgagtgcccagctgaggcagagtcctgagtgtgacattgtgggttcagaggaaagagggggtgcttcagtggagctgcagagcagtgggggtgaatatggatgataaagctaaattgggaccaaaccaggacaggccttgtattccccccaaaggggttagagttgatacatttgatgctggagaataacagaggacagaagccaagtgcgaccatgcctttggaattctgtcctttctaagtgtctgtaga

SEQ ID NO: 1243810 - DNA, 4001 bp, Homo sapiens
cccatctctcccaatttccctccatttcacctcttcctaatctttgcctatgattcctcttaaccagtgattttgatttgccagaaaaacaaaaccaaactcaatactggtttaccgtttaaaagaacatctttattatttccccaggccgatcacagccctgaacaaaagcatctgatacacatttgtcagtctggtggctttggtgccatgactgcctacacaggccgatgacagccactcggttgtcaccagacacactgtgagggaaggtggaggggacagggggaactctcagagcaaacaatcacaaacacactgtgaaatcaaaaataaattataaaaactaaatagtataaataaattaaaatttaagttaagaagagtcccacagtgtggctgtttggcaataaccagtccatagaagaggtagctgtggaggtcacacgcatgttcccaaggctcaggctcctgctcctccccactgggcccactgaggtcgctgggcctcgaagcttctggacccctcaggcactcagctccaggtcactgacgtatttctggacccactcctcactggggtcagcacagacctgccggcctctcttggttaggaagctgtggagaagggaggaagagttaagcactggggaatccagccggggaatcctgggcccaccatggccctgacatcctgctctctgtcctgggcagctcaaggcctgctcctctctcaggggccccctgcctatctccgtctagagagcttctctcagtgactccaggcaagggggccctcagagtgtcctgctgcctccttcttcctgtccctttcctctggcctggggcagcccttcctgactctgtaacacccacctcactccagccccaagtcaggtcacacctcagtgccctgcgtcctgtatccccgataggctcctgaaggctgggcctttccaggatggccttctggcctgtttctgcccccaccctgacactccctacctccctagaggtgagcaggaagactggcacttacatgacactgggcttggagcactggctgctcgtctcaaagtagtcagctatgaaattctgtggaatctgtcgggaggtgtagctgaagcagcaggcggtcggcgtgtcagcagcaactgcggagaaaggagagaataagcccgagtcacagctcagaagaaaaggccaggcagcttctgatccctgagtggttgaggagggcaggcttgctcagaccaagtgactgcaaggcatttggggggttttgcagagaaatgtctctttgtttctgtctatattcctctttccccttgactcttcatagtgggttctctgtttctctatgtgatccagatacctgaatggactgttctcttagctctcttcatggaattttgtcggttcaagaagtcataccccagcccaagagaagccctggacatctctcataagacatccaagggacagggctcctgggagacctagggtgagctggagagtgaagaacagaccccactgggaagtaagcagccctggattctgcctcttgcaaactgattcgttttgaaccctgtttttctatctgtacaagggactgtaactcccctgcccctgcctagattctcatacctggagactaggagggctaagaccccttctagagataaaaataaaagttgtgaagaaaaagaccaaggtgtttggcagcgctttaagaacttccttcttttctcttcggggctctcaggccacaaaaaaagactgatgtggtctaaccatggccagagagtggtgatacccacaacaacaacatggactcacgtggtgcagagaggacctggttgcagagagccatggtgcagaggaggacggcaagggcagcagtggagacctgcatgattgggagcaggtgatggaatgtgggctcgagtgtcagcagagccaagaagggactgactactctttgctgcctgcgtccttctgatgtctgaagccatctctcctctttataggcagccctggcggatggggaaatggaatctgggggtgaggagggaaatttttaagtgtagtgatgctgtcatgctgagtgttgcacaactcagggtccctggtgaccacaggggctcaggatatccaagaatagcatctctgagctactctctaactctcagctctcaactcatgactggttctagcttcatggggtttctcctgtgagtgtgaagaggggtgtgtgtcaacccaaggctattcttagttgatcccttctcataagaactggtctatgcagccaggcatggtcgctcacacctgtaatcccaacactttgggaggccgaggctgcagatcacctgaggtcaggagtttgagaccaacctgaccaagaaagagaaactccatctctactaaaaatacaaaagtagtcaggcgtggtggcacatgcctgtaatcccagctactcgggaggctgagggcaggagaatcgcttgaacccaggaggtgggggctgtggtgagctgagatcatgccattgcactccagcctgggcaacaaaagtgaaactccatctcaaaaaaaaaaaaaaaaaagaattggtctatgcatgaactctccagccccattccttcccacagagctgtaattctgcttcctcagctgctataaccacaaggatagggtcaatgggctgatgctgtggagggctagacaacccccagtcctcccagaggaaaggaactcaatgaaagctggaggaatagaaagcatgaggtcacgtttcagtcatttgtctatttattagtctcggagtgactggggcgctgtgttaaacgctagttgtggatcataaaaatactttagaggtgggtgtcagtatgtcaggtgcctagaaatatgtgtagccattaacctagaaaaagcatttctgggaaagagttctgtggaaacaacccaaatatggagccatcttcaaacataaagatacctgacccagcatcatttataactctaaaataagcaaagctaaatttttctctatcagggaatgataaattatccacaagatcctttattattaagtctctaacgtgaatgaagtggcataaatatgcttataacatcagtggttaaaaaaaaagcaagataaaacattatacaaattctataaaatttgaagaattgtataaagatatatatatgccatgccaactctaggcatggaaaaaattaaaaggcttggaaatacatgccttaaagaatgaatagtgcttagatccatgggtgatttattttcttatttttttctttttctgaattttcctcattttatttagtgagactttattaccttcttggtcaacccacaaatttatgaactaattttgttttaaaacatttccaacatcactggttgaaaagtgggttgttgtcagttgtttaatctgaaagaaattactgataaatatgctacagtttctgttcaatgggctttgccaaaatgaagtcttgatttcccatttctttgaaccattttaaggatcctatactatacttacataaataatgccaaactgaagcagttttttccttattcttttcaacacataatttcagtggtgtggaagggtctctaccttctcagccagattatatgcttttttttttcttttccatactttgttattttattattttgcaatcaatcagcatatctcattttataatgagaaatagatttagttggttttaatgatctttgtttctgagatgcccctggtctcatgggggcaggtagagtgtatgaacaggtaattgtaaaactcttagtagaaaaagaaatgaaagctcagaaccccatgaggaagaagtgaccttccaccagagggttggggaaggcttcatggaagggatggaactttagttgtgtctggataactgcccgggatttaggcatctatagatgggtgggcagtggaggccca

SEQ ID NO: 1243811 - DNA, 4001 bp, Homo sapiens
cgcagcgctccccatctctcccaatttccctccatttcacctcttcctaatctttgcctatgattcctcttaaccagtgattttgatttgccagaaaaacaaaaccaaactcaatactggtttaccgtttaaaagaacatctttattatttccccaggccgatcacagccctgaacaaaagcatctgatacacatttgtcagtctggtggctttggtgccatgactgcctacacaggccgatgacagccactcggttgtcaccagacacactgtgagggaaggtggaggggacagggggaactctcagagcaaacaatcacaaacacactgtgaaatcaaaaataaattataaaaactaaatagtataaataaattaaaatttaagttaagaagagtcccacagtgtggctgtttggcaataaccagtccatagaagaggtagctgtggaggtcacacgcatgttcccaaggctcaggctcctgctcctccccactgggcccactgaggtcgctgggcctcgaagcttctggacccctcaggcactcagctccaggtcactgacgtatttctggacccactcctcactggggtcagcacagacctgccggcctctcttggttaggaagctgtggagaagggaggaagagttaagcactggggaatccagccggggaatcctgggcccaccatggccctgacatcctgctctctgtcctgggcagctcaaggcctgctcctctctcaggggccccctgcctatctccgtctagagagcttctctcagtgactccaggcaagggggccctcagagtgtcctgctgcctccttcttcctgtccctttcctctggcctggggcagcccttcctgactctgtaacacccacctcactccagccccaagtcaggtcacacctcagtgccctgcgtcctgtatccccgataggctcctgaaggctgggcctttccaggatggccttctggcctgtttctgcccccaccctgacactccctacctccctagaggtgagcaggaagactggcacttacatgacactgggcttggagcactggctgctcgtctcaaagtagtcagctatgaaattctgtggaatctgtcgggaggtgtagctgaagcagcaggcggtcggcgtgtcagcagcaactgcggagaaaggagagaataagcccgagtcacagctcagaagaaaaggccaggcagcttctgatccctgagtggttgaggagggcaggcttgctcagaccaagtgactgcaaggcatttggggggttttgcagagaaatgtctctttgtttctgtctatattcctctttccccttgactcttcatagtgggttctctgtttctctatgtgatccagatacctgaatggactgttctcttagctctcttcatggaattttgtcggttcaagaagtcataccccagcccaagagaagccctggacatctctcataagacatccaagggacagggctcctgggagacctagggtgagctggagagtgaagaacagaccccactgggaagtaagcagccctggattctgcctcttgcaaactgattcgttttgaaccctgtttttctatctgtacaagggactgtaactcccctgcccctgcctagattctcatacctggagactaggagggctaagaccccttctagagataaaaataaaagttgtgaagaaaaagaccaaggtgtttggcagcgctttaagaacttccttcttttctcttcggggctctcaggccacaaaaaaagactgatgtggtctaaccatggccagagagtggtgatacccacaacaacaacatggactcacgtggtgcagagaggacctggttgcagagagccatggtgcagaggaggacggcaagggcagcagtggagacctgcatgattgggagcaggtgatggaatgtgggctcgagtgtcagcagagccaagaagggactgactactctttgctgcctgcgtccttctgatgtctgaagccatctctcctctttataggcagccctggcggatggggaaatggaatctgggggtgaggagggaaatttttaagtgtagtgatgctgtcatgctgagtgttgcacaactcagggtccctggtgaccacaggggctcaggatatccaagaatagcatctctgagctactctctaactctcagctctcaactcatgactggttctagcttcatggggtttctcctgtgagtgtgaagaggggtgtgtgtcaacccaaggctattcttagttgatcccttctcataagaactggtctatgcagccaggcatggtcgctcacacctgtaatcccaacactttgggaggccgaggctgcagatcacctgaggtcaggagtttgagaccaacctgaccaagaaagagaaactccatctctactaaaaatacaaaagtagtcaggcgtggtggcacatgcctgtaatcccagctactcgggaggctgagggcaggagaatcgcttgaacccaggaggtgggggctgtggtgagctgagatcatgccattgcactccagcctgggcaacaaaagtgaaactccatctcaaaaaaaaaaaaaaaaaagaattggtctatgcatgaactctccagccccattccttcccacagagctgtaattctgcttcctcagctgctataaccacaaggatagggtcaatgggctgatgctgtggagggctagacaacccccagtcctcccagaggaaaggaactcaatgaaagctggaggaatagaaagcatgaggtcacgtttcagtcatttgtctatttattagtctcggagtgactggggcgctgtgttaaacgctagttgtggatcataaaaatactttagaggtgggtgtcagtatgtcaggtgcctagaaatatgtgtagccattaacctagaaaaagcatttctgggaaagagttctgtggaaacaacccaaatatggagccatcttcaaacataaagatacctgacccagcatcatttataactctaaaataagcaaagctaaatttttctctatcagggaatgataaattatccacaagatcctttattattaagtctctaacgtgaatgaagtggcataaatatgcttataacatcagtggttaaaaaaaaagcaagataaaacattatacaaattctataaaatttgaagaattgtataaagatatatatatgccatgccaactctaggcatggaaaaaattaaaaggcttggaaatacatgccttaaagaatgaatagtgcttagatccatgggtgatttattttcttatttttttctttttctgaattttcctcattttatttagtgagactttattaccttcttggtcaacccacaaatttatgaactaattttgttttaaaacatttccaacatcactggttgaaaagtgggttgttgtcagttgtttaatctgaaagaaattactgataaatatgctacagtttctgttcaatgggctttgccaaaatgaagtcttgatttcccatttctttgaaccattttaaggatcctatactatacttacataaataatgccaaactgaagcagttttttccttattcttttcaacacataatttcagtggtgtggaagggtctctaccttctcagccagattatatgcttttttttttcttttccatactttgttattttattattttgcaatcaatcagcatatctcattttataatgagaaatagatttagttggttttaatgatctttgtttctgagatgcccctggtctcatgggggcaggtagagtgtatgaacaggtaattgtaaaactcttagtagaaaaagaaatgaaagctcagaaccccatgaggaagaagtgaccttccaccagagggttggggaaggcttcatggaagggatggaactttagttgtgtctggataactgcccgggatttaggcatctatagatgggtgggcag

SEQ ID NO: 1243812 - DNA, 4001 bp, Homo sapiens
agatggtctaaagtttccttttagctttagtagaccatgagtctatgtcctgtggatcaggctttattgtgcatgtaattcaatttcagagccatgtagtctctgacccatggaatgggagtactgattgaaggataattaagtagaagtggctttaggttactcctgcaacacttccaaacaaaaccagacctccatccttctgtcatcatgacaacacttcacagtaacttgggctttagagtgctgatctgtcaactaactaatctaatcctcatgatgatcctgacaattgttaggtccattttaagtgaaaaggctgaggctcagagggggaaggagagaatcttccaggtgcccagtcccatgatgggtgctttacacatcacctcgtaacagcccttcgaaggggttaatattatctacatttcacacttgtgaacactgaggtctaataaagcaagatgactttcccaatgttatgctgataataatatgatgaagtcacttttctcactcttcttccgcctttgctgtgctgcttcccctctttacaactccccccacaagatgttgaaatgataacctcctttttaaaggcattttttcatgacactccccaagcagacctactagcctcagcaagtcacttcacctctctgtgcctctctttccttaactgtgaaactgggggcaacagtccctacttcataagggtgttaaaacccttgttgaaagtacgcagtgagatcatgtattaagagtgttcagcccagagctcatattaaggactcagcaattgcgcattcttactgcttttggaaactgtagcttgccccaccgcccaatggtaccaggcaattccttttacccccaaatcaaattaaaatcacaaagaaactgtttgcattttattttaaagttttattatgaaaacacatggaattaacggtgttatccatgtatttgcaacagcagagaaagagtgagagtggaccatccccataggggacacttatcctttggctaaactaatataaataatggaaataacacctaatacaataatacagcacataaaagagattacattaagagaagagacaggaactgcggagaggagtcctgagtatggaggagatgcggctcatggagaagcatccaggctcaggtgaccttccctgaagacttcctgtctctgagcagctcagttcagttccaggtcatacacgtactcctggacccaggactcactggggtcagcgcagacttgcttgcctcttttggtttggaatccgtagaacaaggagcagacagattagaatcccatgggacctttgaggtcatctggctttatcccttgcctgtggtaggcatcttcctctgcctgaccatggtccatgtggggcagctctggtggatgggatccttcccggagcagcactggaagcagactccctgtaacttccactcactggatttagctgtgggccccaggggttgcccagattaggaaccagtgggcattgcaatcagtatgaatagattgccccattccctgccagcctggtagtgacttttccacatgtttttctagcatggtttaaggaattggtccatatctcacgggacctgtctgccttcccctgcttccctgtcctctgaataacttcctccccaggaacccccttctgtctcggctgccactcagccgccttcagcacttgaaaagtgagttcatgacctgtgacctcactgctgtcagggaaggcttcagccctgagagctgcctccccaacgctcatcaccccctccccaaaacaggccccctttaaaaatccagccctcacccttgcctcccagggcagccaggggttgatactcacaccacagctggctgggagcagaggctgctggtctcatagtaatctaccacaaagttgcgaggaagcttcctcgcggtgtaagaaaagcagcaggcggtgggagggtctgagcccactgaaaggaaaggccagggtgagatcaacactgcccatgggagctgtttattttgacttctaattttgcatcttcattgagcatccctgtggagctaccagaaccccaaatatggtcccttgtatccattcccacctaacatgagcaggagtcttattctgaatagtggatcttcagagaagaacgagaaagaaatctagaagattggaactggattcagtctcagaacacatcgcactcccttcatatgacagatggggaaaccaaggcacagagagggacaggggcttgcttgaacaaataattaaaggcagagccaattcaacagtctgacttccagcccatcgttttcctctgctggttgctaattcttaagaaaataggaacttgaatgttactgaatatctactagactctacatttagcagcagactacatggcaatcttcctagctgccttttgtcccatccccagatcccactgtttgccagccatgactagaaaaaaggactctgcctacaccttgactcgaaatagcagctgcaaaagtagacttacttggtgctgagagtgctagagagcagaaggcagctactagcacgaggagagacaggacagtcacgcagagcttcatggtattggtggcaaagaggttttctcagaggtgaggctgcagaactcagaagcttcagaacctagctgtgtcctgtgctgatactgagttgggaatctctctttatagggactctgaggcctaggacaaatgtgggggcacaggagagtgagtggaatttccatggtagagatgatgtcatggctcctgaagctagctgagtgaggagttcctctcagcttctcttccccagggcgatgtcatcatagaggaaagatgagggaggtgcaggcgagaagaaaagggaagtggtacagccaaaagcagtgaccgagactggggagagagttgcaaaccccagaggaaaagatgaaatgttcacacctgctacaagtggcttgtagacaagaactgtgctgctcttggtggttggcacccccagatgctggagggttcatgccagtctttccaggctggccacagtcctggccccaagaacaaagcgggaaccaggactcccccatccccttcctgtgccttcttctgctgagctcagtgccactgacttttgtgccctatatgtttccttgggcatgaagagtccagcattggatgtgcggagggacccagtagggtggctcaggaacatttgtaagttcttattggacacttaccttgtaccaggcactgggaaagctgtgttacacatattatatataatcctaccataatcttgagcaggggtgtctaatctcattttacagataaggcaattggggatcagagagtggtccactgatggcgctcaatgccacagagctgatgaatggcactgccaagatttgaatcaagattcgaatcaagattcatctgactccaaagtccattttctttccatgctgtagtctccagaataaacatagagtgtgaccacaaagagaaaccattgactgatagactgctaggagctattccacactcaaagaccgattatactcagacttaattcagggaagggatagggctagtctgtcctaggacaaggagggaacggagaagaaataaagatttcaagatattttcttggaccagcaaaagaccaggacaaattaaccagtaagaatcaagtctggaagacccagatagagaatgttcttctagtataaaaacagaattgagctgggtacagggcctcacacctgaaatcccagcactttgggaggtcaaggcaggcagattgcttgagcccagaagtttgagaccagcctggggaacatggtgaaacactgtctctataaaaaacacacatacaaaaaaaaaacttgactgggagtggtgatacacacctgtagtcccagctgctcagtaggctcaggtgggaagatca

SEQ ID NO: 1243813 - DNA, 4001 bp, Homo sapiens
aatggtaccaggcaattccttttacccccaaatcaaattaaaatcacaaagaaactgtctgcattttattttaaagttttattatgaaaacacacagaatcaaatgtgttatccatgtatttgcaacagcagagaaacagtgacagtggaccatccccataggggacacttatcctttggctaaactaatataaataatggaaatgacacctaatacaataacacggcacataaaaaagattaaattaagagaagggacaggaactgcggagaggagtcctgagtatggaggagatgtgtctcatggagaagcatccgggctcaggtgaccttccctgaagacttcctgtctctgagcagctcagttcagttccaggtcatacacgtactcctggacccaggattcactgggatcagcacagacttgcttgcttcttttggtttggaatctgtagaacaaggagcggacagattagaatctcatgagacctttgaggtcatctggctttatcctttgcatcttcctctgcctgaccatggtccatgtggggcagctctggtggatgggatccttcctggagcagcactggaagcagactccctgtaacttccacccactggatttagctgtgggccccaggagttgcccagattaggaaccaaggggcattgcaatcaatatgaatagatctccccattccctgccagcctggcagtgacttttccacatgtctttctagcacggtttaaggaatcggtccatatctcatgggacctgtctgccttcccctgcttccctgtcctctgaataacttcctccccagcaacccccttctctctcggctcccactctgccgccttcagcacttgaaaagtgagttcatgacctgtgtcctcactgctctcagggaaggcttcagccctgggagctgcctccccaatgctcaatcaccccctccccaaaacaggccctcttttaaaatccagccctcacccttgcctcccagggcagcccaggggttgatactcacaccacagctggctgggagcagaggctgctggtctcatagtaatctaccacaaagttgcgaggaagcttcctcgcggtgtaagaaaagcagcaggcggtgggagggtctgagcccactgaaaggaaaggccagggtgagatcaacactgcccgtgggagctgtttattttgacttctaattttgtatcttcattgagcatccctgtggagctaccagaaccccaaatatccattcccacctaacatgagcaggagtcttattttgaatagtggatcttcagagaagaacgagaaagaaatctagaagattggaactggattcagtctcagaacacatcgcactcccttcatatgacagatggggaaaccaaggcacagagagggacaggggcttgcttgaacaaataattaaaggcagagccaattcaacagtctgacttccagcccatcgttttcctctgctggttgctaattcttaagaaaataggaacttgaatgttattgaatatctactagactctacatttagcagcagactacatggcaatcttcctagctgccttttgtcccatccccagatcccactgtttgccagccatgactagaaaaaaggactctgcctacaccttgactcgaaatagcagctgcaaaagtagacttacttggtgctgagagcgctggagagcagaaggcagctactagcatgaggagagacaggacagtcacgcagagcttcatggtattggtggaaaagaggttttctcagaggtgaggctgcagaactcagaagcttcagaacccagctgtgtcctgtgctgatactgacttgggaatctctctttatagggactctgaggcctaggacaaatgtgggggcacaggagagtgagtggaatttccatggtagagatgacgtcatgctcctgaagctagctgagtgaggagttcctctcagcttctcttccccagggcgatgtcatcatagaggaaagatgagggaggtgcaggcgagaagaaaagggaagtggtacagccaaaggcagtgaccgagactggggagagagttgcaaaccccagaggaaaagatgaaatgttcacacctgctacaagtggcttgtagacaagaactgtgctgctcttggtggttggcaccctcagatgctggagggttcatgtcagtctttccaggctggccacaagcctgaccccaagaacaaagtgggagccaggactcccccatccccttcctgtgccttcttctgctgagctgagtgccactgacttttgtgccttatatgtttccttgggcatgaagagtccagcattggatgtgaggagggacccagtagggtggctcaggaacatttgtaacttcttattggacacttaccttgtaccaggcactggaaaagctgtgttacacacattatatataatcctaccataatcttgagcaggggtgtctaatctcattttacagacaaggcaattggggatcagagagtggtccactgatgcgctcaatgccacagagctgatgaatggcactgccaagatttgaatcaagattcacctgactccaaagtccattttctttccatgctgtagtctcctgaataaacatagaatgtgaccacaaagagaacccgttgactgatagactgctaggagctattccacactcaaagactgactatattcggacttaattcaggaaggggatagggctagtctgtcctaggacaaggaggaaacggagaagaaataaagatttcaggatattttcttggaccagcaaaagaacaggacaaattaaccagtaagaatcaagtttggaagacccagatagagaatgttcttctagtataaaaacaggattgagctgggtacagggcctcacacctgtaatcccagcactttgggaggtcaaggcaggcagatagcttgagcccagaagttcgataccagactgggcaacatggtgaaacactgtctctataaaaaaatattttggctgggagtggtgatacacacctgtagtcccagctgctcagtaggctgaggtgggaagatcacctgagcccagaaaagtccaggctgcagtgagtggtgattgtgccactgcactcccgcttgtttgacagaatgagaccctgtcccaaaaacaaaacaaagcaaaacaaaacgaaacagaattatatacctagtaattagtttatctatgttacaggcaaaatgtgtaatctaaggatgtgggtgtgtcccagccagtccatagggaatgcccatgctcatgttaagccctggctggtttgacagttgctgggcacctgtacagaaggtgaagcttacaaaggccctgcatacaggaatgtgcaaggttggacaaatgaagggaatgaggataattggatcaagacctctatctgcctttagctccactactctaacccacctgctcacctttaaccccacattgttacctgctcttctctgagaaagaaaaaagaagagtaaaaaaagggagccatgacttcaaactataccacagggctgcagtaaccaaaacagcatggctttggtacaaaaacagactcatagaccaatagaacaaaatagagagctcagaaataatgctgcatacctgcaaccatccgaactttgacaaagttaacaaaaacaagcaacagggaaaggacttcccagtcaataaatggtactgggataactggctagctgtatgcaaaagattgaaactggaccccttccttacaccatctgtaaaaatcaactcacaatgggttgaagacttaaatgtaaaacctaaaatataaaactataaaaatatgatacctgtaagataacctagacaatatgattctgggcataggatctggcagatatttcatgatgaagatgccaaaaacaaatcacaacaaaaccaaaaactgacaaatgggatctaattaaa

SEQ ID NO: 1243814 - DNA, 4001 bp, Homo sapiens
tacccccaaatcaaattaaaatcacaaagaaactgtttgcattttattttaaagttttattatgaaaacacatggaattaacggtgttatccatgtatttgcaacagcagagaaagagtgagagtggaccatccccataggggacacttatcctttggctaaactaatataaataatggaaataacacctaatacaataatacagcacataaaagagattacattaagagaagagacaggaactgcggagaggagtcctgagtatggaggagatgcggctcatggagaagcatccaggctcaggtgaccttccctgaagacttcctgtctctgagcagctcagttcagttccaggtcatacacgtactcctggacccaggactcactggggtcagcgcagacttgcttgcctcttttggtttggaatccgtagaacaaggagcagacagattagaatcccatgggacctttgaggtcatctggctttatcccttgcctgtggtaggcatcttcctctgcctgaccatggtccatgtggggcagctctggtggatgggatccttcccggagcagcactggaagcagactccctgtaacttccactcactggatttagctgtgggccccaggggttgcccagattaggaaccagtgggcattgcaatcagtatgaatagattgccccattccctgccagcctggtagtgacttttccacatgtttttctagcatggtttaaggaattggtccatatctcacgggacctgtctgccttcccctgcttccctgtcctctgaataacttcctccccaggaacccccttctgtctcggctgccactcagccgccttcagcacttgaaaagtgagttcatgacctgtgacctcactgctgtcagggaaggcttcagccctgagagctgcctccccaacgctcatcaccccctccccaaaacaggccccctttaaaaatccagccctcacccttgcctcccagggcagccaggggttgatactcacaccacagctggctgggagcagaggctgctggtctcatagtaatctaccacaaagttgcgaggaagcttcctcgcggtgtaagaaaagcagcaggcggtgggagggtctgagcccactgaaaggaaaggccagggtgagatcaacactgcccatgggagctgtttattttgacttctaattttgcatcttcattgagcatccctgtggagctaccagaaccccaaatatggtcccttgtatccattcccacctaacatgagcaggagtcttattctgaatagtggatcttcagagaagaacgagaaagaaatctagaagattggaactggattcagtctcagaacacatcgcactcccttcatatgacagatggggaaaccaaggcacagagagggacaggggcttgcttgaacaaataattaaaggcagagccaattcaacagtctgacttccagcccatcgttttcctctgctggttgctaattcttaagaaaataggaacttgaatgttactgaatatctactagactctacatttagcagcagactacatggcaatcttcctagctgccttttgtcccatccccagatcccactgtttgccagccatgactagaaaaaaggactctgcctacaccttgactcgaaatagcagctgcaaaagtagacttacttggtgctgagagtgctagagagcagaaggcagctactagcacgaggagagacaggacagtcacgcagagcttcatggtattggtggcaaagaggttttctcagaggtgaggctgcagaactcagaagcttcagaacctagctgtgtcctgtgctgatactgagttgggaatctctctttatagggactctgaggcctaggacaaatgtgggggcacaggagagtgagtggaatttccatggtagagatgatgtcatggctcctgaagctagctgagtgaggagttcctctcagcttctcttccccagggcgatgtcatcatagaggaaagatgagggaggtgcaggcgagaagaaaagggaagtggtacagccaaaagcagtgaccgagactggggagagagttgcaaaccccagaggaaaagatgaaatgttcacacctgctacaagtggcttgtagacaagaactgtgctgctcttggtggttggcacccccagatgctggagggttcatgccagtctttccaggctggccacagtcctggccccaagaacaaagcgggaaccaggactcccccatccccttcctgtgccttcttctgctgagctcagtgccactgacttttgtgccctatatgtttccttgggcatgaagagtccagcattggatgtgcggagggacccagtagggtggctcaggaacatttgtaagttcttattggacacttaccttgtaccaggcactgggaaagctgtgttacacatattatatataatcctaccataatcttgagcaggggtgtctaatctcattttacagataaggcaattggggatcagagagtggtccactgatggcgctcaatgccacagagctgatgaatggcactgccaagatttgaatcaagattcgaatcaagattcatctgactccaaagtccattttctttccatgctgtagtctccagaataaacatagagtgtgaccacaaagagaaaccattgactgatagactgctaggagctattccacactcaaagaccgattatactcagacttaattcagggaagggatagggctagtctgtcctaggacaaggagggaacggagaagaaataaagatttcaagatattttcttggaccagcaaaagaccaggacaaattaaccagtaagaatcaagtctggaagacccagatagagaatgttcttctagtataaaaacagaattgagctgggtacagggcctcacacctgaaatcccagcactttgggaggtcaaggcaggcagattgcttgagcccagaagtttgagaccagcctggggaacatggtgaaacactgtctctataaaaaacacacatacaaaaaaaaaacttgactgggagtggtgatacacacctgtagtcccagctgctcagtaggctcaggtgggaagatcacctgagcccaggaaagtccaggctgcagtgagtggtgattgtgccactgcactccagcttgtttgacagaatgagaccctgtcccaaaaacaaagcaaagcaaaacaaaacaaagcaaaacaaaccaaaacaaaacaaaacagaattatatacctagtaatgagtttatctatgttacaggcaaaatgtgtaatctaaggatgtgggtgtgtcccagccagtccatagggaatgcccatgctcatgttaagccctggctggtttgacagttgctgggcacctgtacagaaggtgaagcttacaaaggccctgcatacaggagtgtgcaaggttggacaaatgaagggaatgaggataattggatcaagacctctatctgcctttagctccactactctaacccacctgctcacctttaaccccacattgttacctgctcttctctgagaaagaaaaaagaagagtaaaaaaagggagccatgacttcaaactataccacagggctgcagtaaccaaaacagcatggctttggtacaaaaacagactcatagaccaatagaacaaaatagagagctcagaaataatgctgcatacctgcagccatccgaactttgacaaagttaacaaaaacaagcaacagggaaaggacttcccagtcaataaatggtactgggataactggctagctgtatgcaaaagattgaaactggaccccttccttacaccatctgtaaaaatcaactcacaatgggttgaagacttaaatgtaaaacctaaaatataaaactataaaaatatgatacctgtaagataacctagacaatatgattctgggcataggatctggcagatatttcatgatgaagat

SEQ ID NO: 1243815 - DNA, 4001 bp, Homo sapiens
cggtgcaacagtccctagttcataagggtgttaaaacccttgttgaaagtacgcagtgagatcgtgtattaagagtgttcagcccagagctcatattaaggactcagcaattgctcattcttactgttttgggaaactgtagtttgtccctcccaatggtaccaggcaattccttttacccccaaatcaaattaaaatcacaaagaaactgtctgcattttattttaaagttttattatgaaaacacacagaatcaaatgtgttatccatgtatttgcaacagcagagaaacagtgacagtggaccatccccataggggacacttatcctttggctaaactaatataaataatggaaatgacacctaatacaataacacggcacataaaaaagattaaattaagagaagggacaggaactgcggagaggagtcctgagtatggaggagatgtgtctcatggagaagcatccgggctcaggtgaccttccctgaagacttcctgtctctgagcagctcagttcagttccaggtcatacacgtactcctggacccaggattcactgggatcagcacagacttgcttgcttcttttggtttggaatctgtagaacaaggagcggacagattagaatctcatgagacctttgaggtcatctggctttatcctttgcatcttcctctgcctgaccatggtccatgtggggcagctctggtggatgggatccttcctggagcagcactggaagcagactccctgtaacttccacccactggatttagctgtgggccccaggagttgcccagattaggaaccaaggggcattgcaatcaatatgaatagatctccccattccctgccagcctggcagtgacttttccacatgtctttctagcacggtttaaggaatcggtccatatctcatgggacctgtctgccttcccctgcttccctgtcctctgaataacttcctccccagcaacccccttctctctcggctcccactctgccgccttcagcacttgaaaagtgagttcatgacctgtgtcctcactgctctcagggaaggcttcagccctgggagctgcctccccaatgctcaatcaccccctccccaaaacaggccctcttttaaaatccagccctcacccttgcctcccagggcagcccaggggttgatactcacaccacagctggctgggagcagaggctgctggtctcatagtaatctaccacaaagttgcgaggaagcttcctcgcggtgtaagaaaagcagcaggcggtgggagggtctgagcccactgaaaggaaaggccagggtgagatcaacactgcccgtgggagctgtttattttgacttctaattttgtatcttcattgagcatccctgtggagctaccagaaccccaaatatccattcccacctaacatgagcaggagtcttattttgaatagtggatcttcagagaagaacgagaaagaaatctagaagattggaactggattcagtctcagaacacatcgcactcccttcatatgacagatggggaaaccaaggcacagagagggacaggggcttgcttgaacaaataattaaaggcagagccaattcaacagtctgacttccagcccatcgttttcctctgctggttgctaattcttaagaaaataggaacttgaatgttattgaatatctactagactctacatttagcagcagactacatggcaatcttcctagctgccttttgtcccatccccagatcccactgtttgccagccatgactagaaaaaaggactctgcctacaccttgactcgaaatagcagctgcaaaagtagacttacttggtgctgagagcgctggagagcagaaggcagctactagcatgaggagagacaggacagtcacgcagagcttcatggtattggtggaaaagaggttttctcagaggtgaggctgcagaactcagaagcttcagaacccagctgtgtcctgtgctgatactgacttgggaatctctctttatagggactctgaggcctaggacaaatgtgggggcacaggagagtgagtggaatttccatggtagagatgacgtcatgctcctgaagctagctgagtgaggagttcctctcagcttctcttccccagggcgatgtcatcatagaggaaagatgagggaggtgcaggcgagaagaaaagggaagtggtacagccaaaggcagtgaccgagactggggagagagttgcaaaccccagaggaaaagatgaaatgttcacacctgctacaagtggcttgtagacaagaactgtgctgctcttggtggttggcaccctcagatgctggagggttcatgtcagtctttccaggctggccacaagcctgaccccaagaacaaagtgggagccaggactcccccatccccttcctgtgccttcttctgctgagctgagtgccactgacttttgtgccttatatgtttccttgggcatgaagagtccagcattggatgtgaggagggacccagtagggtggctcaggaacatttgtaacttcttattggacacttaccttgtaccaggcactggaaaagctgtgttacacacattatatataatcctaccataatcttgagcaggggtgtctaatctcattttacagacaaggcaattggggatcagagagtggtccactgatgcgctcaatgccacagagctgatgaatggcactgccaagatttgaatcaagattcacctgactccaaagtccattttctttccatgctgtagtctcctgaataaacatagaatgtgaccacaaagagaacccgttgactgatagactgctaggagctattccacactcaaagactgactatattcggacttaattcaggaaggggatagggctagtctgtcctaggacaaggaggaaacggagaagaaataaagatttcaggatattttcttggaccagcaaaagaacaggacaaattaaccagtaagaatcaagtttggaagacccagatagagaatgttcttctagtataaaaacaggattgagctgggtacagggcctcacacctgtaatcccagcactttgggaggtcaaggcaggcagatagcttgagcccagaagttcgataccagactgggcaacatggtgaaacactgtctctataaaaaaatattttggctgggagtggtgatacacacctgtagtcccagctgctcagtaggctgaggtgggaagatcacctgagcccagaaaagtccaggctgcagtgagtggtgattgtgccactgcactcccgcttgtttgacagaatgagaccctgtcccaaaaacaaaacaaagcaaaacaaaacgaaacagaattatatacctagtaattagtttatctatgttacaggcaaaatgtgtaatctaaggatgtgggtgtgtcccagccagtccatagggaatgcccatgctcatgttaagccctggctggtttgacagttgctgggcacctgtacagaaggtgaagcttacaaaggccctgcatacaggaatgtgcaaggttggacaaatgaagggaatgaggataattggatcaagacctctatctgcctttagctccactactctaacccacctgctcacctttaaccccacattgttacctgctcttctctgagaaagaaaaaagaagagtaaaaaaagggagccatgacttcaaactataccacagggctgcagtaaccaaaacagcatggctttggtacaaaaacagactcatagaccaatagaacaaaatagagagctcagaaataatgctgcatacctgcaaccatccgaactttgacaaagttaacaaaaacaagcaacagggaaaggacttcccagtcaataaatggtactgggataactggctagctgtatgcaaaagattgaaactggaccccttccttacaccatctgtaaaaatcaactcacaatgggttgaagacttaaatg

SEQ ID NO: 1243816 - DNA, 4001 bp, Homo sapiens
agggtgttaaaacccttgttgaaagtacgcagtgagatcatgtattaagagtgttcagcccagagctcatattaaggactcagcaattgcgcattcttactgcttttggaaactgtagcttgccccaccgcccaatggtaccaggcaattccttttacccccaaatcaaattaaaatcacaaagaaactgtttgcattttattttaaagttttattatgaaaacacatggaattaacggtgttatccatgtatttgcaacagcagagaaagagtgagagtggaccatccccataggggacacttatcctttggctaaactaatataaataatggaaataacacctaatacaataatacagcacataaaagagattacattaagagaagagacaggaactgcggagaggagtcctgagtatggaggagatgcggctcatggagaagcatccaggctcaggtgaccttccctgaagacttcctgtctctgagcagctcagttcagttccaggtcatacacgtactcctggacccaggactcactggggtcagcgcagacttgcttgcctcttttggtttggaatccgtagaacaaggagcagacagattagaatcccatgggacctttgaggtcatctggctttatcccttgcctgtggtaggcatcttcctctgcctgaccatggtccatgtggggcagctctggtggatgggatccttcccggagcagcactggaagcagactccctgtaacttccactcactggatttagctgtgggccccaggggttgcccagattaggaaccagtgggcattgcaatcagtatgaatagattgccccattccctgccagcctggtagtgacttttccacatgtttttctagcatggtttaaggaattggtccatatctcacgggacctgtctgccttcccctgcttccctgtcctctgaataacttcctccccaggaacccccttctgtctcggctgccactcagccgccttcagcacttgaaaagtgagttcatgacctgtgacctcactgctgtcagggaaggcttcagccctgagagctgcctccccaacgctcatcaccccctccccaaaacaggccccctttaaaaatccagccctcacccttgcctcccagggcagccaggggttgatactcacaccacagctggctgggagcagaggctgctggtctcatagtaatctaccacaaagttgcgaggaagcttcctcgcggtgtaagaaaagcagcaggcggtgggagggtctgagcccactgaaaggaaaggccagggtgagatcaacactgcccatgggagctgtttattttgacttctaattttgcatcttcattgagcatccctgtggagctaccagaaccccaaatatggtcccttgtatccattcccacctaacatgagcaggagtcttattctgaatagtggatcttcagagaagaacgagaaagaaatctagaagattggaactggattcagtctcagaacacatcgcactcccttcatatgacagatggggaaaccaaggcacagagagggacaggggcttgcttgaacaaataattaaaggcagagccaattcaacagtctgacttccagcccatcgttttcctctgctggttgctaattcttaagaaaataggaacttgaatgttactgaatatctactagactctacatttagcagcagactacatggcaatcttcctagctgccttttgtcccatccccagatcccactgtttgccagccatgactagaaaaaaggactctgcctacaccttgactcgaaatagcagctgcaaaagtagacttacttggtgctgagagtgctagagagcagaaggcagctactagcacgaggagagacaggacagtcacgcagagcttcatggtattggtggcaaagaggttttctcagaggtgaggctgcagaactcagaagcttcagaacctagctgtgtcctgtgctgatactgagttgggaatctctctttatagggactctgaggcctaggacaaatgtgggggcacaggagagtgagtggaatttccatggtagagatgatgtcatggctcctgaagctagctgagtgaggagttcctctcagcttctcttccccagggcgatgtcatcatagaggaaagatgagggaggtgcaggcgagaagaaaagggaagtggtacagccaaaagcagtgaccgagactggggagagagttgcaaaccccagaggaaaagatgaaatgttcacacctgctacaagtggcttgtagacaagaactgtgctgctcttggtggttggcacccccagatgctggagggttcatgccagtctttccaggctggccacagtcctggccccaagaacaaagcgggaaccaggactcccccatccccttcctgtgccttcttctgctgagctcagtgccactgacttttgtgccctatatgtttccttgggcatgaagagtccagcattggatgtgcggagggacccagtagggtggctcaggaacatttgtaagttcttattggacacttaccttgtaccaggcactgggaaagctgtgttacacatattatatataatcctaccataatcttgagcaggggtgtctaatctcattttacagataaggcaattggggatcagagagtggtccactgatggcgctcaatgccacagagctgatgaatggcactgccaagatttgaatcaagattcgaatcaagattcatctgactccaaagtccattttctttccatgctgtagtctccagaataaacatagagtgtgaccacaaagagaaaccattgactgatagactgctaggagctattccacactcaaagaccgattatactcagacttaattcagggaagggatagggctagtctgtcctaggacaaggagggaacggagaagaaataaagatttcaagatattttcttggaccagcaaaagaccaggacaaattaaccagtaagaatcaagtctggaagacccagatagagaatgttcttctagtataaaaacagaattgagctgggtacagggcctcacacctgaaatcccagcactttgggaggtcaaggcaggcagattgcttgagcccagaagtttgagaccagcctggggaacatggtgaaacactgtctctataaaaaacacacatacaaaaaaaaaacttgactgggagtggtgatacacacctgtagtcccagctgctcagtaggctcaggtgggaagatcacctgagcccaggaaagtccaggctgcagtgagtggtgattgtgccactgcactccagcttgtttgacagaatgagaccctgtcccaaaaacaaagcaaagcaaaacaaaacaaagcaaaacaaaccaaaacaaaacaaaacagaattatatacctagtaatgagtttatctatgttacaggcaaaatgtgtaatctaaggatgtgggtgtgtcccagccagtccatagggaatgcccatgctcatgttaagccctggctggtttgacagttgctgggcacctgtacagaaggtgaagcttacaaaggccctgcatacaggagtgtgcaaggttggacaaatgaagggaatgaggataattggatcaagacctctatctgcctttagctccactactctaacccacctgctcacctttaaccccacattgttacctgctcttctctgagaaagaaaaaagaagagtaaaaaaagggagccatgacttcaaactataccacagggctgcagtaaccaaaacagcatggctttggtacaaaaacagactcatagaccaatagaacaaaatagagagctcagaaataatgctgcatacctgcagccatccgaactttgacaaagttaacaaaaacaagcaacagggaaaggacttcccagtcaataaatggtactgggataactggctagctgtatgcaaaagattgaaactggacc

SEQ ID NO: 1243817 - DNA, 4001 bp, Homo sapiens
agtctttttacatgatagcaggggactctgaggctagagatggaggagctgtggctgcttgcagctggaggataggtggaagtgggtagggcatcctctcagaggactcctcagggaacaggctctgggagggctccatggggctgagactcacacgactgctgggttggagcacttgccactggtgtagaaatactccttgatgtgggcacggggcagtgggcgggcaatgtaggcaaagcagcagggtgtggtgtccgaggaatctggaagaggaaaggaaggagggagacccttttattcattgctactgcacacttgacattgtgctggacactttatatgatttatttagaaagaactgttatcttccttgacagaaactgaggctcagagaggtaaagtcacttggccatggataaacagtggcagagtggggattccaatgcctcatctaatccttgagccaagcttgtatccatccctctacaccataaccttctgccctgggctttcagggcctcctcctggcttgtcctgggtcctctggcttcattcttgcccttccagcatcctcaatggatttggaacttggtttctttgagacctagggcaggttgtggggaggcttccaaagctcaggctccatgactcagccaggatcctaagaagggcctggagatgcatattgtatcttgggagctctggttgagcttcagtgagaagggctctcaacagagaacttcttgttggtcagttaattcaagatgacgttgggaagcatcagttgccacttcccagcagaggagtagtttttattttcccagcaagatggaaccaggtttgaataccagtctccccatttcctagctgtgtgcctccatggacaagttacttaacctctctgttttcccatctgtacatcaaggacagctactcaaagaagggttgtgggtattaaataagatgtacaaaaatcggctgggcacggtggctcacgcctgtaatcccagcactttgggaggccgaggcgggcggatcacgaggtcaagagatcgagaccatcctggctaacatggtgaaaccccgtctctactaaaaaatacaaaacattagcagggtgtggtggcgggtgcctgtagtccccgctactccggaggctgaggcaggagaatggcatgaacccgggagacggagcttgcagtaagccgagatcgtgccgctgcactccagcctgggcgacagagcgaagactccatctcaaaaaaaaaaaaaaaaaaaaaaaagatgtgccaaaatcagcacaatgcctgatccatagtaaccatttaattagcttttattatcctctccttgtttttatttgttttttaaatgtattcactctaataaagccacataccctctcataagccaattttttttacatttatgaaatgagagagaatatggctgtctcagggtctcaggaagttttagtttagttaaatttcttagaaaccctgctgctgacaggcatgagtcagacgtgtttcaaagtcagtgtgagctactcatgactactaatctccccaacatgagtccacactcagtgaacacctgtaggccttgagggtgtagaccttaaagacagaaaaactgatcaggagatccctgccatgaagcagcatagagatctctcaaggacaacaggacatatgggtaagacaattcataagaatgtaaataatggggttcagacagtattcatgctacagttgaaaagagggcaaggtgtgggacagtcattgggatggggtaggcattctaggcagagtctgactccaggggctgtggtggtcaagaccaggacttacatggggaggcagatgcaggagcgcagagggcagtagcaatgaggatgacagcgagggctgccgcggagaccttcatggtacctgtgggagaggctgtgcgaggtccacgtgctgtcttgatcctctgcaggaatcctctgcagctcaggctggccctttatagggccagttgaggggcatcccctaaggggagtttccaaaatagcaaccaagcattggccggtatcataagtgaaattgcacaaaacggaaaagaaaactgaaatagcctccggaaattcgagtctctgtctctccctcactgctctctcatctagagtgagctcatcagtttcctctttgaccaagcaccaatggtggaaaaatttctctgctgacatccttagttttaccttccagggaaggggtcctcctcagagagcaggaagccgctttcttggggacaacaaggagtggcagttaggacaggatcagaagtcactgagtctttattactcactgagtcactgagtcttcaaagttcctgcttattcattacagatcttacctcctttccctcatccatggaaggatgttatttataaagtgttttattgaggagggtcctctggatatacagtccccaaaggaggtgagcacactcacactgtaaattgaggcagttgatctgagctgggcattgggaaccttttcacaagatatgagttggaatgagtcctcttgtgggaatttcttgctttcatcctggtcatagggtctctcccatttacttgctaagcgacctttgggaaaagtgcttaatgtctttgagttctatttccttgtttataaagtggaataattgattagagacttgttgagaagcagagggagagaaagatatcttacagcatactctatcattattggctaccatttaccgagggcttatctgtgccagccactattccactgtcctagcgcgtgtcaactcatttactattattatccccattttatgaatgaggaaactcaataaatactgggatcccatctcactgtaaggccttcttgggcacaaaagttacagaatatgaaagcttcaaaggactttagggatcattttttccatgttcttcagttgcacaagaggaaaccaaggcccagtgagcaggagtgacttgctaagaacacacagcaaatgaatgacagagttgggatcagaacccagttgccctcactcccacttcagtgctctgtccattaagtactgcccaacattaaagggttcgtggttaggagtatcctcaaaactgaacccatgtggaacttctggattagagctagggtccttactgcattccaaagaactggatacagtaagtcttcatcaattcctattttagtagttcagaattagcaacaatttggtccgggctaggctgaaattggcatctgaataataataataatattattattattattattattattgagacagtcttgctgtgtcgcccaggttggactgcagtggcacaatctcggctcattgcaagctgtgcctcccaggttcacgccattctcctgcctcagcctcccaagtagctgggactacaggagctggccagaatgcctggctaatttttttgtatttttagtagaaatggagtttcaccatgttagccaggatggtctctatctcctgccctcgtgatccgcccgccttggcttcccaaaatgctgggattacaggccgtacccggccggcatctgaattatttaagagaaaagtgtttattgagagtgacaaaagcggccgggcgcggtggttcacgcctgtaatcccagcactttgggaggccgaggcgggcggatcatgaggtcaggagatcgaggccatcctggctaacacagtgaaaccccgcctctactaaaaatacaaaaaattagccgggcgtggtggcgggcgcctgtagtcccagctactcaggaggctgaggcaggagaatggcgtgaacccgggaggtggagcttgcagtgagccgagatcgcgccactgcactccagcctgggcgacagagcgaaactccgtctcaaaaaaaaaaaaaaaaaaaaagagagtgacaaaagcaaaataaacaaaatgtaaccccctactgagat

SEQ ID NO: 1243818 - DNA, 4001 bp, Homo sapiens
aaaatttgggagtcatacatatgcaaatatgtaattatataataacaatatgcttccatagggacatcatatcttaacaattaaagcaaatctttgcactgattcttgcaaggacttatacaatacccccatgaggtagagaagggaggagcatcccacagtttttacagcactgagatgacatatacatccaaggctttatgttcaaaacccaccaaaatccatggaagattaaattaaaatattaataacttttaaaatctactaagaaaaaccatgattcacattattacataaagctcatattccttagaattagattaaaataatctcagaaccactctgagaaaggacagggtatacaaattatttgtttctcaagtcatggcttgttttcagttcagtcatgaatgttcaaagctttggagtttgggttttcttgtccaggtgcttcataaagtcctggacccacttctgtgtggggtcagcacagatctccttgtccagtttggtcttgaagctgtggagcagaaaggagacagtcagatggaacaccttgagggttcagcctgggagtgtgaccaagtctatgggaaatctgtctagcccatcagcctagctgatggggatgcctcagggatgaaggaagaagataaaacaaaggaaggggactcagagaagcagctctttttggtagcccaagtgaatctctcttggttccaggatgaaggaacgaactgagatgtaaaatgatagctggaaagggagctgagagtgagaagccactttctttacttgtattgtttctcactggcaaatgtctgggataaggttagagatgctgtatgcatcacagtatttgactccaactcattctgatactagtcctattccctgcccagggaagaacctaggactgaggtgtgaggggtgggtggtcatcgtccacatacattacagcttcccggggacagtggctactggtggtccttctgtagctctccagcctctgcttagggattttcttattgataaatctgtagcagcaggtagttgaagtattaatcccaactgcaatgaaacaacaagaagaaaagtccattgagggtgtgtcctgggtctttctgtttgtaaaacagggaatggtaagaagaaggaatcagaaagaaaggaagaggtggagggaaaagctgcccatcccaaacccaatgtctctgccctttgaggcatttcataaactccctttcacttttatggactgtgaaatagggatgcaccatcaccagttgaaagacggaagaggaattgatggctactctgggcattgctaggaggggctaatataataatccaattccttagagcaagggtaccccaactatggatccccttttaggctctgagcattcaatgcttggtcatgagtttccctgatacgtaccacctctgcagagctgctgtttctggaagctgggcttccacagaccagattctgggtctcccggtatctggaaacagcccgcacacccatccccagaagcctcctgtctttgatcaccctgatcccaaattctgctggaagcagctggagtggtaactgcactgagggtgttcccagagctggaatcctagaaggagctggatttggggttcacagctggaattctagttcaggctctacccaacagcagctgtgtggttgggctcaccccttatcctttttctaagttaccttatcttggaaaagtagctgttaaagtgagactgtgggtatcaggtcttcttgattggtccaggataacccagagagggggcaatgtgcttcaaggagaaggagagagggaccttacctggctgagcaagcccctgggggctgaaagcagctgctgtgagcagcagacacagaagtgctgcagaggctttcatgttggagggtgagggcatgggcttccacatgagaattggaggtttctggtttggtctcagcccctctgctcctctggaagctctgtctctgccttttataggaagcagagaggatgaatcatagaatggagtaataaatctatggagtaataaatctgctgagccagtgcacttcagtgggaggataggaaatgacagtatgagtcgaggctagcctgtttttcagctaagaccaggagtggtaggtgaggtagggtctatgtagaggaagaccacagtatgtaatctatggctattatcaagagaccagtttctctgaaatgagacacattctatagaaaaaggaaggaatcagggataccaaagtcaaagatatgtaagggatattccccttttccctttggagtggtatccctaggacacgagtccacaaagagacattcaaactttggttcaactctacaaaggactcaaagattcttcactgtcttaaatcctggtggctttctaaaacccagagaaaagtaaaataatagaacattagcagaaaaataaaattcaatattcttagaataatagtacctaaaattgtagtgtctatttcaataatctattgctgcatagcaatctatctgaaaacagtgacttaaaacaataacaatcttctgggtttttttgctcttgactatatcacaaggccttcattcagtgtctggggtctgggctgggaggacttcaacagccagcagttggaccagatggaatttctcaggtgtctctctctctctctgtatgtgtgtgtgtgtgtgtgtgtgtgtgtgtgtgtgtgtgatctttccagtggtccctccacatggctagatattttgcatgatggcttaaggatcccaggtgcaaggttagggaacatagtcatacctcttaatgggaagagtgtaaaataatttgaggatatgttttaaaaccactatttgttttataggctatcggaactgcacagcatatcaagatcttaaaatactgtgtttctaaaacatctaatgagctgtgaaaatatttttccaagtaaaagaatatagggaaggcaaatttatcgacaaaatcagagaccttcagtttgaatcagagacaagagacttcttgtcattcttcccacacacatatctcagaaatacaaagaataaattttggaaaccactaatctagctcctcatctcacatacaactagctcctcatctcacatacacattacaaaatcaccaactaatcgccttccatatcagtgaaaaggggtttgatgagagaccatgggtggggtcctcatgcctataactgggccatggatcatggacatggaatgcaaaaaaggaaaattattcaatgggggaattgagcattatacaactttgaatattaatttgggagcaatgcaaggctttgattctggttttagctttatgtcgttttatcttacccctatgactttgctcaggctactcattctctcgattatctctttttcaaattgtttttactcccagctccagaaattggtgaagagttggcctactttctatctccttatttatggagtcttcccagctcactctaatgtaacacattagaacagcatattttctaacccagggtgtacgttccatccacctgatgcttctaaaaagcagaatcctttcctttgacttttctttctttttcttttttcttttattttggaagacaactatcatggataacctgctgaatgatcgatgaagttggagtagaacacgggggtcctgcccagacaggtcaggagctcaaggaagtactcatgggttccagttggttaaacctttttccttcagaaaatccttaagtgaagtaccccaagatgtccctgcctaagatcccagagaaaatgcctgcttatatttatgatggaaagacctgtacctgtcacctacaagacctgggaatggtaaaaataaaaggctgctgaattgttgcagaatgttgtaaaaacttttaaataatttaaaaacaatataagctggttgtagaaaatatggcaaaa

SEQ ID NO: 1243819 - DNA, 4001 bp, Homo sapiens
aaatattatgctttaaattatttaaaaataatctctttgtggatgttataataaaataatgtcacactgcacctgggggaggttggggaaaataaataagcttttcttcaagctctgactctcagtccatgtatgaaggctcatggcttcagattttgaaatatttggtccagatgcttcatggaatccctgacccatctctccttggggtcagcacagacctccttgccccgtttggtcttgaagctgtgggggagagagggcacaattagatggaagactttgaagatcctgcacaggactgtgggccattggtccctagaactgatcagcccttggtccttaggtgaaggacccggacccgggagaggagggaggggaagagtgggaggaagaagctccagaaggaagctctgctcttgctgtccaggtgaaaccctccagggtcctggctacagatattgggttagtttcaccaagcccctagaagggaatcctagagcagttatggactccttctcatggactgagtttctctatggggtagaggggccctttggatagaagttatatgcatccgactcatatggacatgaatcttgacttctctatgttgtccatcagaacttttgaatgggggtgccaggcactgtccactcacatcacagcttccttgggacattggatgttggtgattcttgtgtagctctccagcctctggataggaattttcctattgatcacgttaaagcagcaggtgattggaatggaaactgaatctgaaagaaattttgcaaagaatgagacatttaggacccaccgtaagtgtgcatttgtaaggaaaagaagagaaggaaggagaagaccaagaagtcaccatcccaagttcagtgtcttagtccagatcccagagataaaatgttgcctgtgagtctctttcctctattgaactctgcggcccgtcattgttgactgggtttggaaacattttgagtaacaagctagtccttgtctactaacccaaaacttctgacactgggaacataagttccaataccttgcttcccagtctttcatcctcatgggctttagagttagcctatgccatacgctgagattcctctgggtcctcatcctctttacacagccactgttctggaaggtacactgaaccataaccaaaatttgaagcttcaggcaatagtttctccctctccactacggcctgaaatgtcctttacacccacagtgagaaacagttcttcgttctggattatttccccaaacaatgggagggttgttgctgtagcggctccactgtctcctcccaaaactggggtcaggaaagatcaagggaaccagcctcagtgacctgagcctttagttctggttttgttcctaatgagctgtgacataatggctcttcttaattcctcttttggtctccccttaaaaagggagaggtcttacctggctgagcaagtccctgagggctgaaagtggctgccatgagcagcaggcacagaagcgctgcagaaaccttcatcttggagggcaagggtgtgagcttcagcatgagaggtgaaggtttctgggttgttctcaacctctctgctcctcggtggctctgcctgccttttatagggagcagagagcctgggcatggtcacaatcaaggaagaatgaagtaagaccttccttgaatatgctgagtaagcaccagatcctgggataatttccagataacaaaacaaggaagttgtgagtttctatcttttgcttaggctctgtggagcagaggctgaagggtatgggattgtgctcagcaaagtgacctcactgaactattaagggctctgatttccttgaaatggaaaattgtctataagaaaggaagaatggaagctgacgtcatagtggaagagagccaagggcctacccctctgtgggtaacaggaggccagggatgggccctaaggctttgctggtgctctccatcacactagagtcacttgcagttctaagccaggcaagctcctttagaaccccagccacagaacgttggcagaatgacagaatcctggaactaagtcttaatgccccagaatcttactgttgcagagggtaagaactagacagcacatgctggtcttgtagcatggtggtttccaaacattttatttagatgctcaagtttctttccaaatgaaattatatggagaagtccaatatgtcatggagattcaggtggaatgggtccgtctgcagaaggccttccaactctcttggttcacacacagtggggctgtgggcggggcgtggcaagaaggaaccaggtttgcaaaagactgacctcatctactccccctgcaggcctgatctatccatcattacaatatcatatagaagttttcctgctctaagaattcactgtattcttctattcatcctttttcctctccacaaatctctggctaccactgatctttttactatctctgtgagcttgtcttttcccaagtatcatatgcatagttggaatcatatagtaggcagccttttcagactggcttctttcactaagcaatatgcatttaaggtttctccgtgccttgttgtggtttgatagctaattacttcctttgttctttattcatttattatttttattgtggtaaaaatgcacataccatcttaaccatttttaagtgcatagtttagtggcattaagaacattcacactgttgtgcaacagtctcaataactcttttcatctgtaaacagaaattctatacctattgatctccagtttcccctcccccaagcccctggcaaccaccatttctacttactgtttctgattttgactgctctaactacctcatgtgagtgaaatcatatagtatttttcttttgtgactggcttatgtcatttagcgtaaggatctcagggttcatctatgtggcagcatatgatatgctacatatccttaaggctgagtaatattcccttgtatgtatatagtacattttatgtatccattcatctgttgagggctctctattctgttccattgatccatttgtctattctttcaccaataccacaccgtcttgattactgtttcctaatagtaaatcttgaagttgggtaatgttagtcctctgactattctttttcagtactgtgttagctattctagatctttaacctttccatataaacattaaaatcagtctatcacatccaaaaagaacctgctgggatttggactgggattgtgttgaaggtacagatcaagttgggaagaactgacatgctgacaacattaactccacctatccatacatgtggaatatctcttcatttatttagatcgtctttaatctttcatcagaagtttgtagtttccctcatatatattgtacatcttagactaatttctaaacacttcattttattggtgttaatgtaaatagtattgtgtattaatttcaaattctagttgctcattgctgatatacaggaagttattgaattttatctattagccttgtatcctgtagctaaaattgcttattagtggcatgacttttttttgttgctgattctctgtaattttctacacagacaatcatgtcttctgcaaataaattcagttttatttattctttctaatctgtatatatttttattttcttgtcttgtgctgttgtgttggctaggccttccagtattatgttgaattggagtggtgagaagaaacatccttgccttatactcaatcttaggagaaaaatatctagtttctcaccattaagtatgatatttgctgtaggtcttttttaatgcactctataaagctgaggaagtatccctctattcctagtttgctgagagtttttttttttaaatcatgaatggctgttgaattgtgtcaaaaaaaattttccatctattgatattataataagattttccttctttagaaagttgatat

SEQ ID NO: 1243820 - DNA, 4001 bp, Homo sapiens
cagtatccagcagcagggcgaggctgtagggcagctgcagcaccacgaaggccgccaccagagccaccacgacgcgcagcgcacgccggcgctcgggccccctggcggccagcagcgtgcggcccagaagcgcgtagcaggctaccatgacgcccagcggcagcgcgaagcccagggccacctgcgccacggcgctcgcccccttcaccgtctgcgtgaggccctcggggaagatgaggcgacagcgtcgttggccttcccgctgcccatcctggctgaagagcagcgcaggcagcgccaggagcagtgacagcagccacacgatgacggagaccaagtgtgcgcggccgggagtggagggccgcggcccggctgggagcgctcgcgcgatggccacgtagcggtcggcgctgatacaggccaggaagaggaagccggcgtggaaggaggccgagtagaggccagagatggtgcggcaggtggcacttcccagactccagccctgaagagcccctgctgccgcgaagggcagagtcagggccagcaagaggtcggccagggccagctggagcaggtgggcagaggtgggcgagcgcgctgcgcgtcgggctgccaggtgggtggccaggaccaggccattgccggccagacccagcgcagccacggtcagggagacactgggttggaaggcccggctgaaggcctggacatcggccttgtagcaaagctccggcagtggctcagccgagtatgcgtcctcttcatccccagagtaatggccccaggaaacctgggagggtcaaatgagaggcgggatcttatgagacacatctgaccacacaactcccccgcccacacttgccttccaagctgagagctcctgtgtggccagatgtaacagtacacggggagacataagctcttctccagactcttcctagcacaccttcagcaggccttggcttcccttgcacccctcctacctctgcttccagcttcctgggtgaccttgagcaagccacttgctctttctagacctcagttacctaacctgtaatgttgagattataaatcctgaccagcccacctctcaaggtttgctgtgaagatggcaatatggaaaataatggatggggagaacctgtgttctccaaaggccataatacaaagtttgtattattattattatttattattattattattggagacagagtcttgctctgtcgcccaggctggagtgcagtggcacgatctcggctcactgcaacctccgcctccgggttcaagagattctcctgcctcagcctcccaagtagctgggactacaggcgcccaccaccacgcccagctaatttttgtatttttagtagagatggggtttcaccatgttggccaggatggtctcgaactcctgacctcaggtgatccgcccaccttggcctcccaaagtactgggattacaggcctgagctaccacgcccagcccaaagtttgtattattaataaatcctacagcttcagttccctttgcagcgccctctcctggaaggatgcccatatgcaggctttgcctcagacctgagccctggactccaacctccgtctggagtgggtttctgtttctcttctttcccttccatacccaccttccctgtacctccaataccagcacactgaaccactcatgccaagggggtctccagggttgggactcaggttttcagggcccaggtgggaccctggacctctaggttcaacccgcctttcccctcagccctagtccctgtcccacaaccccagcctcacaccaccagcccatttatctggaggacccctagtctgagacagcgccaagaatcctgaataagccataggatggcagaggcccattgccaggtggggaatcccattccttccctgtctcctccctctctgtaacccttctccccctccctgcccccactcccacctgctctgtggcctccgtccccatctctggctacacaggtttctgaggtatagccacagggggtagaagttaaactactagcgggacaggaaggaagaggcggggagaggggccgagagggaggtggggattagggtctacggggtcactttcccattccacctcctccaaaagacttcactctcttgtgcaggatctggattttacgaaaaaaaaaaaaagaagaagaaaggaaggaaagaggaaagaaagaaagaaagaaagaaaaaaaggaaggaaagaaagaaaaaagaatgaacgaaagaaagaaaaaataatttactgtctttgtcagtgaagaaagaacgggcttcggaatataatcatttgctgtgtgatattgactaagtttcttgacctctctgagcctgaggtttttcatctgcaaagtggagtagggcaaaaatgctaaattcacagtgcccagcaccactcctagagcataatttgccttccgaaaatgttaagattcttttacttacccttcattccatttccaggcacccctcccccaaaccacctcccttttcttgaaattttcaggatgcttctggccctaggttccctgtcctcactcctgtggccctagtcccgggcagcctcgggttacttggggttttcccggtggcgagaggctctctacccccgccctttcgcagcagggctgaggcacgcgcttgcgcggggtccgggaaaccggcgcgtgccaggagacagaggctggggaaggggggaggtgagaggaaagagggtggaaaggagaggatagagagagaagagcggaggaccaggaaccagagagagagagagagaaaagagagaggagagacagagcgcttgggggcgaaaggagagagggagggaagggtgggtaaggaggagagagcggtctgctgcaaaccccaggaggagagcttggagcccaagccagaactcgagccctagccggagccgttcacagggaggcggctgccgggaccgtcagccctgcatgatgcatctccggctcttctgcatcctgctcgccgcggtctcaggagccgagggctggggctactgtgagtgttgggcttggaggcaggtggggttgggcccaggagtccagagcctgcagggcggccccgaaccgcattgcggctgggtggtcgcgggtccttcccggccggcgcgcgcccgctggctctcatcttttcctgcctctcccccgcgctccgcattgcagctctgaggctgccgcgcgcgcccggggctggggctgggctctgggaagaggatgaagtcagcgggcagggatttggggttgggatccaagcaggagctggtgcctgggtttgaggctagggctgggggataagtgtatactggtgaccgatactaggattaaggttttgccagggcttaaggctggactttggagctggccaaggggtggggtttgtggctagggctggggtttgtggctggggctgggttttgtggcagggatccaagcaggagctggtgcccctgactgatgctaaggctggacatggagctggtgatggtgctagcactggctgaggttgggtgcaaggcctgtatttggggatggtgcaggttttgggggccgagttggattgaggctagggttggagctggattggtgtcttgggttgacttaggttgtggaagatgctgaggtttaggattgagtttgggaaagtactaaaccagggcaggtattgggctagctagggagggtctggccttgggcctataggtgtagcctaggggtttgcctagaaggagaaggtagcctcctctgagcatgcagctgttgctgcagccaggattgaatagatggctttaaggtagggctgggtgtgcctctgggggcgggggttgggggcacggaaggggaagcttcggtcgctaagtgggccggcctttggaagggtctgggaggggccagcgctgactaacagtcggtttccctaccctagacggctgc

SEQ ID NO: 1243821 - DNA, 4001 bp, Homo sapiens
aaaaaggccagctcagccctgcttgggagttttcattttgtgtaacagaaaccctccctcctcacccacctcttgctccttgctgggcagatgaagagcagaacaacagatcctccaaggcccacccaccccatcaacggcccagagagcccgttttgagtaaagcttgtcagcggcttcccctcctaccagtatttcgggtttgaccgttggggctctctcaagttgagtgaagtggcaagaatatcccttcttcctggaccagagattaccctctctccctgcatcaaagcctaggagtctagcacccctaaacctagtctggggtaagacactctgcacatcttcccaaccccctgttcagtcatgtagatggcttgaaatcaatcagccagggtgggagaatttacaccatggaaattggcaagcactacaaattcaggactttccctccaccctggagtcagctaccagtgctccaccccggggagctgcttttcaaatgcccagtagcacaccactgggcactgcttggtttccttcctggaggccagtatgaaaggctggagcagggtcttctgtgggtgacgtctgtactgtgggattgtgatggggggtggtggagggggtgcaggggagtgggatttaagggtagattggctgggaaatgaggcatttggaagagattttcaaaaactaaactctacggagttcttgatacggtgtattcattcattccgcagacattttctcctcacatcctcaaagcacctgaacctgcctttcaggagttcacagtcagtgggtggggtgaccactttaaccctttcacagctgtttgctgggtccagatccagcgttcagggcaggcgggaaagtaagagatgaaatcaaggaggctgtggtgtggcgaggaggggtgtgaggacagcaccagggaaccttcactttttaaagccaaccctttgcggctttgaggccgccgtggtgcattgtttgctggtgagacaagccatctaggaacctggtcttcttagcctcagcctggtctgactccacagctgagatttataaagggggcgtctggagctggatgaaccactcagaacaccctcagtgcttccccttgaccccttctaggttagacctgagaaagggctttctaaagagtagagttatctgccggggcagagtgcgtgaggtttgctcaggggcaggggctgtgctgaaggcctggctatgatttctccaagctgagtgccccttgccatcccattccatgttgcctgcccgttccttaacttgcaagaggcaacagcaaagccagatcaaagcaggtgggatgtgcagcagagagaaagcaaccagagcttgcatttgcaatgcaccgcaccattctcacaacccagtcacgtttcatttgcatctcctcatgaccccaagtggacaggtatatgaatatttggcaggggagaaaggtgggaatcagagagtgggtaaaaggtcctaagctctctagggagaatttctctgttgaaacctgtccccagaggtcccagagggcctaacctatcaccctcatgatgagaacaggttctgccagaccaccaagcccagccccgccactctcttatgtccctgctgttttagaaagacatgatctcggcccctcccttgtccccactggcaccaaaggctgaccccttctccaggtctgaaagggcaggtgcacccctcctgggacagcagggggcattctctggaagtagcttccaatgcccaccaaatcagaactgatttctccaggaagcacccctatgcgctccacccgcatcctccacccccattccacagggtcagtctgggtgtccaagaccctggtactgttccttctcacatgaagaggctcactcacccaggtccatgacgctctctgggcggtaaaaccacacaggaaggctgtgcccggcctcgcactacccctgtctggggaggaagtggttcaagccccttttaagttgtcggagaagccaccctcttccctgcccctcccacccttgctcctccccccagccctccctgactcatgcagggccccttcaatgccttcagagataaaggggcagaagaaaggtgacagagggtgacagtcgctggtcataggatcctgaatcattaggtcatttacattcaaaaagccccctgcgctgcctggcagaatctagatgaggggccatttactgattcaacaaatatttatagcatgaatatcacatgccaggccatgggttagatgttggggagtcagagatgtgtgagagaagtgtccccatccttcccttgctctgctcagtgtcacagtggaatatagtcccaaatggctttccctctggcttctgggtagtttaggccaatgggaggcactgacacataatgacaggtaaaagggaagagatatgccacgatgtatcttttttctccccccttcccctcccctcccctccctcccctttccctcttctcccctcccttccttttcctttcttaatgacagctttattgagctataatccacatcccataaaatttacctttttaaagtatagaattcaatggtttttgtatgttcacagagttatgcaaccatcaccacaatacattttagaacattttttctcactccctctcaagaaccctgtaatcactagcaatgactgctcccctcccctcctgtcatcgaaagcccctggcaaccacaaatctactttctggctctatagattttcctattctgaacatttcacataaatagaagtatcaatatgtgaccttcacatctggcttctttcagttagtgttttcaaggttacctatgtggtggtatggatccattccccattcctttttatggctgaataacattccattgtatggatatgccacattttgtttgtctgtcatcagttggatgtttgggctgttttcccttttagctattatgaatgatgctgctataaatatttatgtgcaagtgtttgtgtggacatatgctttatttctcttgggtatatacctagaagtgaaattgttgagtcatatggtaattatatatttaacattttgacgaactatcaaactgttttccaaagtgactacaccattttgttcccatcaacaatgcgtgagggttccacattgtcaacaaaacttactattgtccattcttttgattctagccatcctagtggctgtaaagtggtatctcattgtgttttttttcttttttcttttttttttttggagatggagtcttactctgttgcacaggctggagtgcagtggcacgatcttggcttactgcagtctccacctcctgggttcaagtgattctcctgcctcagcctcccaagtagctgggactacaggcacgtgccaccatgcctggctaatttttgtatttttagtagaaacggggtttcaccatgttggccaagctggtctcaaactcctaacctaaggtgatctgccagcctcggcctcccaaagtgctgggattgcaggcatgagccaccatgcccggcctctttgtagttttgatatgcgttttcctaatgactacctatgctgagcatcttttcatgctcttattgaccatttgtattattttttgagaaatttctattcaaatcctttgcccatttaaaaaattgggttatttattttttattattgagttgtaagacttctttatatattctggttacaatcccttatctgatacatatctgtaaatattttctcccttactatggatcatcttttcactttcttgatagcgtcctttgaagcacaaaggctttttgttttttaaaacctgaatctctggcaaaagaagcgcaaagttttaaatgtggaggttcaattgatttatttttcttttgtcaattgtgtctttggtgccatatctaagaaaccattgcataattcaagtatacaaagat

SEQ ID NO: 1243822 - DNA, 4001 bp, Homo sapiens
ggggagacgctgttgggaactttcctcccaagctccaggcactgtgtttgctgaaagagaacatcagaaccagattgtgcctttgaacacctggcctgctgcccggcatcactgtcctcacctccttcttgtcctcctccactcccaggtcctggaaagaagcagcatcagaatgcagggcagcccctcccaccccctgtcttggcccatctgggctgcttcttggagctgggaagtcttctctagcccagaccacccctcaagactgagcttggttggtgggtctgagtgccccctcccactccacctgatgtgggatgaggcggcaaagctatgaggtcgtggggtaggtgcacacgtttccagccctgctttggtgctggtagccactggcccaggagcattttcctggcatccaggtgagtgcgcagccacacgtgcatgaagccaagcctgagtgtctcctgagggaggtgggctgaggaaggaggatgacctcacaggctgggtagagggatgaggttccttactggtccacagcgatggagactgcctcagggctccaccagctccacaacaccccctcactgaaatgacattcattcagcactgactgttggtccactgggcgcacacccttggcctgcctttgggacagagatcccttcccttttatcttgtgcaggcccagaattgaggaggtgccccacaattgtgtgctgatgaatatatgaatgataaatacatgaatgatgaataaatacatgaatgacaagtaaacgaatgcctgtcctttttccaagggagagggcatcaagatggcccgagaggacacagaagggatgctgtcctgttgcagtgtgggggaaggacgctctttcctgatgtcacgacttctttatttttttgcttaactgaagtgcctgcacacactttctctcctttaacttgttttctaacttaggcttggggggcaggtgaaagggggaacagggtcagctttgggaagcgacgtgttctggaagtcaggaggcttcctggggtctgagcagctgatggggaccccggtgtagcacaaggcccagatgtgctcagtctggttttgtggctgagcctggggcccagcaggaacttatttcttcctgaggctgagcagggaggacagttgacagagtaatttgcctagatgttttagcttacctacaagtcagggcggcagtagccctcttcccgtatcctgaccctcaggtcccagctaggtagggcctggcccactggagagtcagtaactgcgatgccacaagtgaaggcaggcccttggcagctccaagctcaatagcgccaggaaatgcgtgggaacctgtttaaggcaccttctcctggaggctggggaagcagtgagagcccagcgcttccgtgtccttggccacagcaccacctgctggaagcctccctgcatggcacccaggttgcagttggttaatgtgttccccggaaattgtgtaaagccagggattctgggcttgggagttcctccgggaaggagagactgcatcgggctacataaataaataggtatttctcccgccttgagcaaatagtcctgcacactactgctagacacatctgcctaaagcttagctctgatggcagtccccacctcaccttcctcctaaatcctcaggggctctaaccggccctgaggatgaagcccctgatgcttggcctggcagtccagtcctccgctgtccactcaaagagggcttcctagctgcattttctattctggggacaggcagccgctgtcccctcgttcccagcctgcgctcgggcatttgtagtcctgctgcgattggaccctgttgcaacagagctccccaccgctcattcccctttttcactgaattaccccttagctcctgagtttaagtccacgtttacgcccaaccacactcttcacggttcaacgctccacccgccctccactgactcatctagaggtcgagtctcgaggtttctttaaaacacgtaagtgtctttcggttactctagagaaagcccgctctgactgtcagggagaaatgagaaacctcaaagttttgataagtcacaacgggtgagatctgaggagcaagaactgtgtttctgttgaactctgttgataaccccttctcccggacgctgtcccactcctgctgttcccgtcaggggaggggagttgggggagtgctggcgtgtgtgcctgtgatttctcattccaggtgttttggaggaggtggatgagcaagggtcttgtaggtccaaaacaggtggctttcaagaaacatcacagggaaacttaggggaactcttgtatgtggcaaaagggagcctggtcagtggccttgagtcagatcatccctgtctgttacaaagtcataaagaaactggtcttgggcagcagcttcagtgagaccaatgaagttgggaatctctggggctaaggagtggttgacctagatgttgggtgttttctgagttcttgagttttcagtaatgatcatcatgaaaattccctagaactccaaccggagcccccaacatgagagactgcccatccaggaaagaaaattattggctggctgcccccatctccaaaccatgaacttccatccccacatttttccaggtcctccagactgcccaggaaatcacagttgcccaatcagctcgccccaagagcgaccccaagctttttcctctttgaacttcctcacctgccaacacaacttttctctctctctctttttttttggataagggaggcagaggagaagcagggaggtggtgagaggtctagagatctggggaatccactttcagacagtaggcagggatgggtgagagcctggtagaccttgcattttctatgttatcaactgctgtatccaatgagataattcatattcactgagctctcactgcgtgccacactgtctgcatgtatggtctcatttcatcctctcaaaagccccatgaggtaggcgctactattatccccatttaccaatgagaaactgaaacacagcaagtaactttctcagagtcacacaatggccagcaggggagcaggctttgaaaccctccaactccagcaaccacactcctaaccatccttctgtgcggccactgggtctgtatgtgtctctccctcataacatctcatgagctaccctggtgatcctcatcttagattccagaaaatagaggcccagagagattaagccaaatgcctggggccacacagctgctaagagagggacctgagatttgaacaggatagcaaggtttgggctctggctactgcatcaggctgtgtttctgatgagcctgctgcatctaggacgctccacggagcatgaggggaatctttgctccccatgccccactggccaccagtgcttcctgcttccatcccccaacatcccggcccccaaaagagccggccccacctctgttctgacacgggctttgctgcctctttgctgccacagaactccttccaaaacacaaatctcatcctttaattcacctacttgaaaaataaaaatctttgatgggtccccattgttttcaggataaagttcaaattccttagggatgccgtaccacgttttaaggattgggtctcctgtgcctgcgtccttcctcctcatcttcctccttggcatggccagctactccaccctcccctccgcttgcttctttcttgtctctgttactgttgtctcagctgaccatctacacggctgcagccttagtccccaggacactctgcttgtcagcatggagtttttgaaataatagatttgaatgcctttaggtggggcatgcaccctctgggtcactctactcccctccacttcctgcaccttatgcccattccctctattaccttgtcggcctctgatggcaatggagtttgccattcctgccacatcctgggcccattgcagctcctt

SEQ ID NO: 1243823 - DNA, 4001 bp, Homo sapiens
gccagggaggccggatgggtctctatttcaccaaagaaaacgggggctgcgagggaagcctttgggtgaaggttggaaagagacaactttggggcgataggatagtaacaagatcgccagatccagggtgattttctcagcacacgtgcacaaaacccagtaacattttttgctttttgcagctcttctctctctaagaactcagagtccatatttctgtctcctgggcagggagattggaggtgggatagggaaggtggtaagttattttcccccatgttttaacctaaatggagtaaaggaagtccagagaacatctgtggctctccagggtcactcagcagatggtgagggggcagccattagcttaatgagtggcaggcgggcttatgtctgggtcttgtatcttctagcaaatgcccagctcctccactaaacccctgacttgggaggccgtgtggagaagggaacagagctttccttggcagagaacctcacctggaaaatgacaaggagagccaccaccagcacgcttttcattggtttccctgtaggagacaaggcgagaaagttattgcttggcagggacaagtctttgttattaaagaaagcagtggagggggagacgctgttgggaactttcctcccaagctccaggcactgtgtttgctgaaagagaacatcagaaccagattgtgcctttgaacacctggcctgctgcccggcatcactgtcctcacctccttcttgtcctcctccactcccaggtcctggaaagaagcagcatcagaatgcagggcagcccctcccaccccctgtcttggcccatctgggctgcttcttggagctgggaagtcttctctagcccagaccacccctcaagactgagcttggttggtgggtctgagtgccccctcccactccacctgatgtgggatgaggcggcaaagctatgaggtcgtggggtaggtgcacacgtttccagccctgctttggtgctggtagccactggcccaggagcattttcctggcatccaggtgagtgcgcagccacacgtgcatgaagccaagcctgagtgtctcctgagggaggtgggctgaggaaggaggatgacctcacaggctgggtagagggatgaggttccttactggtccacagcgatggagactgcctcagggctccaccagctccacaacaccccctcactgaaatgacattcattcagcactgactgttggtccactgggcgcacacccttggcctgcctttgggacagagatcccttcccttttatcttgtgcaggcccagaattgaggaggtgccccacaattgtgtgctgatgaatatatgaatgataaatacatgaatgatgaataaatacatgaatgacaagtaaacgaatgcctgtcctttttccaagggagagggcatcaagatggcccgagaggacacagaagggatgctgtcctgttgcagtgtgggggaaggacgctctttcctgatgtcacgacttctttatttttttgcttaactgaagtgcctgcacacactttctctcctttaacttgttttctaacttaggcttggggggcaggtgaaagggggaacagggtcagctttgggaagcgacgtgttctggaagtcaggaggcttcctggggtctgagcagctgatggggaccccggtgtagcacaaggcccagatgtgctcagtctggttttgtggctgagcctggggcccagcaggaacttatttcttcctgaggctgagcagggaggacagttgacagagtaatttgcctagatgttttagcttacctacaagtcagggcggcagtagccctcttcccgtatcctgaccctcaggtcccagctaggtagggcctggcccactggagagtcagtaactgcgatgccacaagtgaaggcaggcccttggcagctccaagctcaatagcgccaggaaatgcgtgggaacctgtttaaggcaccttctcctggaggctggggaagcagtgagagcccagcgcttccgtgtccttggccacagcaccacctgctggaagcctccctgcatggcacccaggttgcagttggttaatgtgttccccggaaattgtgtaaagccagggattctgggcttgggagttcctccgggaaggagagactgcatcgggctacataaataaataggtatttctcccgccttgagcaaatagtcctgcacactactgctagacacatctgcctaaagcttagctctgatggcagtccccacctcaccttcctcctaaatcctcaggggctctaaccggccctgaggatgaagcccctgatgcttggcctggcagtccagtcctccgctgtccactcaaagagggcttcctagctgcattttctattctggggacaggcagccgctgtcccctcgttcccagcctgcgctcgggcatttgtagtcctgctgcgattggaccctgttgcaacagagctccccaccgctcattcccctttttcactgaattaccccttagctcctgagtttaagtccacgtttacgcccaaccacactcttcacggttcaacgctccacccgccctccactgactcatctagaggtcgagtctcgaggtttctttaaaacacgtaagtgtctttcggttactctagagaaagcccgctctgactgtcagggagaaatgagaaacctcaaagttttgataagtcacaacgggtgagatctgaggagcaagaactgtgtttctgttgaactctgttgataaccccttctcccggacgctgtcccactcctgctgttcccgtcaggggaggggagttgggggagtgctggcgtgtgtgcctgtgatttctcattccaggtgttttggaggaggtggatgagcaagggtcttgtaggtccaaaacaggtggctttcaagaaacatcacagggaaacttaggggaactcttgtatgtggcaaaagggagcctggtcagtggccttgagtcagatcatccctgtctgttacaaagtcataaagaaactggtcttgggcagcagcttcagtgagaccaatgaagttgggaatctctggggctaaggagtggttgacctagatgttgggtgttttctgagttcttgagttttcagtaatgatcatcatgaaaattccctagaactccaaccggagcccccaacatgagagactgcccatccaggaaagaaaattattggctggctgcccccatctccaaaccatgaacttccatccccacatttttccaggtcctccagactgcccaggaaatcacagttgcccaatcagctcgccccaagagcgaccccaagctttttcctctttgaacttcctcacctgccaacacaacttttctctctctctctttttttttggataagggaggcagaggagaagcagggaggtggtgagaggtctagagatctggggaatccactttcagacagtaggcagggatgggtgagagcctggtagaccttgcattttctatgttatcaactgctgtatccaatgagataattcatattcactgagctctcactgcgtgccacactgtctgcatgtatggtctcatttcatcctctcaaaagccccatgaggtaggcgctactattatccccatttaccaatgagaaactgaaacacagcaagtaactttctcagagtcacacaatggccagcaggggagcaggctttgaaaccctccaactccagcaaccacactcctaaccatccttctgtgcggccactgggtctgtatgtgtctctccctcataacatctcatgagctaccctggtgatcctcatcttagattccagaaaatagaggcccagagagattaagccaaatgcctggggccacacagctgctaagagagggacctgagatttgaacaggatagcaaggtttgggctctggctactgcatcaggctgtgtttctgatgagcctgctgcatctag

SEQ ID NO: 1243824 - DNA, 4001 bp, Homo sapiens
cttaaagatacacaagttctactatgcttctaattaaggcttattaaggtttattaaagtcagcagcatcagctcaccatctcatcgagcagcacattgccatctttggtgagtttgatgtcacctgcaccagaaacaagcctgttcagagaagaatgatattaacttcatgtggtaggaagacattcccagtgcttgccactccattatccttaatagagggaactgggctcggaaaacttccactgtaccatgggaatatgccatggtaattaccaccatttgcagctcacagaatcatttctccccagatggacagattatggagatttcattccaaatggactatttacaggtttaaagataaaagcacttgatgagttacgaactgtggtttggtcaaagaatacttggaagtctacaaagcacaaattcgcaaatttcctgcaggttttaattttggtgaatgttttcattcattcagtcactcaacttagtttccctcatccctgcatttattagatcaccaagttctatcaattctactacctaaatatctcttgaatctgccaccttctctccatctccactgttatcatctctactttggatggcatccggatatctccaaacttaaatataccctccacacatttttctttctaaaaggcaacgtgattcagtcagttccctgatcaaaagtcctccaatgatttttatgttttccatcattttcaagttaaaatccaaacacagcaatgacatacttgacctttcccaatatcttccctgcctcatctacttttccacaagcaaatcttctggttcccttaatataccatgttttgtttcgtttctgttggatttgcaccattggtctttcttattcctgaaattactttgcccaggcctttactccctcttccaactagtgaagtcttattcttctttcaagactgatcaaacatgttacttaagatgcttttccttctgccatcagtccctttcttcagcataattatatgcatctatatataattagcacatcctactctaccacatccgtctctaccacatctccttaagaacagaaaccgttatcttgatcatttctgtgtcccaacaactggtacctaagtgacttattttaccattaatattattttgttcattactatgaggatgtgtctctcctcttatacccttttgccctcactggtctcttttcctcactcttgtctatagaaaagggtgcttaatatatactgaaaagatgaatagatctgaacaaccatagacacggggtattcaagtagaacttggatttgaccccatgccttcctggctccaaagcctgtgtcctctccactacaatacattgccatacaaaaaacaaaactacttgttgaatttatggaccaagggtatacagtcttaaggagcagaggagttaaatgctttgtttccaatgagacactaaattaactgactttctaactgcatatgaaccttgacgacaagtcgggggtcggggaagcgccacagcttcactcccggggccctctactaggggaggcttttctcctccacctgcaccaggcgagaaatacccccagagcagggatgagaatgagggaaatcaagctcgcaagaacatccacagcgctacgcggacgcctgcctcagagggcgacaggacaccaacgggcccctagccgcgtaatggccgctccaaccgctgtctcacattttcatggtgcctttaggacccaagttggtccgcagcacatcctgcagccctcgggcggcgcatatattgacagccaaagctgcccgggcccgcgccacctcagccttggagttgacggcctttatcgcagccatagcctaaccgttcagagggagaaaaaaaaaaagccttagtcgcgattctgagcaaaaacggcaatgcgacgccacgctctcttgagcctcggccaatcatcgcccttacaggaagtgacgttatcatgcctcgcccgacggaaaccagaatcgttttgggtctggtcgccaagatggcgtcctccgcctccgcccggactccggcagggaagcgagtgataaatcaggaagaattgcggcggttaatgaaggagaagcagcgtctgagcaccagtcggaaacggatagaatctccattcgcgaagtacaaccgtttggggcagctgagttgtgccctgtgtaacactccggttaagagcgagctcctgtggcagactcacgtcctgggaaagcagcaccgagagaaagtggccgagctgaaaggcgcgaaggaagccagccagggttcgtccgccagttcagcgcctcattccgtcaagaggaaagcgccggacgcagacgaccaagatgtcaagagagcgaaggccaccttggtgcctcaggtacagccctccacatctgcgtggaccaccaactttgacaaaataggaaaggagttcattagagcgactcccagtaagccttcaggactcagtttactccccgattatgaagatgaggaggaggaggaagaggaggaggaaggagatggagaaagaaaaaggggggacgccagcaagccgctctccgacgcacagggcaaggagcactcagtttcctcttcacgggaggtaacaagtagtgtgctgccaaacgatttctttagtactaatcctcccaaggcccccataattcctcattcagggtcaattgagaaagcagaaatacatgaaaaagtggtggaaaggagagaaaacaccgcggaagcgttaccggaaggtttttttgacgaccctgaggtagatgcaagagtacgaaaggttgatgctccaaaagatcagatggacaaagagtgggacgaattccaaaaagccatgaggcaggtcaacactatttccgaagccatagttgccgaagaggatgaggagggacggttggaccgccagattggggagatcgatgagcagatagagtgttaccgacgggtggaaaagctacggaatcgccaggatgaaataaaaaataaacttaaagaaatcctgaccataaaagaactgcagaaaaaggaagaagagaatgctgacagcgatgatgagggggaactacaggatttgttgtctcaggattggagggtgaaaggggcattgttatagggttttaaagacccaaggtttctaacagcctctgctgttgtataaaaagtgctgtctctcagtagtatagcggttacttcatgcctcaagatttgggtacctggattgctaaactggattgttgagataaaatgagccagtgagctacagcactttggaaaatttgtgtaacatgtttttgaggtaaagttgtttttgaaatttctgaagtgttatataccaaaatgccaacatttccacgacagacttaactgtataatttcgttgtaaaatctgtaagttgtaaatattgtacatagttaaatctgtattctgttttgaatttttttaattaatagaaagaccaaccggcaaactttcagatgaatgcttactgtggtatttggaatgtatgtatcttctgaaccctacatcaagttgaaaaggtttgttttcttgtttctttggtttttgtatggttttttagaacacttcataaacacataagtcattgtaggttaatcagttctcttagtgtgctttattttaaaaacataagaaaactatatgccaaacatgaccaaaccaatgatggtcagatgtggttgcacatgagagtcacctatgaagcattaaaataattaaagtgtctgaggccttccccttcaataaatctgggattgggcccaggcaactgtgttttttaagcacccaggttattctaatatatgccagggttagagagtaactgccctaaatccagaacccatttatgtttttcaggttttttctttttctttaaataacacattccataaatttgctgtttcttgaatgaaggaaaaa

SEQ ID NO: 1243825 - DNA, 4001 bp, Homo sapiens
tccagtttgggtgacggagggagaccctgtctcaaaaaaataaaaatgttggccaggcttggtggctcacgcctgcaatcccagcactttgggaggccaaggtgagtggatcacctgaggttgggagtttgagaccagcctgaccaacatggagaaagcccatctctactaaaaatacaaaattaaccaggcatggtggtacatgcctgtaatctcagctactcgggaggctgaggcaggagaatcacttgaacctgggaggcgtaggttgcagtgagccaagatcgcgccactgcactccagcctgggcaacaagagcaaaactccatctcaaaaaataaataaataaataaataaataaataaataaataaaagtaaaaatgctttgtgaatagtcattggtggatcccttcttcctaataatgagaagctctggtcctttttccctgagtcagcaacaaggcagggacaaccactaccactatgtccgctgggcctcactccggctgtaccagccaatgagtcaatgggagaaagagaaacagatattagacaggaactgaaaccttcccatgcacaccgaccctatgaaacagaagaacacccaagagaatcgcaggagcacctgttatgggaggatgacccgtttccaagtcaagacaccaaaagtaataaccttcccacagacaagtagttagcaaatataattgcagaaaacctccgatctgtaaggaaagcaaccacaaagacgtacaataccctaggactaggcctgaggagtctgcacaggagctgtctgaggagagcggtggacgtgactgaaggcacagcaggtgactctgcgggaggaatccctgcgcttggacagggaagactcaactccacgcttctccctaaagaagatctcagcgcttctctgcccgatcttttccctcctcgccctccccaccaccttttctgtcccctctgtcccatatccccttcttggagaggactgacccctggttctcaggcccatgcaggggctaaccccagccaaggctgcctcgggacttccccctgctcaggccccagccgctgggctgccctggttaaatctccgcattccagagactatcgatctgctccccaccccgaccctatctccctcaccgccccaccccctcctccgtaccctgcacctagtgaggccggcatctcccccaccctccccacacccccctcctccataccctgcacccagtgagcccggcatctcccccaccctcaccacatgcccctcgcagtcagtggctgccactctccacccaccctgacacatcctgcctctcgtcccccttcctgtaagaattcaactgaaaacctaaaaggtcccttttctgcacccaccccttatcacttgccccgctgtggttcagccaaggtacgtgggtgcagagccgggagaggccctggctccttcctctcccaggggtgtggaccttcatctgtccatcttatgtggtagacagagcgcaccgcattctgcgttctgcacggagtccagactcggggcgtctcgtgtgatacctgccctgcggccctgcccctcgcaccctccctccctgccgcagactttcccgggaagggaaactctcacctgggacccagagaagcaacagagcccaaggcagccacatggtcccttccccagcacaggcggcacttgcagcagctccaggccctacctggacccgaggggaaagtcacgcctccaaggccccgacttctgcttttcttggtgccgcgctgcttccttgttcagcttcttttggttctattcctggagccggtcagaaaatgcaggaagctggtgagccccgactaagactccctagaaacggcacgtcctccttaacgctggttgaggctgcaggttcttcggctatttctagtgatgagacctctccctgtagtgactccgtagcttgcaggactgatccccgactctcacttccccgggtctcctcctagtggaaggcccaataactcctccctcctttccttgtggtcaaggtgggcaaccctgggggtgggacccgctgagctggctcctctcaccctcggtggtgcccacgaggaggctgccagggggaactcccctttcctgagtcccttccctgagtcccttggaggtccaggcctgggcttcggggctgagggaaggggagttgtcatcgtgactccagagtccctgaatggttcctagtcttggaaatgtgtcctcaacttgacacagaggtcctccggccatgccttcctttctatatagccccattggagccaactcggggctgggcacagagcagggactcagcgagcctgcaaggacccctttcctgatccacacagagtgcagactctaaacacacacacgctcacactcacatacacactcacacccacacacactcacccacacacattcacaaacacacactcacatacacacactcacactcacccacacacattcacaaacacacactcacatacacactcacacaaacacactcacccacacacattcacaaacacactcacatacacactcacacaaacactcacccacacacattcacaaacacacacaaacacactcagccacacacattcacaaacacacaaacacacccacacattcacaaacacactcgcatacacacaaacacacattcacacacccacacacattcacaaacacacactcacatacacactcacatgcacacatattcacacacacccacacattcacactcacacatacacacaaacacattcacaaacaaacacgttcatgcacatacactcacatatacacactcacacacacattcacaaacactttcacaaacacatacacacacgtacacacaaacacatacacacattcacaaacacgttcatgcacatacacacacacacacaaacattcacacacccacacacaaacacacacaaacacactcacactctcacatacacacacactcacccaaacacactcacatacacacacattcacacacacccacacacatacactcacacaaacacattcacacacccacacacattcacaaacacacacatacgcacacattcacaaacacacgttcatgcacacacacatatacacacacacaaacacacaggcactctcacccacacacattcacaaactcacattcacacacaaacacaaattcacacacactgatacaaacacacatacacattcacacattgaaacactcaaattcacacaacgcacttacatatacaactgaaatacactcacacattcacacacaaactcacacactgacacattcacacacagtgacatacactcacacacacacagtctcacacacgtgccttgagtaggtgccccagcttgcacagaatgaccaggtgggcacaggaaatgccactcctaatgtgtaatgcgtcacctgggagcttgcagtccccaagctcagagtgtccacccacatggagccctgtgccagctatgggatcccaagaatatccttccctctggccctttttggaatttgtcactttcctcttccttctgaacacaggggcgccttgcccacgaaggtgtcaggaagccaaggagacctatgggctctgctgctggaagattcaatgacaaagcctggtggacattgtggaaattttcatgatgatgcagtcatagattaactaaacctcattaagatccaagacacttcgggccgggcgcggtggctcactcctgtaatcccagcactttgggaggccgaggcaggcggatcacgaggtcaggagttcgagaccagccgggccaacgtggcaaaaccctgtctctactaaaaataaaaaaaatgtggcgggcacctgcaatcccagctactcgggaggctgaggcaggagaatcgcttgaactcgagaggcaaaggttgcggtg

SEQ ID NO: 1243826 - DNA, 4001 bp, Homo sapiens
ggggaagagcgagttagacccaggcgggacagtgggcacccttcagtatggatccggcccttgtcaatacagggaggtagcaaggaccccagagtcaggggtggcctcacagaccccacccaggaaagtttcaggcctgaggccgtgagggagggcccacagcggggggtctccagccacagggccagggtgcttttgtgggcgcccaccctcccaacacacacatgcaggtgcacacacacacaaaccacaccacaactcctatgcaggcacgcatacacaaagacgcactcacactcatccacacacagcggcacacagtgtcctgactcaccaacccccaggctcacaccctcctgttccacttctttcttcagggacagaatgaccagccctaggctcaggcaggcctggtgctgagaaaaggaggggctcacccgggaacacggacacctcaacctcgacaatgggatcatgaaagtctcggagccacggtgtatccaccccacaccagtaggtgcctgcgtcctcctctgtgagattctccagggtcactgtgaagctgaggtttgcaggactgtccctgatggacactcggccattccttttccctgctgaccctttggtctccacaatcttgtcacatcggagaatctgtggtggtctgcaccagaatttgttgagggtcctgtgttccttctcatagcgacactgcacactcagggatccccccacggggcccgccacggtcatggggtggctcagaggaaaatagcctgaaaaatacaagccaaaatcctgtctccttaccagaggggcctggtcaggggtgccgcagtgtcagcccctcatggaccctgggcgtgtggagaaggcaatggcaggcaggcagcctttgtccacccaggaacagggactgagggtgggaggctccctctgtgcagaggtgggaagggcatgggaagtttccatggagactggaaaggcaaggctagggaaacactgggtgtgtgcgggcctgtgtgtgcatgtgagtgtgactctgtgtgtgtgactgtgtgagtgtgactgtctgtgtgagtgtgactgtgtgtgactgtgtgtgcatgtgtgactgtgtgtgcatgtgagtgtgactgtgtgtgcatgtgtgactgtgtgcatgtgtgtgtgagactgtgtgagtgtgactgtgtgtgcatgtgtgtgagactgtgtgagtgtgaccgtgtgtgcgtgtgagtgtgactgtgtgtgtgatcgtcccagataaaatttgtgattggataactttggcaatgacagtcacagcatcacctcccaccagggcttcctgtctcgggcacagaggaataggcctcccccgtgctgtgccctgccgcctgctgtcccctggtgaggcagctgctgaccgctcctgggtgctcctttgccctcctcccctctccctgccccactcccctctatgaccgctactccagcgcctgcacccctccctgccctctcccactcaggacagagctccccaagtccagggtcggcccactcacctgggacaagcaggaggagcagagctgaagaccgccacgaggcccaggccctggcagtcattcctgtaacacgaatgtcacctgccactgtgcaagaccccaggaggggacaaaatgtaatctcctcccagcagatctgagcttcgcttctgcttttcttctgctctctgcttccttgtccagccctgtctcaggtctgaggctggagagggtcagggtacaggaagctcagggagagagccgcctgggctgaggccggtgctgacagctctgggatggtgctagtggctcctctcaaccctgacgtctggcaaagtccagggtcccttgggtggcgatgcagccacttccccacagcccacagcttctggcttcagtgtgttactcacactgcagaaggcagagccaagctgggccatttcctaccacatgggctgctccaccctctgtgacatgtcacttcctggtcaggatggacaatcttgtggttggaggctaaatctgccaccttctttagccttggaggtgaccagagagaggttgtgtcccttaatcttcagctaggtccccgcagagacctctgcccctaagacccccagctcttcttctggcctcagaagttagcgctatgaacccagacaccatctgcatgtccctttttggtgctgagtccccaaccaggttaaaatcccacaggcttggggagttttcctcttgtgcccctgcccccagacctacacacacagcggcatcacccacccgagaccctccttttccatcttgtcttcttgccaaaatccatgccccagtgggaatcagggcagagaactgagaatagagagagagttcagacatgtgaagatgctgaagtgggactttgtggaggatgtgaggctgcgactgagccagcacacaccccagggcacacggaggggtgtttggtgactgagaggacagtttgtcatgagcagcggctgctggtgtctatcctgggtccactgtgatggccaggggcctccgcagggagcagacatggcagacaggccttcccaggaggcgggaacccaggtctatccacactcggcatggctggttctcctgacgtgatgggctcagggtgtctttaccctggaaagggcaaggaggctagtcagacacaggatttacctcctgtctgtcctggagggcatcaccccttctccaccttctcatgccttaagcatattccttgactctcccaaccctcctacagatttctgttcctttcttcctatcagagtcaatagcaccagtatgtgcacacagccatgaggttgagtggagagtgatgggagtctgggcaaacctggcaccatgaaggggtctctgcaccctcgacctgccctgtcctccctccatttacactctcagggacacagcatgcactggggtcattggtgttgatgcccccagactcacatcatgggactatctctagcccagtgcaatcccagggcctccaattagcccagtgctcaggtctggcctgggcctggctttgaagtatcccggctctttcatgggctgacctggtctccccttctgctcatacccacccctttcattctccacagaatcagcaatgtgatccctgacacacacacatggccctggggaggcgctgctgaactcccaatggctcctgctgtcacaggatggcacccacctgacctggcctctgcacacaggtcctggcaggccccagcacctggtaggtgtctccagcctcctggatccaggttcacactggtgctgccaccctccccactcgggcctttgtccagaccctcaacctcccactcctctgcctggctccagccgacagggttgcctgcgtgttccttgaccttcccgggttatggtggctcgctttttaggggtcctcatgacccatttcacacttccctctcgtcttcctcagtctttctgttggcgagtcaatgtctgctcccatctagggtggccgccccttgagagcaggtgcagcctcttgtctcattcacagctgtgcccgttatcattccagagtctgccaagtgcagtttaacaaactggctgttgaaaggatgaatgggtgaatggatacatgacatcctgatgtcccactgcctcagaggacttagtcatccaaagttggtgcaccatttcctgcccaggctggggaggagacaggaaatgctgtctggaggccctgaagccacctgacccagggaggcatctgcccctggcaggacatgtgcacctgctcctctctctgcctcagggctcctcctccagggatcctggcgctcaccccctcctttctcctgatccctgcttgctcagcgcctattagaggggcttcaccacagtccccctcagctcctgcacagcagtcaccccacttctcttatttcattccgtgactctttt

SEQ ID NO: 1243827 - DNA, 4001 bp, Homo sapiens
atctggacttcatttccagcttgtctacttagttcttatgtcatcagatctcccttcatcatcttatttataaagtggagtcaatgctatttgccctgcctgggtcacaaaactgctcagagggttaaattctatcatctatttggaagtgtttataggttataaaaatgtgtaataaatagaattctagttttgctctttttaaattttttacttttctttttttgtagaaatggggtcttgctatgttgcccaggctgatctcaaactcctgggctgaagcattcctcctgctttgacctcccaaagcactgggattacaggtgtgagccacctcactcaaccaacgtttgcttattttgtatttgaatttgcttccttcctctttgtcatttcccctccctgctagaattgccctttccatctctctttcccagttaagattttcagagggacctgcgcaggtcacattgcgagtctgaggatggggaatgagataggggtggaaagagagatggaaagggcaaagaaaaaggaagcaaattcaaatacaaaatgagcaaacattggttgagtgcagtggctcatgcctgtaatcccagtgctttgggaggtcaagagaggaggattgcttgagcccacgagtttgggtccatgtcacctacctggtcttcttcctttaaatcgctgtcattttcactcacccttctagaaagaatcttgtcattacattgggcaatttctatgttttgtgagggaactcaaccataaaattcattctgcaaacatgaagaatgtcctctaatttttagcctaaatttatttccccagagacaaatgtgttttcctgcagttttgtattttgaatgtctattaataagagtttctcttctgaagtccaacctttgcaggacagtttcatttacttgtttacaccacaccttgttccgggaaggatttaaggtagatgttgaggatggcatttttttttttcagacaggatctcaactctatcacccaggccagactgctgcagtggtgcaatctcggctcactgcaacctccgcctcccaagttcaagcgatcctcctgcctcagcctccctagtagctgggactacaggcatgcatcaccacgcccagctaatttttgtatttttagtagagacagggtttcaccatgttggccaggctggtctcaaactcctgacctcaggtgatccacccaccttggcctcccaaagtgatgggattacaggcgtgagccaccacgcccagcccattaattatttctcacaaaccattccaacccctttacactaagcttcgtcaaaacagaactattgttaattcttgaactctccatggtctttaatgtcctcacacttgcacataagctattcctttcccactcagccaactcattcatcctgcaggatggacttccaatgaagcctcagtgacatctcccacccttccaagagcaaagtgaggggttcctgttgcatactctcatcaccacatgaatgagtctctacaacagtaatttccacattgtattgtagttagttgactccctcagttcagaagttactcttaattacagcacccagaacagtcctggcacatatctggtgctcagtaagtgtttgtaggatccgtggatgaatgattgaatgtatagaaggatgcacaggtgaatgaacggatgtatctttcccttttctgtggacacttcacctctggtttgaacccaggacagctcttctacctactgtcctgccccctgcaaaaccaagtccccaaagccacagccccactcacctgagaggcagagaaggagtagagctgggagcagccacatgttcctgtctccttggcttccgtcctcagcaaatctaggtcccagctggaatccaagtatatgtaacggagcctgggtcatccactttctacttgtccaagtttcctttgtgttctcactcatctatttcctcttttgccttttaaagaatgcttcctaattttaagccttacttagcagaagagaaagggtggcaagagacgtttctgagaatggaccaagcacaaacaggaaaatctgttggccttcatttaatgtgaacgtaatgtttgagtcaccccctgagatttcatgactcggaatttcatgaaagtcagtcccagtttacgaaacctctccaacagagaaaactctgttccctgcctctttcactcttcttcctatctgggattacttcatcgatctaaggagcttcccttctctatggctgcctacttttgaatcataaaacaccctctacttaaggagctgtggtgatcactccccatgtctttctcaaccgttatctccatgcggatgacttcacacctcttcctctaacccaatatcccaatatctctcctgggctccagatcctactttctaacttcctatagggaagctccacctggttatacactgttaacctagttcagtatatgggtcatggtcaacagcatagattctgaagtcacacaaactcaaatctcatctccatcatttattaatcatctgaccttgggcatgttgccaaatcactctcctcctcagtctcctcatctgtaaaatagagtactcatgacaattctttctcaaagggttgccacaggaaataaatgagttaatgtaagtaaagtgcttgatacagtgcctggaacatagtaactgcccagttaatattaaatacctttagaatagtcctggaccattgaaatagcttctcatctggtccctccactagctatacattctctctaatccaacttgcacatcagaagatactcttctctaagacatagctatctgaaaatataatttctttccttctctttccccagagatacccatctttgatacccacagcctctaatctttactatcttttagaactctactggatcatctgatatttcaaacttttgttgtaagagcacaacttcttatcttttctgtaccaccatatctgatgaagtattatatagccaggcatggtggcacgtgcctgtaatcccagctacttgggaggccaaggcaggagaatcacttgaacccaggaggtggaggttgcaaagcaatgagccaagatcacaccattgcactccagcctggcaacagagagagactccatctaaaaaaaaaagaaagaaagatgaaagaaagaaagaaaaagaaagaaagaaagatagatagattatatatagaatagagccctggatggaacaataaaacaccaggaccctggtcccatgtgtgacatgagccacacacttgagggatccagaatgagcagagctgacagtagccacaacattgtgtcttagtccattttcttctactataacagaatactacaggctagctaatttataaagaacaaaagttggcaggtgcagtggctcatgcctgtaatcctagcactttgggaggccgaggcacgtagatcacttgaggtcaggagtttcagaccagcctggccaacatagcaaaaccctgtctctaacaaaaatacagaaattagccctgcatggtggtatgagcctgtagtcccagctactcaggaggctgaggtgggagaattgcttgaacccaggagacgaaagttgcagtgagccaagatcacgccactgcatttcagcctgggcgacagagagaaactctgtctcaaataataataataaaaaagaacaaatttgttcaccttcctagctttctgaagatgagaagtccaagagcatcgtagtggcatctgacaagcgtcattccatggcagaagacaagacagcaggcaagcctcctagacagagagaaaaaggggactgaactcagcctctcaggaaaccactctcacaataactaacccactccggagataacagcattaatccactcggaggactgagctctcatggcctaatcacctcttaaagacctcacatccc

SEQ ID NO: 1243828 - DNA, 4001 bp, Homo sapiens
ctgcacttgccctgagcatctaaaagtcttttcggggccgggcacggtggctcatgcctgtattcccgcactttgggaggccaaggtgggtggatcacctgaggtcaggagttcaagaccaacctcaccaacatggtgaaatcctgtctctactaaaattacaaaaattagccaggcatggtggcaggcaccttaatcccagcttcttgggagactgaggcagaagaatcactcgaacctgggaggcggaggttgcagtgagccaaggttgcaccactgcactccaacctgggtgacagagtgaaactccgtctcaaaaacaaaaaacaaaaacaaaaacaaaatacccaaaaacataaattggatttgtcagcaatcactaacagcagaaaagagatgctgctgcattgaacaaagtgtcatcaatcccagcttcagtcattcaaactgtaaatggctcacgatgtaattagtcccgtttaaaaaaatatttgggggtttctctaaccacagaatatgatggctggaactattaatcaggcttctatatgttgtcaagagttggtatgaggaacgatagagatggaaatgacagggcagccgtcagcttggagcagagccccgttgaacgggctgaagggtggaagtccagccaggactggagtcgggtctcagaactccccagccatgctctttcctgttgtccctccgtggactgctctatctgtgccagatggtcagtccctaggcaccagcagaaaactgtgtggcccacacacattgcacaccctgcgtaaaattctagattgtcccctaatgccctctaggtgtccaccaaggtttgccatggagaagatcatctagcccttcccactttccacctgggttcttgagaagttttttctttgaaagtctcagctcctgagcctggcgtggatggccttcataatcttgtcttttgtgtttccaacctcatatccaactcgccacctccaagacatcctgcacactgacagctccctctgcatgaatccaccattctttctaagcctccatctctctgcccaggtcccccaacacacacacacacacacacacacacacacacacacacacacccaactctctagagtgttctcctctcagctctgctccagagactgaccttccttctacaaggcacatcaagtgcacagcttcgtgagtctttctctagtcaccagagagaactgcttcatcctccgcacacgcctccaccaatgccttattgtgtcctgcaattgctcattgtttatgtgtatgtctcacccactaagccatctggagtctttttactttattttttttttgagacaaggtcccactgtatcacccaggctggagtgctgtggtgcgatcataactctgcagaattgaatacctgagctcaaaggatcctccagcttcagcctcccaagtagctgggactacaggcacggtcaccacgcccagctaatttttgttcattttatatagagacgaggtctcaccatgttgcccaaactggtcttaaacgcctggactcaagcaatcctcccaccttggcctcccaaagtgttaggattataggtgtgagccatggcctcaagcctggagtcttctttaatggccagttctcctcctcttttttcttgatgtcctcaggccccgaagcacacgatgtcagtccccagtgcacctttgtcgaatgacttcacaaagccacctctcatttccctggatgtggaaggacaaatgccctctgcctcctgccctgcccctgtcataccaagcgcccaaggccccagccccactcacctgagaggctgagaaggagcagagcagggggcagccacatggctctgccttcccggctcctcgtccgcctgatctgcaaccagtggcaaatgcagatcccagatgcactctggaagttctgcctgagctctggcttgcaccttctgcacatctagaccgcctttgactttcttactcattcacttccttttatagagtgggtagttcctgcttttaattattaaacgaaagaggtgtcattttttggcagggctgcgccacagggcttaagcatcgtcactatgtaaaaaagaggagggaggggactgtgcagggtctttagggtagggggagatacgtctgcagaaggggtggggtggggggcgtctggcctagcaggccttgggtccaaggggtataacactctgggagtcaatttcagagctgttctataccacagtgaacacccaactcagatgtcggatgggtcatgctgggcacacctgaacatgcatttgttcaggtgttatagccaagtgcataaacatgcagactgttgggtcagacagacctggctctaaccccacgagcaccacctacaagctgcgtgactgtggacaatgcaatcaacatctctgtgcctcagttattgtatctattaactgggctcataatgtttgttgttgttataggagttattaagaaattattttaggtagataggaaaaggggtgcttgggaagatttttttttcttttaaagcagctccataaatgtttcttgtctagaagaaaagccctggctcttagagctgggcaggcaagctttgatatgcaaatacaggccattagaaactgcgtccacccaaacatggagactcccgcctcttcttcttttccccacgttcctggcaacatggccgcccctacatacacccatgtgtgtagaacatcatggcgcctgtatttgcatattaaaaggctagggtaggaaggctagttttttcgtgggctacttgaatgacatacctggtcaaaccaatcccctgggccctatgcaaatcaggtaccgcctcctccagcctcctcatataactggctgttttccaccgtactcgaggttccctctttcagcttggagcccgcctccctcagtctcagaacagggggagcctcttccttccttctttcttgtctattaaattctccactccttaaaaccactccacgtgtgcccatgttgttttattcaaaccagtgggagaccaaggaccctagtgttcctccagtcatcagagccataccattttgttgcattggccgggaatccaaggtacgacactcatcggagtggtaagtatgggagtgagcttaaaatctcttctatcattccgaggcactcttagcctctattttaaaataaaataagtcaatgggcatccgtcagccgggtacatacacttagtgttggctgccatactgaagactcgaatgtgaggcttgctgctgagaacacggagaaccccccaacacccctgggtcattgggaatgttggccatgttttaaatcagcttcttttcacgggaagacctcgccattgtgcaaggctgggaaaagttctaaggcaactaacaatttctggccagagcacaccctggcatgattcaaaggcccctggactggacccagcctctggcggcccattctgggtgttggcaaagaatcctcaactatcttgtcacaaaactctccttccttctctatctgcggtctcttacactttctttgtgtgaaatgtgtagcgagttttacagcctaggaaagtaatcctgttaggcaaaatcaggaagatgcccttgcaatcttctaggaacagagttctcccctttctcccaccgtgaggttactcactaccacgtctctagtgagcacatagtatttctaagccaacagtgccacctagtagaaatagaaatcctctacataaagcatattttttcatggcaaaccgcagcttctttttgcatgattagaaatcaggctcggccaggcgcggtggctcatgcctgtaatcccagcactttgggaggccgaggcgggcagatcatgaggtcgggagatcgagaccatcctggctaacacagtgaaaccccgtctctactaaaaatacaaaaaaaaattagcca

SEQ ID NO: 1243829 - DNA, 4001 bp, Homo sapiens
ataatacatgcctttcaccttccaccatgattgtgaggcctccccagtcatgtggaactgtgagtccattaaacctctttttctgtgtaatttactcagtctcgggtatgtccttatcagcagcgtgaaaatggactaatacactgtgacttcgttttctataagtgggaatagtaatggcatctacctctatgttactatattatgtttgttattattattattattattattacccctggatgaatgaaaactttagacttcattggaatgtcttgaaaaaccagggtcaccatggtgggagcggaagacaatttcaccataaacaggcagagctccacaacccaaggaattcctggaacagaaattggactccatgcccaaatctgctttctatggcatctgaagggaactaagaaactacacacgacctcctggggaaagatgggtataggggcttcatttgttcactctgaaaaaagttctacatcagaatggaaagacaacaattaaggtaaatatttaaagaaaaactacatctggaagttatttataagaaataagagctgggtgtggtagctcacacttgtaatataacaactttgggaggctgaggcaggagaatcgcgtgagccctggagcttgagagcagccctggcaacatagcgagactaaataaataaataaatattagctgggtgtcgcaccacatgcctgtagtcccagctactcactcaggaggctgaggtgggaggatggcttgagcctgggaggtcaaggctgcagtgaaccctgatcccagcactgtactccagattgggtgacagagcacaccctgtctcagaaggaaggaaaggaaggagaatatatctgaaaattgtttacagaatataaatttgaagccaggcatggtggctcacacctataatcccagcactttgggaggccaaagtgggaggatcacttgagcccaggagtttgagaccagcctgggcatgaaagtgagtcctcatctctacaaaaaaaaaaaaaataaaaataataataataataataataatctattttaaaagaaaataaatttgagattggaaggaaaaattttcttacaaagcttgatctgagtatagataatatgagaagcacatagatttgttacattttaacagaaatgaaaacactacgtatcaaaatttgttgacatgacagccaaagctgtactcaaatataaatccttgggaaaaaggtttgatgcttcctcaaaaagttaaacatagaattaacataggattcagccattttacccctagatatatacccaagagaactgaaaacatatctccatacaaaactgtgctatgaaagttcataacattattactaacaatttttaaaaggtagaaacaaccctaaggttcattgacaaatgactggagaaaccaaatgtggtatatccactgtgaaatactatgcagccatgaaaaagaatgaagctttgatttgtgctacaacacaaagtaaccttgaaacatcatgctaagtgaaagaagcactccagcctgggtgacagagcgagacaccagctcaaaaaaaaaaaaaaaaaaaagttcttcaagaatggactcactcattagttccttccttcattgatatctgttcattcatctgtttatatggaacagtcagggttgagaaccactgttccaacaagaagctatacttgttttgttttgtgtgtgtttgtttctgcagcatctaacacagaacctgtcagataacaaaaacttgattgctatttaatgaatatgggcatggatggatgaattggcgctgtcattttccctgacatgtctccttcctgagaacagagcgtctctgtctccaagccagccgctgtcattccagtgccttaaagctccagccacactcacctgggaggatgagaagcagcagagatggggacagccacatggtcctgtctcctctcctctccttggtgatcacaggtgtctggtgcccttcagggacttgaatccaagctcggaagtcaacaccgcaaacctactcgaatctccttcaagtctcttgctcacttcctgttacatctgtagctacttctctttttacatattaggagaaaagaggtgtcattctttgaaaagactaaggtacagtgtatgttgcaaggtgtgcccaaacttttgtgcatgtggaaaagaaaatgtgtccgggactggtcaggtttgcacgggagtgcacgtaggagccaaggagcaggaggagccaggaggaacccaagcattgaggagctgcgggatctactgcctggaggagaggacggacaaggccagccatgaggagtgcagggagaggagcactttgggaagaccacagtgcacaggactcacacccagccttgctggagaaagcccatgccccaggcttcttccaggcagccccactgtaagacatctcattgcctcttcctgccctgggctgtctgacccactgccccttcccccaggaacacttccactgggatcatgagtcactctgaagccactctgaaatcactctgaagccaaagctgggctcagtggggaaggtcaggaatggagaaattgccttttctcgttagcctcctcttgccctgatttcatcctccctatccctgcacactttcccctggctgctgttgtaatctacttgttctgctgacgcccgaactgacttctttcccggtctctccccactttctttagatggtcccttccctctttctctccctttccctcctgaatcgattcattttttctctcctgttttatattttccatatctgtgggctttgttctacatttggggagctttttatattgtttatttcatgcttgtactttcccttccaatccttggatcaaatattgattttagagactgtatttttatttcgaaaagtttttttggttctttgattactgatgttttcaaactctcttctgttccttgaactatatccctccactcagtggtcacatctttgttttgttgtctgcttcttctatattatgagccttcctcaagtgtctgctgattcttggttatccaatcatagttgagaacaagataaagtgtagctaactgagacctcagagtatgtaggagtaaatagtatataaaatagctctggtggctcatgcctgtaatccagcactttgggaggccaaggcggacagaccacctgaggtcaggagttcgaaaccagcctggccaacatggagaaaccccatctctactaaaaatacaaaaattagccaggtggtggcacacgcctgtaatcccagctactcaggaggctgaggcaggagaatcgcctgaacctgggaggtggagattgcagtgagcccagattgcaccactgctctctagcctgggcaaaaaaactagttccaaaaaagacacttgtacacgcatgtttatagcagcacaatttgcgattgaaaacatagggaaccagcctaaatgcccatcaagcaatgagtggataaagacaatgcggtgtacatatacaccatggaatactattcagccacaaaaaggaacaaaataatggcattcacagcaacctggatggagttggagatcattattctaagtgaaataactcaggaatggagaaccaaatattgtacatcctcacttataagtgggagctgcgctatgaagatacaaaggcacaagaatgatacaatggattttggggacttaggggaaaggatgcaggggatgagggataaaaaaccatacattgggtacagtgtacactgctccagtgaagggtgcaccaaaatctcagaagtcactgctaaagaccttatccttgtaaccaaaagccatctgctccccaaaaactattgaaataaaataaaatataaaaagaaagagaaagaaaagaaaatagttccaatttatcatgccaaattgtttgaacccttgattct

SEQ ID NO: 1243830 - DNA, 4001 bp, Homo sapiens
cacactccagcctaggcaacagactgagaccccaactcaaaaaaaataaaaaaccttcctttctcacagaaaacaaacttccggatgggtattttttttcttgggtgttttaaaacgataaattatttagaagagggaaacagggtaagcacacttgctgcttgtgggtggaagttctgcaggagaggctggcaagagctgatgcatgcaggttcacagtggtatccgggctccatgttggcgcccatagctgtgcctgctggcttttctgcccacttcagacagaggtcccaaaccactcccactcccaacacgactctcacatctgctcactaccaaattctctcatttccaggtgtcagaaaaaaagcagccatacctgtcctggtctcactgtgccaatgcatttcataacatctcacccaaagtctgccttctccacttacatgctgaaactcggggccaagtgtccatgagccactccctgctcttcctgtaccagcctagcagtcctggacaagtcactttcttccccaagaccttttctccaatctgtcccaccaggatcttctgaagcatgaggcaaagccgtgctgacctccctcttcctcagacgtgcccagtccaagctcattcctacacaagagccctcgtatctactgttccctgtgcctggaaagctggtcccgatcctgtgtctgatccttttcctaggtctcggctcggacaggcatctgggaccctcttcaggggggttgtttcagcccacctgacttacagcatccccctacctgggtcccactgtaacatatcatcttgttctgttttcctcacagtacttatcacttctcacttcttgaaattatttttttgttttctttctttttttttcttttttcttttttcttttttttttttttttgaaacagagtctcgctctgtcacccatgctggaaggcagtagtgtgattacaggtcactgcagcctccaactcctgggctcaagtgatcctcatgcctcagcctccagcctcccaagtagctgggaccataggcacatgccaccatacctggctaatttttgtactttttgtagagacagggtttccacatgttacccaagctggtctcgaatccctgagctcaagcaatcagcctcccaaagtgctgggattacaggaatgagcctctttccctggcctcccttcatttttaataaaaattgtatgcaccaacttaaggtgtctcctgccctctggctctgcccacatctcagtccctcctttcctctacgtccctgccagtcttatctcctcttgacctttccgtccctcagcaacttctactatttccttctgccccaaatgcctagaaccaccactccctctctgcccagcaaactccctcttccctcctttcaaagtcctccagcctcacctcttccctgacgcctgcccttgctcagaacacctccacgcaggtgacagatcacccagtccaggatcaggcagtcgcctgctctcctgagcagcccatgttcctcctctgcttttccctggccggcggggcctacagtctgtccatttcacatgatcagcccctgggggtcaggaattctgccttgcactggcttcattatgaaggtcatgccctgtattcctgccttggcaacggaaatgctaggtgaatggtgggtatgtggatgaaacgcacaaggctcatgccattaaggacaccttctggccgggtcccttcttccctctctcagccacctcctcctgcttgctaagcttccccaagaagacagacccaggcccgctcacctgagagccagaagaggagcaggtagagtgtcagcaggggcatcttctcttcagacaggtccccgttcccctcagtggagcctggcagcaggaacaaactacagactcccagccttctgctggtactcactctcgcccttgaacttcctccttcagtcacttcccatgggtgaaagagactaaaagaggaaggaggtggttggttgggcaccgtggctcaggcctgtaatcctggcactttgggaggccaaggcgggcggatcacgagatcaggagttcaagatcagcctggccaacatagtgaaaccccgtctctactagaaatacaaaaattagccaggcgtggtggcgcacacctgtagtcccagctactcaggaggctgagacagaagaatcgcttgaacctagtaggcggaggttgtagtgagccgagatcgtgccacttgcactccagcctgggtgacagaacaagactctgtctcaaacaaaaacaaaaaaaaaaaaaaaaagaggaaggaggtggaaagggtgaaatttcgaggcagttgacaatgcaaggggtcacaggaatcatcagcttctgagaagtacctctctgtacacagccaccgtgggttctctaaaaagagaacttcgtggctcctctgtcatgtggaaacctgcagacagatccactgggtctggccagcccttatccaatcctccaaacctggtgggttggctgggggcaggggcacgcggctccaccagaggggtcctggagagccacggctgatagacacgatgtcctaaacctggagcttcaggtgtagccagatgcttgggagcccagaaggccagaagttcaagaggattgaggggcacttgtggccaaagtcagaaagccagaggagagattccagaccaaaggttggaaggcagctatgaggagattgggtatccaaccccagactacaaggccaggtacggtggctcacacctgtaatctcagcactttaggaggctgaggcaggaagatcacttgaggccaggagttcaagaccagcctgggcaacatggcaaggcttcatctccacaaaaaaaaaaaaaaaaaaaaaaaaaaaaagtcaggcatggtggctcatgcctgtaatcccaacactttgggaggccaaggtaggcagatcactccaggtcaggagttagagaccggcctggccaaaatggtgaaaccccatctctactaaaaaatacaaaaattagctgggcgtggtagcattcacctgtaatcccagtgactcgggaggccgaggtaggagaatcacttgaacccaggcggcagaggttgcagtgaacccagatcgcaccactgaactccaacctaggcaacagagcaagactctgtctcaaaaataataacaataataataataattagttctgcagagtcatgcatgcctgtagtccaagcaatctgggaagctaaggcctgaggattacctgagcccaagaggtcgaaactgcagtgagctatgattgagccactgttcactgtactccagcctgggcaacagagcagacgctgtctctttaaacacacacacacacacacacacacacacacacacacacgcacgcacagagaggttcagagagaagggagatgcaagcagggaactactggcccactgacaagaggcgctttgtcctgagaacacgaaggaagctcctactgctgtaccccagcccaccaggtgagatcccagggatacctacatctggaatcttccagaaacctgtccattgtaccagggggtctacctgaggaaaccagttcattgctcaggactattatcccctcgctccacccctcaccttataactatttgttgaaggaaggaaggaagaaaggaaggaccagttttgcccctcactctcctccttctgacaatcatgtccatcccccatctctcctttcccatcaagaccccagcaagtccctagggtcgggactggggatataaaaggattaggaagggccagactcagtggctcacacttgtaatcccagcattttgggaggccaaggcaggtggatcacctgaggtcaggagttcgagatcagcctggccaacatggcaaaaccccgtctctactaaaaatacaaaacttagccgggtgtggtggtgggtgcttata

SEQ ID NO: 1243831 - DNA, 4001 bp, Homo sapiens
ccagccctggacagatctgggtccggtcctgctctgacatctactactggtgtgacctcgggcagcaagagtgagacaatggccaagactcaggcggctccttctgtgccccaagccttgctcggtgcttgacctgcatgatctccctgaggactcagtgcccataatgttggtaccaggattatgccccaccacccctccctcttccctctgcagctcctgtccccagcctggggaaggagagatatctgttacctggaaagacgaacagagagatcagtaaagactcatcggggccccgtttttcgaccccacaccagtactccccagcgtcttgcagggtgaggttccacagggtcacaatgagcgagagctcctggcggctgtcacggatggacaccctgcccttcattgtctcctggccttcttcttctgcatagatggtgccagagcagcgagagaagaggatcccacccttcctgcaccagtacttccggtggtccctcagctcttccctgtaggtgcactgcagggacacagtgtccccttcgaacccgctgatttcctctgggccctccagggcttcataacctaaaatcagagcaggagtggaggttggaaaaaccaggctccatgtaccaaggtcaaggccagagcttccattttaggaggaagaaggaaggcttttctcagtcatcccttctggggacagccttggaagagccattactaacctcccacgctgggggaacttggggcagggctgttgctgtttccctaaccctggcccattgaggaattggggtgcaggggtggcgttctagattcagatagaatctgacagccagatagccagcagggtttctgagtgttttgttttgttttgtttgtttgtttgtttgtttttgagatggagtctcactttgccgcccaggctggagtgcagtggcccgatgtctgctcactgaaacttctgcctcccgggttcaggtgattctcctgcctcagcctcctgagtacctgggactacagccacgtgctgccatgcccggctaattttttgtatttttagtagagacggggtttcaccgtgttagccaggatggtcttgatctcctgaccttgtgatccgtccgcctcagcctcccaaagagcttggattacaggcgtgagccaccgtgcctggttttgttttgtttttagacaggatctcactctgttgcccaggctggagggcaatggtgctcatggctcactgtagccttgacctctggggctcaagcgatcctcccaccttagcctcccactagctaggactacaagtgtgcaccaccatgcctggctaattttgtttgtttgtttgtttgtttgtttgtagagatggggtctcactattgccaactgaacaactgacatcagttgtaggatttatcctgattttaagtgttagaaggtaaagaaaaagaaagcaaaagaattgatgaaacgtgataattcttcatctttcagggttgtggggagaggcatagccgaaattcaacaaatatttgctgagtttaacagggcaaccagatggggtgtcttgtccgcctccaggcttggcacagggtagaaaaattaagattagagaggcaaagcaactctcacagccacattgccatgaggggaaacccacaggtctggagaaaacctggctctaggttccagaaacagcaagtgcggccccggcgccacccccacctccccccacccccagcccgccccgctcccctagggctgaggaggctgaggataggtggggtggggctatcagtcagtcaagaggtcctttccctgcagaccacaagggtgagccccacatccctcccgagaccctctccccatctcacctgggagcagcaggcaaccccatagcaggaccagaagccgcattctgggcgctggacaccgtgggagcagacgctgggaactgtgagctcctcttcagtcacacgggtctttaactttctctagtcgcgtgaaaccaggccaaggaagcgaggggaggggcgtgtgggtcatccctccgcaggcccagccggggaggcgcctctgccttcccttttctgagcgcccacgcgtgcctaccccagggctcaccttccaggactgaaaacccacaccagagtttctcctaaactcgtgccccttcaagggggccttaacctgtggtccgtgcgccctaaggggtctgtaagtcgaattcgcatgggaaaaagttacatattgactttcatcaacttctaatatttagcttttcctcttattcagagtgtactgttagcagtacctgcaactttgttaccaattacaatcacagacactggcacatcaagttgtggatatctcgaaacgtcgtgtatacccctcactgcttggaaaacaatgagttcctagacctgcccctagagctggttatttacaataatgaaacggctattattatattacacatttataaagagttttaagaatcatctcaccagtattagttttctttccagcatatatattttatttatatatttacccgccattatactgagagaggggtccataaacttcaccagactgccatgtggtcagtgggacagaaagaagcttgcccctggggcaaggcccctggcccctcctccgcccttgccttttggaggacgcagtactgcccttggccacggggcggcggtgcagacggggctgagcaaagctgtagggctgagctggaccggattccctggtgccttgggcctacagcgctgcaagataggtctcctccacgcctgcggagttgttttggcatttgaaaaagtgaattggtggtttctccatcgcagacttgaatcctccttgaaaggaccaaaacaaacatgtacactactgggagctctgacacactggcttcaaaaatgactttttttttggtttggttgcaaagttcatacaggttgtaagcaaaattttacacaatacagaacgtaaaaaggaaagaaagaaaaaagggagtgcttcttgtaattccccttctgctttagaaaagcaccattaatattttggcatatatccttccaaatgttcagttggaattttactgacttgtcaggttaatatctgaagcattaactcagtggttctgggagggaagattgtgtgtgtgtgagtctagtaacgtggggagaagtgttttaatttcacaatgactgcgaagcactgctgccatttagtgggcagggccagctgttcacggtggggaaaactgttaccatgatctcagcccctgactctcttttacatgtacagactacaaaaggtgatctgtttttgcagttttaaaaaaacacagattaaaaaatatttatggcccagcatggtggctcacgcctgtcatcccagcactttgggaggctgaggcgggtggatcacctgaagtcgggagtttgagaccagcctgaccaacatggagaaacccagtctctactaaaaatataaaattagccaggcatggtggtgtatgcctgtaatcccagctactcagggaggctgaggcaggagaatcgcttgaacccagaaggtggaggttgtggtgagctgagatcacaccattgcactccagcctaggcaacaagagtgaaattctatctaaaaaaagaaaaaaaagtatttgtttatttacttatttttgagacaggtctcactcttgttgcccaaactggagtgcagtggcgccatcacagctcactgcagcctcaaactcccaggctgaagtgatcctcccacctcagcctcccaagtagctggcactacaggcgtgcaccactgttgcctggctaattttttatttttagtagagacagggtcttgttatgttgtcaggcttttctcaaactcctggcttcatgcgatcctcccacgtcggcctcccaaagtgctgggattacaggcacgagccaccatgcccggcctta

SEQ ID NO: 1243832 - DNA, 4001 bp, Homo sapiens
ggcgtctccggatgatgcagaaagcaataagcaccagggcgaggaggccaagaaggatcaggccgatgatgagaggcagcaagatggaccggtcactggggcaggagaaacctggcggaaggatagggcaggtaggtatttgcagtgacgtgctggttgggataaaggtgggaggagggaatggggggatgctggggagtaggagattggtgaggagctcaccgcagtgactcagcagtgataaaagggggaaactggcagagtcttgtagaggatggaaagaaagctgccctgtagccatgacaagctgggagagcgagatttggggggttaagaagagagatgagtggcttatgggcctggggaaggggttttcagtgcagtgggaggattctaggagggaaggagtaggtaggtcttactttgcccaaagacccctgtgtggggcagctgagcagcctggagcctcagggagagcaggtcgaggtggacagctggtgaaagaatgatgctcgagttgctgcaactgaagctctgccccaggggtgcttggagatctcgaagggatgcattctgagccgagaatgtccactctggaggagtgaggaagggtcagatcctatccacctccctggccccagcttagtcctttcaggaaccctggcgtctagtggtagcaatgagaaagggaaggaggttacttacgtgctgcgtgggggaaggacacattgtactccaccgccatgtagctcaggtagacaaccttctgctggaggtcctgtggggcgaagaggaaggcgcaggtggtatccctctccacagaggaaggagtagcgtgtgggattgggaggggaggggcgccgggaggctgagtgaggggtgagactgaggtcatggctatacctgcatgaatccaaagctgaggtgtccataggggaatgagagaagcaggtggggatgggcaccctcacagcttccctggaccttggttttgttggggttcagtacagagatgccccaggcctgcggaagttaaagactggaaggtcacaagactgcatgcgatgccggccaaggttccctgtcccctcttccttcttccctctgagcctatatccagtcctgcctccctcccctctcatcccccagttttagctttacctctcctccaccctgggttgtgtacatgactcgaatctgaatctgggcttggaggtggacacagggctgggaaccattggtccacgtgtagtctccaatggtctccttggaggttgggctaggactcggagagggtggaggtggttctgggtgggcagaactggtgaatcctgggctggtggcagtgctgttgcttgttggatgaaccgtggcatttccatgactagtggtggcaggactgtgagtggcagttgagggtccctggctggtggcagtgctattgcttgttggatgaactgtgacgtttccatggctggtggtggtggggttgtgagtggcagtcgtgggtccgtggctggtggtgcctgtggtggttgtcctgtgagtggtggttttgtggctcttggtagtcctgtggctggttgttccagtgctctctgtaaccgtgggtgtcaccgtgaaggatggcagcaaagtagctgattttttgtgaggacagtcattccctgtcccctgggcttttggcagagaggagatggttagcaacccagggcaggctccctcccaggggccccctcccctcagcctccttcctccttacctgccagtagccccagcagggcccccgagaaaagcacagccagcctcatggctgaaccgcctcacccaaagtccagctaggctgtctgcaccagttgctcaaccctgctccctcagccctctcttggaaaggaggaaatgaaagtctcacttcctgtactggagatgatcccacccacagcctgactcaggggcctcagctctagccacctctctcttagtcattagtttttgtaattaagttaggggactgttggccctgcttcatcagggcaaagtcaacagtgtcacatgggtgcaaacggagtcctagggcagttgatccacagggatccatgtgtcaaactcagcgaaacttgcttggcagttgtggcaagtagctatgggaacagctgaggtacaggcccctcccttggtggggaaatcggtttccactcctttcccctggacctctgggctgacccctgtactacttcctcttggctgaggcatgtgaggggcttgtgaccatccacacccagccctttacagaggggcagcactccagtcagcattgtcattcacagagccgagaacatggctttccagcgtctgagaactcagatggtgacaagaaagcaacagcccaaaggtaaccatctgctggggaaggggggagcagagatgcacccagtagcaggtgggagagggaaggggaggtaagaaatgagaagcccaaacaggcagtttccaagtcattttattcagaattttgtgtttgtttcctgaatcaataaatactatacaaaacaatgtaaaaatggctaccattttctctcccctgcttccccccacctggggacaaccccctgggcaacctcacttaggggttttaggggttctccctccagatttggtccagcaaatgaggctgagtgacatagtcccttgaatcactttcaaaggagctcagctgaggtgaggagagcctctgggatctggaggttactaggttagggaaatggattagtgttttttttttttttttgggagaagagccggcgcctggggcaagagcctaccccaaagaaaagggtgtctaaaatgttcacggttccttcttttgcctcaaaaagtgacatttattcaaagaaaaaaaatgacaagatgtccatcccttggctcccttccctcccccctcctgctgctcctcagcccccagagattgagccctggctggggctgggtggcaggacagcccctcagatgaggtcagcaacattgaggggcatttcctcaatggaggtgttgtagaaggtctcaatgtctcgaagagtcctcttgtcttcttctgtcaccatgttaatagccacacctttacggccaaaccgtccacctcgaccgattctggaaaacaaggaaggggatgaggaatatcaggagctttaagcccagggagggccaggtgtgaaggggtaggggagtgttccagatctacgcttacctgtggatatagttttccctgttggtgggaaggtcatagttgatgactaaagaaacctgctgcacatcaatgcctctggcctacgtcaagaaagacaactcttcagcatgtgcacggaggacactctatcccggagggaagacacttaggcatccatgtgggcagccaaggaaggcagaggaaataagcatcccagttccccaaaggccttaggcatgccagattctattccaagctgctactttcctgagaggcactgatgtccccttggagagggaatcaccttggatcctcccttctgcctttgctatcagttccctctactcaccagcaggtcagtggtaatcaaaactctgctagagccagaacgaaactccctcataatcacgtctcgttccttttggtccatatctccatgctggaagagaaaacaaatatgcagcagaccaggtaggcacctgggttccaggaaccctggcttcaagtaggacacttctgacgggcagacccacaacaggctggcagcgggcaaacacaccatggcggatacagtgaaatctcgagcatgcatcttctcggtgagccagtccaccttcctccgggtgttgatgaagatgactgcctgggtgatggtcagggtttcatacaagtcacatagtgtgtccagcttccactcctggaggttgggggacaaaaatcagtcaggggctatacccaacaactcactaccaggcccgcctcctgcactgggccccac

SEQ ID NO: 1243833 - DNA, 4001 bp, Homo sapiens
gcgtctccggatgatgcagaaagcaataagcaccagggcgaggaggccaagaaggatcaggccgatgatgagaggcagcaagatggaccggtcactggggcaggagaaacctggcggaaggatagggcaggtaggtatttgcagtgacgtgctggttgggataaaggtgggaggagggaatggggggatgctggggagtaggagattggtgaggagctcaccgcagtgactcagcagtgataaaagggggaaactggcagagtcttgtagaggatggaaagaaagctgccctgtagccatgacaagctgggagagcgagatttggggggttaagaagagagatgagtggcttatgggcctggggaaggggttttcagtgcagtgggaggattctaggagggaaggagtaggtaggtcttactttgcccaaagacccctgtgtggggcagctgagcagcctggagcctcagggagagcaggtcgaggtggacagctggtgaaagaatgatgctcgagttgctgcaactgaagctctgccccaggggtgcttggagatctcgaagggatgcattctgagccgagaatgtccactctggaggagtgaggaagggtcagatcctatccacctccctggccccagcttagtcctttcaggaaccctggcgtctagtggtagcaatgagaaagggaaggaggttacttacgtgctgcgtgggggaaggacacattgtactccaccgccatgtagctcaggtagacaaccttctgctggaggtcctgtggggcgaagaggaaggcgcaggtggtatccctctccacagaggaaggagtagcgtgtgggattgggaggggaggggcgccgggaggctgagtgaggggtgagactgaggtcatggctatacctgcatgaatccaaagctgaggtgtccataggggaatgagagaagcaggtggggatgggcaccctcacagcttccctggaccttggttttgttggggttcagtacagagatgccccaggcctgcggaagttaaagactggaaggtcacaagactgcatgcgatgccggccaaggttccctgtcccctcttccttcttccctctgagcctatatccagtcctgcctccctcccctctcatcccccagttttagctttacctctcctccaccctgggttgtgtacatgactcgaatctgaatctgggcttggaggtggacacagggctgggaaccattggtccacgtgtagtctccaatggtctccttggaggttgggctaggactcggagagggtggaggtggttctgggtgggcagaactggtgaatcctgggctggtggcagtgctgttgcttgttggatgaaccgtggcatttccatgactagtggtggcaggactgtgagtggcagttgagggtccctggctggtggcagtgctattgcttgttggatgaactgtgacgtttccatggctggtggtggtggggttgtgagtggcagtcgtgggtccgtggctggtggtgcctgtggtggttgtcctgtgagtggtggttttgtggctcttggtagtcctgtggctggttgttccagtgctctctgtaaccgtgggtgtcaccgtgaaggatggcagcaaagtagctgattttttgtgaggacagtcattccctgtcccctgggcttttggcagagaggagatggttagcaacccagggcaggctccctcccaggggccccctcccctcagcctccttcctccttacctgccagtagccccagcagggcccccgagaaaagcacagccagcctcatggctgaaccgcctcacccaaagtccagctaggctgtctgcaccagttgctcaaccctgctccctcagccctctcttggaaaggaggaaatgaaagtctcacttcctgtactggagatgatcccacccacagcctgactcaggggcctcagctctagccacctctctcttagtcattagtttttgtaattaagttaggggactgttggccctgcttcatcagggcaaagtcaacagtgtcacatgggtgcaaacggagtcctagggcagttgatccacagggatccatgtgtcaaactcagcgaaacttgcttggcagttgtggcaagtagctatgggaacagctgaggtacaggcccctcccttggtggggaaatcggtttccactcctttcccctggacctctgggctgacccctgtactacttcctcttggctgaggcatgtgaggggcttgtgaccatccacacccagccctttacagaggggcagcactccagtcagcattgtcattcacagagccgagaacatggctttccagcgtctgagaactcagatggtgacaagaaagcaacagcccaaaggtaaccatctgctggggaaggggggagcagagatgcacccagtagcaggtgggagagggaaggggaggtaagaaatgagaagcccaaacaggcagtttccaagtcattttattcagaattttgtgtttgtttcctgaatcaataaatactatacaaaacaatgtaaaaatggctaccattttctctcccctgcttccccccacctggggacaaccccctgggcaacctcacttaggggttttaggggttctccctccagatttggtccagcaaatgaggctgagtgacatagtcccttgaatcactttcaaaggagctcagctgaggtgaggagagcctctgggatctggaggttactaggttagggaaatggattagtgttttttttttttttttgggagaagagccggcgcctggggcaagagcctaccccaaagaaaagggtgtctaaaatgttcacggttccttcttttgcctcaaaaagtgacatttattcaaagaaaaaaaatgacaagatgtccatcccttggctcccttccctcccccctcctgctgctcctcagcccccagagattgagccctggctggggctgggtggcaggacagcccctcagatgaggtcagcaacattgaggggcatttcctcaatggaggtgttgtagaaggtctcaatgtctcgaagagtcctcttgtcttcttctgtcaccatgttaatagccacacctttacggccaaaccgtccacctcgaccgattctggaaaacaaggaaggggatgaggaatatcaggagctttaagcccagggagggccaggtgtgaaggggtaggggagtgttccagatctacgcttacctgtggatatagttttccctgttggtgggaaggtcatagttgatgactaaagaaacctgctgcacatcaatgcctctggcctacgtcaagaaagacaactcttcagcatgtgcacggaggacactctatcccggagggaagacacttaggcatccatgtgggcagccaaggaaggcagaggaaataagcatcccagttccccaaaggccttaggcatgccagattctattccaagctgctactttcctgagaggcactgatgtccccttggagagggaatcaccttggatcctcccttctgcctttgctatcagttccctctactcaccagcaggtcagtggtaatcaaaactctgctagagccagaacgaaactccctcataatcacgtctcgttccttttggtccatatctccatgctggaagagaaaacaaatatgcagcagaccaggtaggcacctgggttccaggaaccctggcttcaagtaggacacttctgacgggcagacccacaacaggctggcagcgggcaaacacaccatggcggatacagtgaaatctcgagcatgcatcttctcggtgagccagtccaccttcctccgggtgttgatgaagatgactgcctgggtgatggtcagggtttcatacaagtcacatagtgtgtccagcttccactcctggaggttgggggacaaaaatcagtcaggggctatacccaacaactcactaccaggcccgcctcctgcactgggccccacc

SEQ ID NO: 1243834 - DNA, 4001 bp, Homo sapiens
gggtcggaccctggggtgcctctgaagaaggagagtggaagtggcttggacccccccaccaagcccaagccaagcgggacccccactccagccccagacaaacagcagggaccgaggggagtggccacgcctagactctgtgtctgtctgaggccccctccccttcccacggccacacagcacgccggcacactccaacatgcacgcacagtcctcagagatccccacacacaggctcacacctgcacacgtgcacacgcgggcccagcgcctgggcgctccctcctctgcccgcacactccaacctgcacgcacagacctcagagatcccccctcagacactcacacctgcacacgcgcacacgcgcacacgcgggcccagcgcctgggctgctccctccccctcaggtcgctttggtgctggtccccctccctccccgccgaggccacttccaccctgagagttccagagcctgcagaggaggcggcgggtaccagggttttcctctggggctttggcgccccccacgctgctctcaggagagggaacaatctttggggtgcaggtggcagctggggctcacactgacctgtgtcctcgccagcacacacgccacccccaggcccagcccgaggaggaaggagatcaccgccagggccgcagggagggcagaggctgctggcgggtcagggagggcagaggctgtctgcgggtcagggagggcggagcctgtcggtggggcagggagggcagaggcccttggtggggcgtccgagcatctgtgccatccttgggactgttcctctgagaaggaaaaaagaaggaagggattctcccggtggagaacctgttagagcccccggggtttgggattcggggcagggaaaggctgtggaggggaggaggggcagctatctaggaggctgctgggggcagtgggctgggagctggaacagttcaggcacatgtaggagggagggtcccacgacaagggctgggggagcagagcctggccagcagctggggttgggaggggggtctgggatgggcacattccctacctgtcaccaggaccagggtgccggagccgtagacattgacctccgtgatggcctggcaggtgtaggtgccagtgtccgacagctgcaggcggtgcatggtgatagtcaggttgtcctgggaccctgagaagtcgatgcggccccggaaccgtctgtccgtagtgggcaccaccccgtcctcgtagtaaatgatgtcttggggctgtggcccgagctgcctcaggtagatcccacgcaggcccccgctggtggagcaggtgatgttgacggaggctcccacggggacagtcgtgcagtggggagactgctgcacctctggggaggacctgggctgtcaccatcagtctggccagaaggacagagaatgtcctccctgcaggggacagtggtggggatggtggggccctgagacagcccagggctgacatgtcgccaaagacacggtgccttacggggcatggagcagatctgggcaccggctgtggtgttgggggaggtgctgtcctcgtgttccgagactgtgggcttcttcctcccaaagcagcggccctgcctggacagccccggccactccccaccggggtccaccctttttccttctcttaaatgagtcctcagacactggaggccgctcagcaccccacccgcttcctgggggctgtgctgtggctcagactgggggctctgagctcatggggcagggagagctctggagctgtggccatggagagcctgggaagctcttaccttgggcagccagggccccaggcaggccgcgagccagcgccagaagcaggggcagcagcaggagcctcggaggcccggccatgttccccacacccagctctcccagccgggcgagtgcagctgagcctctctgggtctacaggaccccacagagagcagcacacaggagaccgcaggcgctcagagctcagagagggcttcctggaggcggtgcctcagaccagggtggtgctgtgggcccggtgggaggggcggtctcacctacccctccccagcactgcctccctgagagctgccctgagagcagggcgtccctgtatcccccactgcccctgcatctccacagggaggaggtcaaggcctggggcggggcagaccagaggacagagaagggactccctggctggggacgggtggcagggtctggaagtgagcggcagagctggcccccagcctgcctggtcctctggggtactttctgctgggacccaatttatgcccagaaatctggagccacccatgacccatgagtcacccacacagtgcagaggagcacagggcaggccagaattggcaccccctggtttggccgtggggaaggagcctgggcctgcacccgcacccaacgctgcagccgaccagctgaccgtggctctgcgttccatgtcctggaggcgggaggtctgaggtatggtccaggcctgaggtttcccgacctccctgggaggagtgcgtcaggccgcagtgcccagcttcaggggctgagggagacctgtgcctgggctctgaccccagggtgactgagtcctctgggagggggcacttctctgtcctgagggcctcccgccacaatgacgaagcgttgacgttggtgcccaaagccagtaggtgcagcacatgagcaggagtgtgtggacacgtgtgtgtgcagagacgggtgcgtatggacatgtgtgtgcagagacgggtgcgtgtggacacgtgtgtgtgcagagacgggtgcgtgtggacacgtgtgtgtgcagagacggatgcgtgtggacacgtgcgtgtgcagaggcgggtgcgtgtggacgtgtgtgtgcagagacgtgtgcgtgtggacgtgcgtgtacagagacggctgtgtgtggacacttgtgtgtgcagagacgggtgcgtgtgactccatgcgtgtgtgcagagacgggtgcgtgtggacacgtgtgtgcagagacgggtgtgtgtggacacgcatgtgcagagatgggtgcgtgtggacacgtgcgtgtgcagagacgtgtgcgtgtggatgtgcgtgtgcagagacgggtgtgtgtggacacgtgtgtgcagagacgggtgcacttgactccatgcgtgtgtgcagagacgggtgcgtgtggacacgcgtgtgtgcagagacgggtgtgtgtggacacgcatgtgcagagacgggtgcgtgtgaacacgtgtgtgtgcagatgggtgcgcatgactccacgcgtgtgtgcagagacggatgtgtgtggacacgcgtgtgtgcagagacgggtgtgtgtggacacgcatgtgcagagacgggtgtgtgtggacactttgtgcagagacgggtgcgcgtgactccatgcgtgtgtgcagagacgggtgcgtgtggacacgcgggtgtgcagagacgggtgcgtgtggacacgtgcgtgtgtagagacgtgtgcgtgtggacgtgcgtgtgcagagacgggtgtgtggacacttgtgtgtgcagagacgggtgcgcgtgactccatgcatgtgtgcagagacgggtgcatgtggacacgcgtgtgtgcagagatggatgtgtgtggacacgcatgtgcagagacgggtgcgtgtggacacgtgtgtgtgcagagatgggtgcgcatgactccacgcgtgtgtgcagagacgggtgcgcgtgattccacgcatgtgtgtgcagagacgggtgcgtgtggacacgcgtgtgtgcagagacgggtgcgcatggctccacgcatgtgcagagacgggtgtgcgtgactccacacgtgtttgcagagacgggtgcatgtgaacacgtgtgtgtgcagagacgggtgtgcgtgactcgcgtgtgtgcagagacgggtgcgcgtgactccacacatgtatgcagagacgggtgtgcatgaccacgcgtgtgtacagagataggagcgtgtggacatgtg

SEQ ID NO: 1243835 - DNA, 4001 bp, Homo sapiens
tatgaaacgtgggctctgccagatccgcgaacaagcactacctgtgggtgccaaggccaggctcagcattccgcttggcatcttcctgagtgccagccccagcagcaggcccctgccctggctggcacagactccctgggcttagtccttgcttctcagggtgtgggacaggcaggaggctgaggttggagttgggaagcagagccacgtgagaggctgagccacatgagaagccacggccaagctctcagactccacctcttcccgactgccccacctccccttcgattttcctttggaagagccctgggaccttgccattccttcctatgcccattacaacagcctgacccaggccacacccccaggacctggaggcccacaggcctggcccctcctttcactgggctgccctgcacaggcttgaaatcctcagtctcccccgttcctccagggataaaggccaaattcctagtctgtcaactgagaccttcctcagtcgaccccctccctgcatgacttccctctatcatccccctcttccctcctgcagggactgggtccacttcttgttccagaaccctctttccagcttcgactgccttgttcttagtgagcactgcccgggaatccctgagcccctcacatagtgaccctgcactggagggctcacccgagactcagccagattcccagctagacaggcccgggcctgagtcctagaggaacccccaggctcccttgctatgacccagagtttagcccagcccttcagtggccaaggctggagggcatgtgtctgatgaggatgacagtgggctgggggtggggctcagaggagatcctaaggaggcctggggatgggaatcctggatggggagatcaggcaagggtgggaaggcggaccgcccccaggacagggaccatagtcggacacaggacatagtcgcacacaacttgccctcagaagcggcaggcgaggctactgacctttgggattccggtaccggtcctccgatctggctgctggtactggctcagctgctgggtgggaggaagtgggcggggccagtcagggcctcctctggcctgggctgccccacccctgcatgccctctatgttcccggagctacttcctccttccatgacagcagcttcaagacccctcggtcctccctgcccccagtacttgggagacagatatggggtgggggtaccggaagccctgcccccagccccctttctgcctttgaccctcatggtggctttgagcaggcatctgaatgagacaggagggacagggaaatctcagtattttgagaggccaagacaggaggatcgcttgggtccaggagtttgagaccagcctgggcaacatagggacaccctgtctctctttttttttttttttttaaagagagacaggaagaaagtcacagcccggaggatctttcacctcccagaggaggggaccacatttggatcttgcatcttccagggtccggttgggacagcctctcccctcccgacccccaggcaccgccctcagcctctcttcctcctgagcctagttcttccacggtcctggttgctaactctggtttgctcctcatgcccagctcagcctgatgctctccaggcaggagaggaactggggccacaggctcctgagcccatcaccacgtgcagctgacacccacagacccaggccccagggccatgagagggagacaggcggtaaagagtgagagacagaggaggagggtggagcaagcaggaggcagagccgcagggcccagacagctggagatgagagcaaaccccacaggcctcgtcgtgggttctgtacctgagagcagcagcagcaacgccaccatccagtggctgggcacaggagacaacgccagcctggccatggtcaccgctctgtccccgaccccaaacccgtgacaacgtccgaggctccttggaggaaaacgtgtaactgcaccggctgcagcctgtcccctccccgcctcttcctcaccaggccccttcctgccatgcaaattgggacccaggggaggcaccagctctccggggaccctgggggagggcaggcttttgtcagctgggccgctaaggtttggcggtcgcccagcttgggcagcacagctggggtcctctgtggatgcctctggggggcctctcagtcttctgggggaagcctgtgctcccctctgtctgtgcttaccccaccggtggtcatcccctgggccagccagcctcccctctgccgtctgccaactccccgaagggccgagcccggcaagtctctattcctgggccgtgagcgaaataggcacctgtcctatgaatgaacctgaacttagctcctctgtcctgaactattcctcacccagcgggaagaggagcactgaagaaggacagggcagccacagacccaggtcaggcatctggaggggcccagagcagagcctcttggctggagtgcaggcagccatgttggaagttgaccctgtggaggatgggagccacagaggttctggagcaagagcaggtcaagtgtggcagccactgggagaagattcagtccaggtcttggtgagaggcctcccttcctcatgctgtgaaagagtatgtaggggctgccaaacagggtggatgtaggtggagacagctttgcgaaaatccaccacgcagccactgggggcttcttcagggagttcttaactgtgggactctgagtgcgttgaattgttgtctgcaggtccagggggtcttgggcagggaacaggagctggtgtgggggagccctcaggtcctccagctgtatcctgcctgtcctcagagtgctggatggagccacagtgctcaggaactgatataaactcacctttgcgcccctgcccctgggtccaatgcagccccttcagagatgcccttgtgcagggcacaacatgcacaagtgtacacagcatgcttgcagacctcagccctgcagctgagccctctgaattttatgtttcctggcagcttcttttttgtctctcatcctcgacccccaggagaggaagagatgctaaatcgtcggtgccctctgtccacctctcactctcctcacaaccctccgttttccagtctgtgctggggcaggtctgtctggatttagggagaagcagaaccacctcccatgccatggttggaaggcagagggtctgggtggtccctctttagatcttggcctaggcctcggacctgataaggtgggggccactctcaaggggtgcaggccaggacctgagccacggaagtcaggggcaggagggttaaggtttcatccgaggaacagcccgttccgggcagccccagatgttctttcttgtttccagatgttccaaatgaaaaaacatttctctgaaaagctgtcagatgttcagttcatggaataaacagctcagaaatataaacatcacctgaggtcagcttgaggcccatgggcccgcatgctggtgagggtggctggagagagactgacccggggggagtggggcaaaatctgggagtctcatggtttaggaaatactcttcctgagcccctaacgacagagtccttcattaactttggggctagtgtctccccaaagttggggggtataactgggaaaggcttggggcacacgtgtttgtggggggtgtgtgtgtgtgtgtatgtgcatgctcacacaggtgtgttgcctggaccctgtggtgtggggcctactctggagctggtcctagggctcagcggactgtagggggcacggaggttggtggggggcagttggcacccatcctcaggtgacaggtgcgctaaaatctcagaaatcaccactaaagaacttatccaggtaaccaaaaaaactacctgtaccccagaaaatattgaaataaaaaatttaaaaaaacaagtgagaagcagctcccactccagggagggaagacacacacatcccgtgga

SEQ ID NO: 1243836 - DNA, 4001 bp, Homo sapiens
tattttgagatggagtctcactctgtcgcccaggctggagtgcagcgggaccatgtcggctcactgcaaactccatctcctgggttcaggcaattctcctgcctcagcctcccaagtagctgggattacaggcgcccaccaccacgcctggctaattttttatatttttagtagagacagggtttcactgtgttggccaggcaggtctcgaactcctgacctcaggtgatccacccgcctcagcctcccaaagtgctgggatttcaggtgtaagccaccacgcccggccttccatgcttttataaagtctgaaattattattaaatggtggttatagtctatcaatgcaactagtttatcactttagaagacttctggggccagagaaggcaaaaaaaaaaaaatcattaactattaaaacaaaattataagaatatgcaacagaaattaaataacttgagtaatctgcttatctatttaagttcatgttaggccttaaaaaattatatatatataattacctcatctacagccagaataaaaaaaaatcttaaaagaaactatactggtaaaaagaatttggatggaaatagctctagaaaaactaatacaacttacagacaggtaaatttcataagatataatcttacgttttattaattcaaacactaatagctgctatatgtaaacagctggagaaaaaaaccaaactagaagaaatgagtatttcatgctgtttagaaaaatgaaataaatatgaaagtagtgatatattaaaatatttactgtttgatacctcaagccttttaagggcaatatgaaggaatttctaaaaatcagtttgctttataacttcaaaataaagtccatgactcaatgacagcagttgatagaggtcaattctgatcaagttaaagatcatatagtgggatgaagtctcccagacctggtccattaccaaggcacaaaagatacagtttctccagatgtcaggggggaaaatgacttggcaccgcatcacacacttaaaatccaatagggttcctttaatgcaacacagcactgtgcgtcaaagcataccctggtgtaaaggcagtgaaatggacagaaacaccattatttgtgtttcatttcctgaatgccttataaacatgcacaacaaaatgctcctgatccccatcagagaggatgaaaacaacccaaatgtgccctttccacctcctcccctggtattggtgcttgcgcctcagcactgaggcttggagttgtcttctcaaaccatcattgtccggtgggaaattcaccgagaaaggaaacgtgggataggaagtctgttaccaaaatagaaattagtattaaaaagaccgatcctacgctccctccaccctctcatacaagacaaaataaaaaaaacctccgtaaacttgccctaccgtcacgaagatcacacaagctccgatcaaatgtgcttctcgatcatcttttaggcaagagagcgcttggggtgcattttcggcccctcatctcccacccccagtcaagccaggcccctggactgacaggaaaggctggccggacgttggctcggacgggaaaggcggttattttcgccgaagccgctcacgctaagggtgaagtaatgtagggccagaggtaacacggcttaggctgtgggcaaggcctccgaactgactaaagataggcaggacacggcagcaggggaggcgggagaagcagccgggcctaggccgcaccaggccgcggagtggccctacgctgctgcttcccgaccgaggctgccagccaagccccagagaagaaggttatcattacctggacgggttcctgcagcaccgtcatcctcgaggctcaggcccactttctgcagtgcctcaggccccccctgtagcggctccggcccggccagcccctgctcatttaaactcaccagcgaccgttaccgggggatgggggaggccgagcgattgccgagtgcttccgagcgggacacgggaatacccgaagtggagaaagccgagcgggaaccagacggaaaagcccgaagggagtcggaaatacccgaggttggtcgacgagagagaaaaccgttgccggaaattgtcgaagattaccggaagctaccgagtctgacccaaagcgtaggtttctcttctcagccacgccttcagccacgcacaccacgcccaatcggccgtcccagggttgggctacgccaaatctgcaaccagcaggctgggcgtggcgtgacagcgcgggcgggtagcgttacgtggcggggctgcagtgtggattagcccctcagcccttttggattaattggtgtgctgtagattatgaagcaaagggtgaaacagcagagtttggggctgtctttaatgaatcaacaagtatttgtctattgagtttagatcattcgtccattccagaagtatctactcacggctctgggggaaagctaaagaaatttggaaagattgccactccccaaagacataggatagcttctgtcttcaaggagattaaggtctatttaagggaaaagcagtgtaacagagaacgctatattatatggtgcctattataagtaatataaaaattcagagagggcaattgtgataagataaggaaagttctatggaaggaaaaaaaagtttaaaatggagtttgaaggatgggtaaaattagaggaaaaagaagtataggaaagtgaagggaggaaaaatgggatcagtctgctaagaaggcattaattggaaatagttacttaggtgaagagatcatggaaaagctcaataggccattagaaatttttatttttgataggtgaggcattccgctgtggtgggaagagtagggggtcggaaattcagaggcctggttttgaattttatctttagcactaactagtcataggtccttggcaaattacctctctgaacttatgttcgcttagtttgaaaaaaaaggattaagagaattcgatgtattataaatgtggccgtgtctagcatgcaatgtagactctctcatatttcctttctgctccccttctccccccaaaaagagtgaaccaggggactgtttaaattttgtttttcagcagatgaggaaacagtttttgaaagttacttttctagtcaggagctctctaggctagatgtgagaatcatgatatattccattgcttggaaatttccctttgggtgatgttagagggagatattttttctttcatttttaaaaacaaggctgacagagctacactgcatccttctccaccgccttgtcttgtcactgtatatatacttatagcccctaaagggcaggtgctaagatgatttttggctgccctgtgcccagttgctttagcgggattatgctggatgacttgagtggtaacagacttttacactggcctggaaagtagccattagctatttaaagtttaagttaaaatgaaattaaaaatgaagttcttcagatgccctagccacattccaaggattcagtagccctgtatgtggctagtgactgccatattggacagtcacacagatatagaagaacatcaccagcactggcttggctagggctgaaagattcaagatggcttcactcacatgtctagggtgtcagtggtagctattggctgggtccttcatttcttctctgcatgacctctcttttcacactggcctcttatgagtcagtagtttagctccagcttcttgacttggtggttgacaacaaagtgcgcaaaaatagaagctgtgaggtcccttaggcctaggcctgtgagcatcacttcttgttggtcagagtaagactcagagccaccctggattcaccaggaggaatagtctacttcttaatgggaagagtggcaaagtaacaccacaaagggcgtgtgccatgggaggagtttttgggtcatctttggaaacaatctaccacgctagatatgagatgagagtatctaa

SEQ ID NO: 1243837 - DNA, 4001 bp, Homo sapiens
ccgcattcagtaggcactggcttctcagcagagatagagcctcaggagatcctggtggatgccctgttattgccccaggagcccctggggctgccaggggctctcttagggcctggctcagtcccagccaactcccgatttctgggagaaatcagaaatccgcagctcagcaatcccttcctttgtggcctgttctttgttctcttaaaattcagtccaccctgctggtggtccctcctccaccctagcctcagaagcgggcgggggctgagggagttattggaaacccagactgccaaagaagtcgccttgcaggaggcccctgtcaccggcccctcattatttacactcgctggatgggacatttctctggtacagatggctgctggggttcggacgagagagagattttccctccagcaccctggaccctcaggggagggcagggggcttcgcagcgacgggggctcccaaggactccacccggatccagctgctcagctatctgggcaaacagtgggcaccgggcacacagtaagggatgtgggagccggtcagattgcaaggggtgggagtcgtggagagagagaagttccagaggcaacgagaaaagaaaaggcattgtatttcccctccattctcccagggagaaaaagaaaacttccaaagccgaggccgcagtcactgggaaaacacagggaacctggtttgagttagcagcgagcacccctcccccagtcacacacacacacacacacacacacacacacacacacacacacacacacacgcacttcagtcctctcccaggaagctggctcagcctcagccccggctcccgcccagctctccagccctcccggccggggcactcaccggctgacgggatccccgcgggcaggatggctcctgggggacgcgccgggggcagggggcagttttgtaaccccggctgggggcgctccggagagggggcggggccagggacggccgatccgcgcgcacccgccccaagcgggcgattaaatcattaaccgaccgctcccgcctgcgatcccgctgagcgcgctgagctcggggcgcactagcccaggagcggccgtctccccggctccaagggggcgggtggctcgactgccctccccccgcaccccgccaggaggcgcctcggcctcccgggcttccgagggagcgggcggggcgggagcctggcgggggagggaagggttcgcggggcgggagtaggggaaaggaggaccatttgttccttcggccattcccttccagacagctccttccctctggcttcccggccgggtgacattgggtggcgtgtgctgcagtgtgtgtacgagagcgagatgtgtacacgcctctgcccgtacaggcggagaattcggttcttattcatggagaactccgggcgcacacacgcccccctcgcggagatcgcgggccgcgcgccgccgattgctgcgctcctgcccacaccgacacacaccccattcctgggaagggggaggccctttaaaaccggcccccaaccccctcagcggcacccttggccagggccgggagttccagcgtggagagaggaaatggagtcccggcaacgctgcgcccggctccctgccacctcctcctccacacatcccgctctgccaggacactaggtgcgcagcttagggtcccaggcaccgcggtgggcgcggtgaaaagcgcgagcgccgagaagtgggggctccgcgcccttctccccgcgccgcggcctcgcatccccagcttcgatcctctctgccccacagggggactcgagacccccaagcccacccagggcacccagcgcgaaggcggctaccacagacagaggcggttgcccgtcgcctacctcggtccccggagacccgagctctgggccggctgcgctgtccccttcgtgggctccgcgcggcggaggggctggcggcccctgtcagcgccggcgtttgtttccctctggctctcgggctttcagggctgggagcctccaggacactccccttccaggctccgcccgcgcccgccccgcgcaaccctccccgcgcacccctctgcgctgatgtcacggcgccgcagcagccaatggccgtcgggaacctctgcccgactgctcggcctcctcggttcaaactgaaagcctgagactttcccaactccgtatggggcagcctgggcccgcccggcttccgggagacactcccgccccagcctgcgctccggccgcgaacccccactggggcccccagggccaggggcgcgtctccctccgggggcctggcgcgaggctcttttgaggctcttccccattcgagccggggcaagaaaccaagaactccagcccgggtggcgttcctcgttcctgctccctcccggacctgctaaccacctggctgcagtactgtcgggagatggggcaggagggctggcgccaccagcttcgtgggtgccatcccagactctcgctgtaaacgagggagcggggaggagccggccagccccgaggccaggcttggactgggcgtcagaaatgtttctacagggtgacagcccttgagctccccgcatccccgtctgtgcctttgcctcctaagtatcagctgaggctaaatttgcaccaggtgaacgtcaaggaggatcaactcctgagtcccagagcctgaatccaagtcccaggccttggactctattctttttagaggaatagtttcagttgaaatgatcattatcaaggtagaatgccagctgcgaagtagtcaactaaagtggacaaggcgcaaagtgaaaagttcccttgcctctagctgaaccccaccctcggtttttaaaggaagtgagggtgaaggccccagactttccccatggctgcgaggtccctaagccctcaggaacattctgctttctggggacagcacatttccgtttccctctgcagtgcgacagcaaccagctcttgagagctaatggtttggccactccatcctgctgtgaaaattaagttctgggctgggcgcagtggctcatgcctgtaatcctagcattttgggaggccaaggcaggtggggggtcacttgaggtcagaagtttgagaccagcctggccaacatggcgaaaccccatctctaccaaaaatacaaaaattagtcgggcatggtggtgggcgcctgtaatcccagctacccaggaggctgaggcgggacaatcgcttgaacctgggaggtggaggttgcagtgagccgagatcgcgctattgcactctagcctgggtgacagaggtagactccatctcaaaaaaaaaaataaatgaataataagtaaaatcaaattctgaactggacatctggagggaaaggtagggtttggagccacttgggaggcagacactgtggattcaaaccctggcggggttatcatggatgtaaaccaaaaagtgactaaggcagatctcaatcaaatagaggtttagttagccaaggttgaggatccaccggggaaaaatcaccttttttccaaaaaggttttgggaacttctgtatttaaaagagaaaaagcaagcaggaaaggaaaagaagagggagagagggaggaaaggcattgaggtcacaagcgtgtgaggctctgatttagtgtctgtaagtctacattttacatgtgaaagggaatagaagaaaaagtcaatgatgcattgtctcctactcagtacgtctaaggggagcaaaggaaaccctgtgtcaacagggttgtgaaactgcagctatctgggaacaaaaggaaagcagcttctgtggtttccaagcttaacgtcccccccagccccgccccttttttttttttggagacagggtcttgctctgttgcccaggctggagtgcagtgctgcaatcgtagctcactatagccttggcctcctgggctcaagcgatcctcccacctcaccctcctgagtagctgagactacaggtgtg

SEQ ID NO: 1243838 - DNA, 4001 bp, Homo sapiens
aaaaaaaaaaaaaaaaaaattagccaggcttggtggtgggcgcctgtaatcccagctacttgggaggctgaggcaggagaatcgcttgaacccaggaggcggaggttgcagtgagccaagatcgcactattgcactccagcctgggagatggagcgagactctgtctcaaaaaaaaaaaaaaaaaaaaaaagaagtcttaactgaacttagaaagctccttcaaaggacacacatcttaccaagaaaagaaaggtcacgagctgctagtgaaaaagtgatataatggatggtttacccagacgtttcctggggctgagaggcagggcttttacacgaggagaacaggttacggtttggacatttgttggttctagtttggcatcactggagtttttagctttgttcaatgcccgagacagcttcctttttggaaaactgattgtagcctgtgcctgggatcgggtttgaggcatgacgacagcacagctagattaaaaaaaataagaggacaactagtcaatatgtgaaagtgaagagaaaataactaacatggaatttatttatactgatgattaacacttatttcctaattatgttatcacacttattttagcattcacttttgcttcacatccaaatctatgcaagaacagctgacatttgttgtctacctactacgtggaagggcgctgttataaacactttaggtaccaactcgtttaacaacgatcttaggagtaggtactattattagcctttattttacacatgagaaaactgagataaacagtggcccaaagtcacagaaaaacaggaatgtaaccccgggcatctggtgccagagcccaagttcttaaccaattgagcgatgcaataacaagttacctgaaatgggccgggcgcggtggcccacgcctgtaatcccagcactttgggaggctgaggcgggcggatcacctgaggtcaggagttcgagaccagcctgaccaacatggagaaaccccgtctctactaaaaatacaaaaattacggccaaacgcggtggctcacgcctgtaatcccaacactttgggaggccgagacgggccgagaccatcctggctaacacggtgaaaccccgtctctactaaaaatgcaaaaaattagccgggcgtggtggtgggcgcctgtagtcccagctactcgggaggctgaggcaggagaatggcatgaacccgggaggcggagcttgcagtgagccgagatcgcgccactgcactccagcctgggagaccgagcgagactccgtctcaaaaaaaaaaaaaaaattagccggacgtggtggcgggcgcctgtagtcccagctacatgaagaggctgaggcaggagaatggcttgaacccggcaggcagaggttgcagtgagccgagatcgcaccactgcactacagcctgggcgacaagagcgagactccgtctcaaaaaaaaaaaaaagttacatgaattgatttatatagaacttctagtttcctccctccaggcacgcggggtgtctttatcaccagttcagcccagcacccgccacatttagtctcttctatcccaagccctcacactgcagctcagtcttccctcagttctttccgcccctgcactcagtcctcattctaggcagctctcaacgcaccccagaatatttccttcctacaactttcacctccttcacaccacgcataactgctagaactaccccgagggcacctgccctttccctgatcccgacctcagacctccagcgagctcagctcttttcccttcacttcacctcaggcctcgccggaacccgcagccttcacccagctccgctgcctcacagaccccaggcctcctcgagcaatcctcttctttccacctcctcagtgcaggatccttctcacgtctctcacacgcagcctctcggactcaccaccacaagcccctgaacaaactgcacagcggcagcagcaaactccagccgcgctcgcgccaaatccgaatggccacagcgttcccacctcccgccaaagcccggcctcgattctgattggctgtagtcacagagcctttcgccttgggcaccgcctctttttttgctaccaatccagtggaagagttacagccaatgagagagccccaagtcttagagtcgctgtgaggccacgaccactgaacgggggagggaatctacatccggggcctcggtggaaagacgcgcgattgcggcagggcgactctgggtaaagcgggccggcccgccgcaaagcacgctgggaggcgtagtctttgctgccgcgcagtcgcactcttccttcgactggaagtgtcaagatgtggttccccttctcactgcctaaagtacccatttgcatcatcctgatgggctagattttcagaactgctacatgatacctaccgttttgggttctgtgcgccaggtatgatgctaggcactttccttacctctctaatgctcaacctcgcaaagtacaaagcaaacttctatacaaggttagaggtcacagcatcttggtgacagtgaagagcctaggatccagatctcctgatggctgaactagtgatttttatggtaaagttctacacacctatataaagaaaaactatgcttcatcatagtatctcttgatttgtgcttcaaaggtgagaaacagagccaactctttacttttatttcgttcaacctaagaatattatgttctgtgcatcttcttaccattaatccacacatcatggggagggaattatgaccccttaattttaaaatcttttatggcgaaacactagggtttcagggccagggaagacagctatatagaagaggcaagctgagtttttaatgaaaaatataaattagcgcagtaatttgaaggccagcttccaaagccaataattcatctaagcctcaggttcctttagaggccagaacccaattctaggtgatggtaaacatttatcttttacccctcagtaacaaacaaaatagagccataaagcctagaaagagggaagcaacaatattacgatcatcagtgaattggtacctagttcatgaagagagccaatattgagtgcttaagtgtatgccaggggctgtgctcagtattttacctacatcaccttattaatcttcacaagcacccccatgaacctggtgttatttcactttacaaatgagggaactacagtagaggggagttgagtaaacttgcccaaggtcacacaactagtaagtggaagagctagaatttgaactctgaactctgacagaaaatcaaactcttgaccactttatcatagggggatgattagacagattcaggttctaaacaggaagagatggtggagtacatttcgtgaaggctttttagcagctgaaaactacaaaagtgaagagaatgggctgccatgaatggagaaagttaccacacaatggaagctttttttttttttatttttgagacaagtctcattttatcacccaggcttgagtgccgtgccatgatctcggctcactgcaatctccaccacctgggttcaagccattctcctgcctcagcctcctgagtagccgggactacaggcacgcgtcaccacgcctggctaatatttgaatttttagtagaggggtttcaccatgttggccaggttggtctcaaactcctgacttcatgatccacccacctcagcctcccacagtgctgggattacaggcatgaaccaccgctcttggccacagtggaagcttttaaaaggactagatggtatttctgatgtcttagtaggatagtagaactcaggaagcaaccttcactgttcgtatttttataacatgggcacctaagaattgcccttaataacctgaaatggtaatgtgtgcccagccagctgtaaggggtggttatggtaaacaacctaggaagctatgagtacttagcatgcatattggaacctatgaaaacaccagg

SEQ ID NO: 1243839 - DNA, 4001 bp, Homo sapiens
caaccaggtcccatagagtctaaagcacaaataccaatgtgatttttaaaaatataaaactaagcaacagaaatagctagacatgctctgggaactagtatcaactccatccactcactaagcagaagcctttgacgtttctcactcagaagcttacaactgaagaccccaccactggaagtacctacctttggcggtttgaggcctatgtactcttcacttctcgaattctgggttaaggggagacagattcacacactggaatgactagccaacagcaaagtgttctagtcaatgatgaacactgcgggcttccagacaatgttaacacgctgaatgccaattcctcgcaacccaccctaaatgaggaaggactgttagacaaatagctcacctggggagtggactccgactcagagaccgcttgctcaggaaagggctgctggaccgccttcgaccatagggactgggcgatcgcccgctgtaagagccacttctttcgtagctggacgaccgtctcctgctatagggactgacagatctctgtcgcctactgtaggggctcggtgaccgggtgctggactggtaggccgaaggctccttgtaagggggactgaccgactgccttctcgaggtacttccaggacttttcttgtaggagtcataattgctcgaggtatgagatcgtgagggactaaggtcataatcttggccataagaagctcccgaggggctatcatcttgtttggagctgtcagaccacttcctgtgggggctcctggatctccgttttgggctgtccactgttttgtaacttttgggtgtttccctttttcgatgacttttactccggtctttgtgcccagacttcagctcccgttctttcctggtcttctccttgtggagcttggatgacctggattccttgctgctgcttttggctacctgcgccttcccatagtcatcagtctcctcattcgaacgctttgaacttcccgatatccggtccttcatcgatcccgacttgctggagacttcttggcttttttctttttcggtctgtttagcttttagtaagtcccgggaacgcctgtgctggtggtgacgatgtttgtgcaggcggtcgctccgatctgatccacgacgttcgtcgttctcccttcggtctagtttgaaggccatgtcatcggagaaggtgtcggaatcagagctgatatcatcatactccaccaaaggtttgataactgtgcccagggatgctgcttcgggggtcaccaaccccatgtctttggagtgtttggacttatgccgcttgtgcttcgataccaagcggtgacgctctctgctgttagagctgccgcctcccgatgacggctgcaaagttccagaagctcctccactcccgtccttcttgcccccatgtctctctgaattgggcattccctttcccctgacctgaagaagggaaaaaagttccccagcactccaaaaagcaacccccacccacccccccaaccccaactccacgcccaccaaagcgccccgggaagggggtggggagggcagggacggtagcccaggctcctcctccctcccgacgcctcagcacccttctacatgaggtggggggtgaaggagcgagggaagaaatgagagttcctcggcagtggagttgcgagacaacggggagctgctcaagtctgtttcctcttctccctccgccgagccagtcctcaggcccgggcgccggggaggtccaggaagtgagaagccgacggcccggggctgtggagccgactccagctctggggccctgcgaggactacgcgggcccttcccctacccggtagcccggttcaggacggcttcctgtcgccggggtgccgcggcctaggtgcctcacgccccctttgtccctcgctcctgaggtagccccctttcttgcctccgtttcacctccacaccacacacactctctccctcacacagacccagtcacacactagattaaaccgaaacggcacttggggaaggggggaggggcaatcccagaaatcgtcgcgagagtccagtagcctctcgcgatgtttcgtgcttcgctttcacctcattcccctgcttatcaaacaacgcgagatcaggtcccaaactagaaacgcgtttcacctgagtctcgcgatgagctcccggagctccccgtttgagcaaagctttattgaaacggaacaaaccgagttttttttttttaaccaaaactttatcggtaactgattaaacaaacactcccaggctccgtgacaaaataatttcaacatcctttttaacaaatcttttaactaccaggatgacttttttttgtttgttttttgttttcctttgagacggagtctcgctctgtagcccatcctggagtgttagtggcgcgatctcggctcactgcaacctccacctcctgggttcaagcgattctcctgcctcagcctcccgagtagctgggattacaggcgcccgccaccacgcccggctaacttttttgtttttagtagagacagggtttcaccatgttggccaggctggtctcgacctcctgacctcaagtgatcctcccgcctcggcctcccaaagtgctaggattacaggcgtgaaccgccgcgccgggccatttttttgtttgtttgagacaagttctctctcttttgcccagactggagtgcagtggcacgatctcggctcactgcagcctccacctcctgggctcaagcaatcctcccacctcatcctgccgagtacttggaactatagagtcgcgccaccacgccgtgctaatttgtttctattattcgtagtgatggggtttcgccatgttgcccaggctagtctcgaactcctagactcaagcaatccgcgatccttggtcttgaactcctagaatgaagcaatctgcccgtctggtcctcccaaagtggcgggattacaggcttgagccaccgcgcccggttgagattattttttacagagcaaaagacaaatgtcgggacatttcaacccaagtccctgagtgttttaacagtgcttcccacatatagggtgtgtgctacctgccaagaattttacatacattatctctaattttcacaattatcctgcaaaacacgagattttcatccctgttttatagaaaaggaatcccagcctcagggaagttgaataatttggtccaacaagtgccacagtcaacattcaaattcatgtctttctgagactaaaacacaagctcttccatcctatggtgttgtctccttaccaatctttgcttcaaatctcagaacctaaaagctcatcccatcttgagatcctcccatggccgttattggataatttagcctttcatcctcatacaaaagattataatatgaacaagaaaagcatagtattaattaacaagaaaataacactatcttacactggcccctcatttattactttttaaaaaactttcgcctaccttaagtcattccatcttcacaacagtcctctgaaataggttgtataagtgagaaaactaaggcatggagaaatgaaggggcttgtccaaaacggagaagttcagctggtaaattcaggaccagaaaacattctgaattaaggtagtctcaattctcaaaaatcactctctgtaaatgttcttgttccttttgctcacagggcgatccaaaacattttttttttttaacctaattttgtgtgtgtgtgtgaagggtctcgctctgtcgcccaggctggagtgcagtggcacaatcataactcactgtagccttcccctcatgggctcaggtgatcctcccatctcagcctcctgagtagctgagactacagccacaggccaccagcccagctaatttttatttttatttttttgtagagatggagggctggctatgttgccgagtctgacctcagatgcctgggctcaagcattccatccactttggcccccaaag

SEQ ID NO: 1243840 - DNA, 4001 bp, Homo sapiens
ctgcctcaacctcccaagtagctgggactacaagcatgcaccaccacacccagctaatttttgtagttttttaagagctggggatttgttacgttgcccaggctggtctcaaactcctgggctcaagccatcctcccatctcagcctcccaaagtgctgggattacgggcgtgagccatgtccagccccaaacactctttaatccgcctcgaatgggagcatcagtggaccccacccaaccccagtaggaccctgcctgtggcaccctgtggccatgtgtgcccctctctctaccatctctgcaaagatgcaaccaatgctccagatatccacagctgtggtatagaacttgctgcccaagagaatctcgggggcgcgataccacagtgtcaccacctgcagggcaaagaaacagtatcactcagggtggctgagtgcatgggtgacactcctcctgctgcccctctctcctctttgtctcacaatacctcatgggtgtaggtgcgcaggggcaccccgaaggcgcgagccaggccgaagtcagccagcttgatggcacccaactcattgatgagcaggttctggggcttcaggtctcggtggatgacccgatgtgagtggcagaaactcaccccctgcagcagctggaagaggtagctctggagaaacgagcgcgaggtgcagccagctgagcggaggtgctgcgtggacagggatggcagggatggggtgtcacctctccttccctgcccttccttccctaccttgatgaggtgcagggggagctctgagcctggggtggagtccatgtacttcttcaggtcctggctgaggaactcaaacaccagatagagcttcctctcgttgtgcaccacgtccagcagtctgacagggagatggcagtcaggatgctaccttcgccatcccagcttccccacctcaatccccaactcaccggacgatgttggggtgcttcagttccttgagcagcgagatctccctgatggcagtgcttgggaccccctccatctccctgcaagaaacaagggcacagccgtgggcagagacttgggccaagaagggcacttccagccagggggatcggcttctccttaaccccacagaatgaccagggccccggcaatggagacctgtgctccttggcacgtcatccaccaaactccacagtcagggccccggcaaaggctggtcagaaggcagtgaactggggagaggacaggtaagggctgctgggcagcacccagaggagttaaacgtggactccaggaaagagggaacggatcagggagcgcccaggttgtgatggcccagggtgggtaactcaggggccgtcccagcactcacaaatccagtctgatcttcttcagggccaccagctgccctgtctccctgttcttggccttgtacaccaccccataggtgccctctccgatcttctctaccttctggaacatatccatggccacagagctgcctgggaaacagaaggcaccgggcaatttgcaccccacgcccagcgctcccgttgctcctccagcttccatgtggcgccctgcccagcccagcccagcccagactgcccagctcccaaggcccacggcctagccaccccaaccccagctcatcctgcctgggaacctggctgggggtcggaaaccgcccctcacccagcccagcccggaccccaagggggtcagggggcccccttcacccagcccagttcagccaggacccccaggcttctcgcccatgcccggcctcggagggcagggcccacactctcccacccagccccctgcccatcccagccagaacccccaggaagtcagagaccacccctcgcccagcccagcccaacatggacccccaggcctctcacttgtgccgggccttagagggcaagaccaccctttcccacctgggtcactgcccagcccagccagtcccaggctctgggtacacatggcggccaggaagggctgcccaggggccagggccactgggggcagaggtcaggggtcaggagggtcttaaagccacagtcctgtcttaggctgcacggtcagggcccagggcctcagcccggcccgtgtgacgacgctcagcctcctctgaaggcagagcctggccaggggcagacccctgcatcctgggccccccaccccagcccctgggcccctggtgccctaccctgaggccccaggcccagaattcaccagaagccctgagaggctgcagcccacagcctgggttgcagctccccctcctggcccccgccggcgctgcaccacgagcacacttcaagagcacgccccctgggcctttattcaccaggaccttctggaaccctccatggccccacaccaagcacggccccggcgcccaagctcggccacctgcagtctcctggggtggggctgtcggatttatggcatgctttctgggttctcattgctgagccaatcccaaagtaggggaaggggctggattcatcacccgcccctcggctttcgagctccagacaaggccgtcgctggggaggcgtctgtgctctcccgggctcctgcagctccagagggttcgggctctgaagcaggtgagggtgttgctaggctgctgtttcctactggctgccgccccgctcctgcttgtacagtctctgctcccggatggcttgttccaacaagggcaggttcatcccctccacacaggtcagcacgcgcgccttcaccacggagcctctgtctgcaagacaaacaccagggcacgaacggcgactgagcggcgtgtcaacaacgtcctccaaggtgcattccagctgttccctccacagctcagtcctgggttttggcagcaagtgatgtggacaataacagcatatggggcaaaggcaactgagtatttgggcctagaaccgtgggcctgtcatgcacagtcggcccgtgtctggaacttagcaggtggtcagaaaacccctctggactgagggaaaggcccccttggcaccttgggacacaatgtcatcaggaaccggggaaaagagacacccatattttaaaaatccaagagactgagctcccggtaagtttggctttataggagcaggtcatcccaccctggacgaggggggcttctagcagatgcggtggtgacctgatacataatggaaaggtttgccactattcaggtggcaccaaacaggaaagacatctccgagagactttttaaaaattttctttcttttgacaggtgaactggctcacacctgtaatctcagcactttgggaggccaaggcatgtggaacacttgaggtcaggagttcaagaccagcctggccaacatgatgaaaccccatctctactaaaaatacaaaaattagccgcgtgtagtggtgcatgcctgtaatcccagctacttggaaggctgaggcaggagaattgcttgaacccaggaggtggaggttgcagtgagccaagatcacgccactgcactccagcctgggcaacagagcaagactccacctaaaaaaaaaaattttttttttgagacagggtgttgctctgtcacttgggctggaatgcagtggctcaatcatggctcaatgtagcctccacctcccaggctcaggtgatcatctcagcttcctgaggagctgggactacagggacgcaccaccacacccagctaatttttgtatttcttgtagagatggggtctcgccatgttgcccaggctggtttcaaactcctggggtcaagtgatctgcccgcctcggcctcccaacatgcatggattataggcgtgagccactgtgcattgctgacattttttttttctttcttttttccccagtcatagcttgcaagagaaaaaaaaaagttaaaaaaattttttgcactcatgctctttctgctctctgagcactttaataaatagatttccgagatgggtggatcacctgaggtcaggagttcatgac

SEQ ID NO: 1243841 - DNA, 4001 bp, Homo sapiens
ctttccactagacccgctcagcttcgcctcgcctagattgaagatgtccccgggtggcggggatcttgcctcacgaccccactggcagctcagttagggtggctggctccaggagcctctgggagagtgaataactccacacaggagccagaaaagggcctccaaccagaaaccccaattcctccctgggccaggcagccagaggcccctctctagctccatacagggtgcagccggcagccttgcctaccctggacccagcaagggcacaggcggcaggggcaggtcagtcctttgagttccccaaagtgggaggtcagtggcctgggtggctctgaatacatcttctgggttttgcgcaaggctcgtgagttcaaaagtgcccagagttcttggcagggatgaaaaaaaccccagggagagactgtgggaaaggtgaggcccttggtggctttgctagacacatactgtacacaaaactgatttaataataaattcttaaaaatgcattgaatccttgagccatgacgcaggctacagtgctcaccgatccaggcctaggaggagccgcttcttgtcctcctggccgctctcgttcttcaggtcggagaagacctgtgtgaagtagtgtgggtcggcatttatctgcagcatctttgagctcatgaggttgatgacagagaggcaacggtcccaaaaggcctccttgcagctctccaccaggaagggcttgagcgggtaggagatctcgttgcccatgtaggagtaggagaggtacaggcatgtcagcaggacggcctggagctcgtgatccgagcccacctcggaggagataacatccctgcagagcatgtagaggaagaccacgttggccggcgtgatgaagccctggtcctgccagccctgcagaagcagcgagcggtccacgctgcgcagccagagcacggggtccgtgggggacaggtgcttcaggcggtagcaccggcggcagagaaactcacccaggcagcgaagcagctcactggtggacgcctggacgatgacccgtttgggcgtccctgcggaggtgacggcagggtgaggggctttcttgactgaggaggagcccccggtctgggaacccgagagctggctggccgggggtgcaggcggctgggccggtgggggctgggcgaatgtggacaggttggcgcacgacagcgacttcttcaggttctcattgttgaggtgcgtgatgttgttctggtagctgctgttgggctgcaccttcttggagttcttcttcttggccgacacggccacgattctcttccaaggcagcacggagatgatggagtggcgcttcaggttcttgtccttggcgttcttgctgttctgtacggccgtatagtggcccacggtggccgcgccatcctcaaacagcgtggccttccggtagctgggagacagggacagcaccgtgcccatggtgctgctgcgcgccgggcgggggctcgcgcccctgcgcgcccagcctgccggccggagggataaaaccgctcaccgagcctgcggcggccccggagaggaggcgggggcgctcccgggaagcgtgctgcccccttggatctgcctggaaaacaagatggttcttagcgccaggctgggctccgcgccgcgcccctgcgcccctgcgcccctccgccccgcgcctcggcgcaccccgccgccccagtcccgggccctacccgcgcccccgcgacgcagcctcgccgcctccactgcagcacccccgcccgccgccgccgctgcggtccccaggcgcagccgggaggggcccggtcgccgacggaggcggccgaggacccccgcctggacaccccgcacgggcgcgaccccggtctccgctccccagggccaaggacggccgcccagcgcaggcttacccggcaggcggcagctcctgcgctccgcgccctccgcaatgcgcgccgcggccccgccgccgcggtcccggcgctcggcggcgctcgggggcgctcggcggggatcggctgggctcgcgctcggcggcggcgacggcggcggcggcggcggcggcagctagggagcttctgtccaaggttctgcaggcaccgcagccccgccccccgctcggccgcccgcaccttcgccgccgccgccgcgctcccgctcccgctcccgcttccggcgcgcgcctcagcgccctccctcgcggggcgcgcgcgccgtccacgctccggcctggtctcgccggggagtcgcggccgttggtgtcctcagctcgagccgcgcacggtgcgggtaggacgcggcaacgagcgggaggcacctctacgcgccgggccccatctaggagccggactccgcggctgcggcgggacacgcggcgtcggcccgccccgcccctcggggccgcccctcccgcacagctcgccgcccgctccgcgccgccgcccaacagcagcccggccgccggagagtcctcggcgcccgcgcaacccaactctgccgacgcggggcgggcgccgagcagggcggagccgagggccgaccccgcccgcgtcccgcccagacacgtgctgcctttgttcccgccgcggcgcccgcagctgccggccgcgggggcactctcggccgagtccctgccctggcagcgcgcggcccgccctctctgaggctgccgccctggcctggtgaggagccctccgccgaggccagggtccggagctccctccttccacctgacatccccgtccctgtggaaagcagccagggagcgcggggaagaaggccctgggcggggagaggcgacgcctttactgaggcctcccgagtgccacgcgcacctcgagtggacagtccaatcggttctggccacccctccggggcctccgttccctcatcatgggtagatgaccgcggccgaagtgggcctcagagatccaagccagagaagcgtggcccgtagccaagcctgagcccgtcacaaatatgacctctaagttcccactcgccctcttatttgtcatattaaagctgaagcaactgcccctccggccagctttctgaccctcttaaacgttttcaattctaagtatgtataatttgagaacttgatgctagcgaaattgagtaaaattctgtttctgaaagctgttcctgtcagatgtgaatccagatccttcacaaaggctgttgttcatttactattttaccttgtttctggagatcgagtcaaaactgaccacaaacctgggaaacaggaaacttaagccctgtcttaatccagattatctctggacctagagatgagggagtggctctccagaggagaggatgccacccagttacctgaccactccagccgactaggctttcaccagccctgtcaactgtcctagggggaacagaaagggaatctggcatcattcaaaatggtgcaatcaaggcagaaagtgctgggttttgtttatgtgccactcagatttctgtcaataggaattccaggctttaggaaccttggggggcaaggcatacagtggaaaatgcattgctctgtacccagagggctactttgtccacagcctttcagaacatccacaacagctgttatgggaactcagaagaggaaggcaggcccccagctcagtgcgcccctccctgtgaatgttcctcagtgtacaagcctacctgctcttcaaatggagctgtcctcaaccctcctgcatgtaacagtaagaagccagaagaggccgacgcagtggctcatgcttgtaatcccagtattttgggaggccgaggcgggtggatcacctgaggtcaggagttcgagaccagcctagccaacatggtgaaaccccgtctctactaaaaatacaaaaaaaattagccaggcgtggtggcaggcacctgtaatctcagctactcaggaggctgaggcaggagaatcgcttgaacctgggagacagaggttgcagtgggccgagattgcaccattg

SEQ ID NO: 1243842 - DNA, 4001 bp, Homo sapiens
tgactaaatggcactacagagtggtgaattcagaacttgaactctgccaaccggtcaaacgctggggtcccacactagtatcagttatactctctctgctatattcctgtaaagttttcagaaagaaaaattctgttgatgtcacagaactagaagcaacggactggggtagtcaaacagacaccatcttaaggacaagattggcatcaaatccatgaatccaataagcattttaaaatgccaggagctgtgtgatcagatgaagaggccttccctgactatgaactggggaggaagtatgtaagccccatacagacaacctggagatggcctggacactaaaaggttttcatttgcaactgggtcttaggtccctcttcctcctaaaatcaagggggaggtggaagctttttaaatgaggttttttttttttttcctggcataatgcaaaaggcatggacagtgggtcagacagacttaagttccaattcagatgtgccacttagtggttgactgttttttgtcttctttttgagatggagtttcgctctcgttgcccaggctggagtgcaatagtgagatctctgctcaccgcaacctctgcctccggggttcaagcaattctcccacctcagcctcccgagtagctgggattacaggcatgtgctcccatgcccggctactttttatttttatttttttgtatttttagtcatggagacatggagacaaggtttctccatgttggtcaggctggtctcgaactcctgacctcaggtgattcgcccacctcggcctcccaaagtgctgggattacaggcatgagccaccgcgcccggcagtggttgactgtttttaaagcgagtcatttatcctgtccctgaatgatacgataacatatgttattaaaggagaaaacgcaggtcaaacagactgtacatatggttcgttcccgctgctatcagggaagcaggtctggccacagatggggcatagaacgaggccagtggtcagcatctcgactcaggctttcaggggtcagagctcccggctattggacacagggggcaacgcacaggcctccccccgacagccagctgcgcggtggcgccccctcctaccgagcagcttgctggtctggatgtcgatgggcacgtgctgatggtcctggcgggaaacacggtgaggaggggggcgtgagcgcggagagaggacgtaccactcgcgcgctcatttcaacgtcccaaccaccaccctgcagggccagaacggggccagagcgatgggctgggttgagccgcttccggagggagaccggagacacaggttaggggtccgcggccagtccccagcacacccagctcctgtccccacacctccatctttcctccacttccgcttcaggctggagactgtggcccgccccgccctaccaccaatccagtggcgttgtggccgagcctccgtttagacacaaacgggcatccttcggccacgtcgccgccttccgtacagccaatcagggtttacgctccactcaggcctcaagccccgcccaccccaggctccgaatggctgagctcgggaggggcgggagaatggagacagccaattggagacgcgaggcgggctcagggcaggggacgggagggggtgcgctgcagcggccgtgggattgcgacaggcggcgctcgagagcccagcctggcagccgcttcccctggcgggcactgggtcttctccacgcagattgagacgtctgctggcggggtcctagcgccgatctgggaggccgttgcaaataccttcttccctccttgcgtcgctttaccatccagagcagtgtgcaggtctcttgtggcacttgtcatgctttgcctcctcattcagtttctctaatagacatggttgagcacctgcaacgtgttgggcgattagggcagggaaggggaaggaagagagtcggtgagacgtcccaaagagaacacctacattgagtctaaacgaagagctgaagatagctgggtgatgtgggaagaggagttttaggtggaggagactacacagacaaagcttaggtggccacaaactgcaagaggggtgcaagcaacaacaggcaggcaggacgggcaacgtaatttgtgaggtccagtgcaaaatggaaatgcacagctgcttgttacaaaatgatgaagaatttcaagatgaagtcggctccgcgggcaggccaacctctataccgtagatggtttgaggcagcgagtggctagaggagaggctgtaagggtggaaaggccatatcaaagggagacttattaaggaacttggacttcatcccttcagacagaggaatcacagaaggggtttgaggcagggaggaacctgtacagataggctgctgggatgatggatgcatgggagataagactggggacaaggaggctggaaggaggttgttatcgagggattatagcctgagctgggacacaagatatgaggaggaaggggaagggctggatctgaggaatatttaggaggaaaatgtataggacttggcaattgattggctgtttgggtggaggagagagacactaaggatgacacctaggtgattaggtgggaaccaccacctgagacagggatgcaggatgctgagcaggtgttggggaggagggggtctagctttgaacctagtctggcaatgctgggagacccccagatggaaagtgtgcagaaggcacttgggtctataattttggagttcgagggagttgtcggggctggagatacagcttggagagtcacaagctggctaatctgtggtccgagtggtggctgaagctaagggagagtctgagattggccaagaagtgggtagagtaaggagggagggtaggctgaggccagatcccccaggatctcacagcgctgggtatgccttttcttttttttttttttttttttttttttttgagacggagtcacgctctgtcgcccgggctggagtgcagtgacacgatctcggctcactgcaagctctgcctcctgggttcacgccattctcctgcctcagcctccccagtagctgggactacaggcgcccgccaccacgcccggctaatttttttgtatttttagtagagacgaggtctcaccgtgttagccaggatggtctcgatttcctgacctcgtgattctcccgcttcagcctcctaaagtgctgggattacaggcgtgagccaccgcgcccggccctgggtatgccatttctaaatattccttccccagctcctgttcaccacagcacaacacttgaggcttagtaaatttttgattgaaatgcatagtgtgatacagcagcaggaagacctagattctgcccagtgaggtcttggaccatttctataacctatctgatagccacagtttccccacatggagataacagctatcctatctcagggtatttctgtttagaggcttaaataaacacactagtaactcatgacagtttacaacatactgtggctgtatttctcatgctttgtaaactctccctatatgaaatatcatatatgggccaggcgcggtggctcacgcctgtaatcccagcacttttgggaggctgagacaggcggatcacctaaggtcaggaattcgagaccagcctgatcaacatggtgaaatcccatctctgaaaaaaacaaaaaacacgctgggcacggtggctcacgcctgtaatctcggcactttgggatgctgaggcgggtggatcacgaggtcaggagtttgagaccagcctgatcaacatggtgaaaccctgtctctactaaaaatacaaaaattagctgggcgtggtggcgtacgcctgtaatcccagctactcaggaagctgaggcaggagaactgcttgaacccgggaggcggaggttgcagtgagccgatattgcgccaccgcactccagcctgggcgacagagtgagactccatctcaaaaacaa

SEQ ID NO: 1243843 - DNA, 4001 bp, Homo sapiens
agatttgtggcttcagagccatgcatatttcctcagtgagagctaagagctgagctttgtggtcagatggtcctgggttctcgttatcaagtttcttgagcaagtctactattctgtgcctcagttttcccacatgtaaaatggggaataataagacactgactagaaaagggaatgcaggtaaaacactgaacagtgtgcctgagacacggcaaggactcaaaaaatgacagtgatcatttttatcatgtcaagtgcctaaaacagcacctggtacaaaaaaaaaccctcaatgaatggtggtcattttattggtccttttcatgaccaagaacaagctcacacaccaagactgcacatgggctgaagggccagtacaaatctgaagggaggctaaagaagcttcccccgtgaccaccaagcaggactgactaaatggcactacagagtggtgaattcagaacttgaactctgccaaccggtcaaacgctggggtcccacactagtatcagttatactctctctgctatattcctgtaaagttttcagaaagaaaaattctgttgatgtcacagaactagaagcaacggactggggtagtcaaacagacaccatcttaaggacaagattggcatcaaatccatgaatccaataagcattttaaaatgccaggagctgtgtgatcagatgaagaggccttccctgactatgaactggggaggaagtatgtaagccccatacagacaacctggagatggcctggacactaaaaggttttcatttgcaactgggtcttaggtccctcttcctcctaaaatcaagggggaggtggaagctttttaaatgaggttttttttttttttcctggcataatgcaaaaggcatggacagtgggtcagacagacttaagttccaattcagatgtgccacttagtggttgactgttttttgtcttctttttgagatggagtttcgctctcgttgcccaggctggagtgcaatagtgagatctctgctcaccgcaacctctgcctccggggttcaagcaattctcccacctcagcctcccgagtagctgggattacaggcatgtgctcccatgcccggctactttttatttttatttttttgtatttttagtcatggagacatggagacaaggtttctccatgttggtcaggctggtctcgaactcctgacctcaggtgattcgcccacctcggcctcccaaagtgctgggattacaggcatgagccaccgcgcccggcagtggttgactgtttttaaagcgagtcatttatcctgtccctgaatgatacgataacatatgttattaaaggagaaaacgcaggtcaaacagactgtacatatggttcgttcccgctgctatcagggaagcaggtctggccacagatggggcatagaacgaggccagtggtcagcatctcgactcaggctttcaggggtcagagctcccggctattggacacagggggcaacgcacaggcctccccccgacagccagctgcgcggtggcgccccctcctaccgagcagcttgctggtctggatgtcgatgggcacgtgctgatggtcctggcgggaaacacggtgaggaggggggcgtgagcgcggagagaggacgtaccactcgcgcgctcatttcaacgtcccaaccaccaccctgcagggccagaacggggccagagcgatgggctgggttgagccgcttccggagggagaccggagacacaggttaggggtccgcggccagtccccagcacacccagctcctgtccccacacctccatctttcctccacttccgcttcaggctggagactgtggcccgccccgccctaccaccaatccagtggcgttgtggccgagcctccgtttagacacaaacgggcatccttcggccacgtcgccgccttccgtacagccaatcagggtttacgctccactcaggcctcaagccccgcccaccccaggctccgaatggctgagctcgggaggggcgggagaatggagacagccaattggagacgcgaggcgggctcagggcaggggacgggagggggtgcgctgcagcggccgtgggattgcgacaggcggcgctcgagagcccagcctggcagccgcttcccctggcgggcactgggtcttctccacgcagattgagacgtctgctggcggggtcctagcgccgatctgggaggccgttgcaaataccttcttccctccttgcgtcgctttaccatccagagcagtgtgcaggtctcttgtggcacttgtcatgctttgcctcctcattcagtttctctaatagacatggttgagcacctgcaacgtgttgggcgattagggcagggaaggggaaggaagagagtcggtgagacgtcccaaagagaacacctacattgagtctaaacgaagagctgaagatagctgggtgatgtgggaagaggagttttaggtggaggagactacacagacaaagcttaggtggccacaaactgcaagaggggtgcaagcaacaacaggcaggcaggacgggcaacgtaatttgtgaggtccagtgcaaaatggaaatgcacagctgcttgttacaaaatgatgaagaatttcaagatgaagtcggctccgcgggcaggccaacctctataccgtagatggtttgaggcagcgagtggctagaggagaggctgtaagggtggaaaggccatatcaaagggagacttattaaggaacttggacttcatcccttcagacagaggaatcacagaaggggtttgaggcagggaggaacctgtacagataggctgctgggatgatggatgcatgggagataagactggggacaaggaggctggaaggaggttgttatcgagggattatagcctgagctgggacacaagatatgaggaggaaggggaagggctggatctgaggaatatttaggaggaaaatgtataggacttggcaattgattggctgtttgggtggaggagagagacactaaggatgacacctaggtgattaggtgggaaccaccacctgagacagggatgcaggatgctgagcaggtgttggggaggagggggtctagctttgaacctagtctggcaatgctgggagacccccagatggaaagtgtgcagaaggcacttgggtctataattttggagttcgagggagttgtcggggctggagatacagcttggagagtcacaagctggctaatctgtggtccgagtggtggctgaagctaagggagagtctgagattggccaagaagtgggtagagtaaggagggagggtaggctgaggccagatcccccaggatctcacagcgctgggtatgccttttcttttttttttttttttttttttttttttgagacggagtcacgctctgtcgcccgggctggagtgcagtgacacgatctcggctcactgcaagctctgcctcctgggttcacgccattctcctgcctcagcctccccagtagctgggactacaggcgcccgccaccacgcccggctaatttttttgtatttttagtagagacgaggtctcaccgtgttagccaggatggtctcgatttcctgacctcgtgattctcccgcttcagcctcctaaagtgctgggattacaggcgtgagccaccgcgcccggccctgggtatgccatttctaaatattccttccccagctcctgttcaccacagcacaacacttgaggcttagtaaatttttgattgaaatgcatagtgtgatacagcagcaggaagacctagattctgcccagtgaggtcttggaccatttctataacctatctgatagccacagtttccccacatggagataacagctatcctatctcagggtatttctgtttagaggcttaaataaacacactagtaactcatgacagtttacaacatactgtggctgtatttctcatgctttgtaaactctccctatatgaaatatcat

SEQ ID NO: 1243844 - DNA, 4001 bp, Homo sapiens
atactgtgccacctacacttagttacaagcctgcctccttcacctgccagggtataccttcagggtcagggctgtgactattcctagctcccaggatggtgtctggtacttaaggggagcctaataggtgttcatggaaaaatttactgcccaggatgggagagggggttgtcacaatgtgtggatgtgtgtgtgtgtgtgtgtgtgtgtgtgtgtgtgtgtttgagaggagctgtatctcatttcagccaaggaggctgaggccagagtccagggcacagaccatggcagggcctagtccagcatccccagtcccaccctggtccccctgaggctatgattaacccttgtcctcagcacaaggacagagcctcatctgccagccagtcttggccatgtggggaagtaggtcaggggcttcagaatccggatagctgctgcacatcagggcaaagccagccctctggagccttgtggatggagaccagggtgtgggcacaccacagcaggccacaatggcacaaactgcagcagacttatgtccacaccccccagcttgctggaggccatgggaaggtcacttctccctggacatgtttcctcgccccttccagctctcaccatccaagaaggaggcatcttaggggaggagaggatagaactgactccactccagcaggcctcctcttcctttctgtcccaacagccccaccccccactcccagtgatgtcatttcggccacctcatcaccagcttctaacccccttccagtcgccctttctgtcctcagatggcaactgggggcagcggagatgtatccctctttattcggtctctcgcctggcacactggccgggattcccgaacctgaccccctccaaaccatgagccatttgcaaggggaccgggcaggggagggctaagcgactcctgactctcgaaggcagatgggagacttgactttctgcttcttcaccagcaaagacgcggtaccacttctccctgagtaggaagcgagttagggaaactttctaggagtcttagagctcataattcctgtcagggacgggtgctgctggatttggcgtgagataacttccctctacacacaagccaccctcccagcaaaacatgacgaaggagccgcctcccggcctcagaagactcctagctagcgctcaggccccgtaacaataccaggggcggccgagcagttgctgcctccaggacggggtgggcgagctggatgacggatgcccggtcgtctgggaaaataggaagaccgccccccgccccccacttttgcaggtctccgcccgtccggtccgcgtcttctccggcagcgccccctctctccacgtcccggttctccagacgcgtccctcctccgagtcgggcgcgcccggtccagcccagcccctcccggggtgatagcgcccaacaatggagaagcggacaggggtcaccgggcgctccccgccttcctgtcccggtcgcccccgcgctcaccctgctccaggtcctgctggtcgtaccaggactcctcttcctccgcggagaagtcctccatcccggcggctctccgcatggccccgcgggcggcgggcgggtgctgcggcggcgcagctcagggccggtgcgcgcggcccgggacaatgcggctgaggcgggccgggcctccagcgtcgggaactcgggctacagagcccgcgccgcgccccctcgccatcaaccgctcgccgggagcccacgcggggcctggcgctttgccagggtccggcccggccggggtcccgcagagccgggggcaccgggctgcggcgacacaaagggtggagtggcagggacggcgggtgggacagtggcaaggaggatccgggcccgcaggcgggtctggggcgctaggagcgcgcgggtgccgtggcgggcgccccctgcccggctcgggtccgcgctgctcctggcccgcccggcgacaaccggagccgccgctgcatcttggcggagcccgcctgcagcttgcggagctcggctccgcggggtggggcctgccgccgccgaccaatcaggagatgtatgcaaagctggaggcggggccgagggcgggaccctcctggtgtcttggtctgggaattgcttgatcaaccctttcgtcctacttccccctacgacctattcagtttatgtctcatgtctaaaattatgctattttagaagttgtcgtctctcctagatctcctggaagcaagaatattgtttctctttcacagctggctactcacttcctagaacaggctgctcaccagtcgggcgcgatgcctgactcctgtaattccagcaccttgggaggccaaggcgggcagatcgcctgaggtcaggggtttcgagaccagcctggccaacatggcgaaaccccgtctccattaaaaatacaaaaattagctgggcatggtggcgcatgcctactcgggaggctgaggcaggagaatcgcttgaaccctggaggcagaggttgcagtgagccaagatagcgccactgcactccagcctgggcgacagagggagactctgcctcaaaaaacaaacaaacaaaaaacaaacaacatgctggtcattgataccttccatcgacattctttgaatgaatgaatactaatttacagttgcctttgggaactgcgtgtttaagtgcttgtggctagaaaccacaggctgaaagtggcaaagtttgagggtgtgttacctgcattcaaggttctgttttcctttccttgggacccatatcctatatccaattatacccattaaaactatacacacttgcatctgtccaagcattctttccttagaagagtgttcggactcaagcattcacgtaactcatttttattgggaccctaatgtgctggtgccgttgagaatctctgaataatgttgtgatatacccaacgaatgacttgtatccagaatacagaaagaacatctgcatagtcataagaaaaaggcacgcaacccagtagaaaagtgggtaaaagatttgaccaggtaattcacaaaaaaggatacacaaataactgaataaatatgcaacaaggtactgaacttctttagccatcagaaaaatgcaaatgaaaaccacaatgaggtatcactacccaatcaccagagtggctttagggaaaaaaaaaaaaaaaaaaaaggccaggcgtggtggttcatgcctataatcccagaactctggggaggccgaggttgggaggatcacttgagcctggagttcaagagcagcctgggcaacatagcaagatcctatttctataaaaaaatttaaaaataaaaattaggtgggcataatgacacacggctgtagtcccagatactttgggaggctgaggtgggagaattgcttgagtctaggaggttgaggctgtagggagctgtggtcatgccactgcactccagcctgggtgacagagcaagatcctgtctcaaaaaaaaaaaaaaaaaaaaaaaaaaaaagacaaaaaatacctagtattggcaagaatgttgagcaactggaactctctcaccctgctggagggaatacataggacgacaaccactttagaaaactgcccgggcgtggtggctcatgcctgtaattcccaacgctttggaaggccaaggagggtggatcgcttgaggtcaggagttcaagaccagcctgggaaacatggtgaaaccctgtctctactaaaaatacaaaattagctgggcatggtggcacatgcctgtagtcctagctacttgggaggctgaggcaggagaattgcttgaacctgggaggcggaagttgcagtgagctgagattgcgccactgcacccagcctgggcgatagagcaagactgcgtcttggaaaaaaaaaaaaaaaagactgcttgataaccatgaaagctgaataacgtaagctgttgtaggttgtgttcccaggcagctgatcctgagatggagattagc

SEQ ID NO: 1243845 - DNA, 4001 bp, Homo sapiens
tcacgatacgttgatttcccttgcattccaccataagtggaagctttctgaagccctcaccagaaagagatgctggtgccatgcttctggtacagtcttcagaactgtgagccaaataaaactcttttccttagaaatttccttataaattacttagcctcaggtattcctttataccaaggcaaaacagacaccacccttattgtttcttctgcttccctgaactatctggccaaacacttccaagattctccaacaccctaggcctgtgattctcaaagacagatccccagtccagcaacatcagcactagctggaaacttgttagaaatacagaatccctggttgagtgcagtggctcacgcctgtaatcccagcactttgggaggccgaggcaggcggatcacgaggtcaggagtccgagaccagcctggccagcatggtgaaaccccgtctctaccaaaaaatacaaaaaaattaggacatggtggcacgcacctgtagtcccagctacttgggaggctgaggcaggagaattgcttgaacccagcaggtggaggtttcagtgagccaagatcgcaccactgcactccagcctgggtgacagcgagactccatctcaaaaaaaaaagaaaaggaatacagaatcctgggcccacctcagacctgctgagtctgaagttctgggggaggagcttgttttaacaggtcctgctggagatcctgatacaagccacagctggagaactaccaccctagacttatttggcccttaagctatctccagccttggagaaactctactttaaggtttcatttcatggataagcaaggagcatggtagagtgaatgaaaaaaaaaaaaagccctaagttttgacttcttggtctggtttctgtgcagggcagctgaagagaaaaacaaaagcttcccctttacaaccctctcaagctcagtccaatccctaaagcaggaacgacaccagcattaaggggtcaggggcagggaccagccatttctgggcctatgaaatgcagaaatctatgataaatgcttgtgagttaaaagttgtgtacttcctcctgcattgatcattttcaagaaggaagttacactcagtcatttctcctttggtaaacaggatcgggtgtcaggacgaggtgtcagttcaaaaaacctatgctgcattctgtgcaatctctgtctacctatgttgtctacaactgcagttccttacagatttctgaagccttgccttctggtcttcgggggccctctagtctctgcctgtggccttgtttacctgagatattgttctcctctctcagaaacaggactctgatcacattggcagcagtgagcagtaatttggggttgcacatctgcagcagtaagagagtataattcgccttggtccactgggtgctgttcgcaaaccaatacaagatctctttcatcttctgttctactgttttatccaacatttggttcaaggaggacttcacaactttcccctctttcttgctgaggtcgatccgggacctgttatagatgaaatcctttccctgtgtggtctgaaggatattttggaaatagtgtaacaaatataagctatttaactgcttcagaatgccaactagaaacctcctctgtgatatgtcattgatcctgcagaaccactctttggtagagaagatcttccaggctaagacacgcgtctcacacttccggcatagagggatggaatcggttcccttctcacaacgaaaatagggggcattcttgagccttgattccaggttttccatgatcctaagataaccagttcattttagccctgcgcacttgcaacggcaacgccaccaaacactagaggaacggggggaaatgaataaataccccagttgtgccttttctattacaaacgtctcccagagcaaaagtaaatggctgccatggatggaaagcctatctctctcagtaactgccagcagaagtctggctttttgtacagacctccttggaaacatggctttaccgtaaatctcctaaacctggcactgctttatgtggaggcagttgctgtatattctgaaagagctggtcatctcatttctagaacaacaagaatactgttagtcaaatttaagtaatatgtggactattactggtgttgcgctttaattattgttgttatatatggcttctgaatattcatgaatataaaataagatgcaaacttcttatgtttatatctgttcagttacaaagtggctatcccaatgatgctaaatatgtttatattcattttcttaagtcatcatcaaagtaaaaccagaaatgtttaatgtaaatttaagttatttaactgcttcacaatactaaccagaaatctcactgtagtcaaagtgcccaggcaaaacatattgggcagctcacagaaagagtttcaaagtcatgctgagataattctcctacttcaggtaagactcggttcaaacattgactctggtacttaggagctatatggtcttgagcaagcaacctgtcctctctgagcctcagtgtctccatcctagttatgaggatggagaagataaaggtgggtaataaaaatgataactaccttctaggattgcattaaatatatgagatcagttgttgctgctattgttactaagtattattaccctagataaaatcaaaaggtttacaatattgtgtgcctttctaatgcccatgttgaaagatcaggcacaaccagagaaaggtaatggagtccatcgctggggttttgttggcaatggcagtcacatactagggtcagaatggggaataggaatcaggttaagaatgagatcagttctcacagctcaacctcttctgtctgaagaggaatctggagaaaaggcatgagtagattaatatttaattaatcgggaaggccagacaaaggagggtggcaaagagaagggaggcccgaagcagactctttggatctgtaaggcgggcacattaccctaagaagtgctgcaagttaaaagtagctcttttttttttttcgtaattaacttgtttatttataattgacagattataaatagcttgtttttaaagatttaaataaattaggattttatctatgaggctgacattcttcaaggaagcatttttttttttttttttttttttttggaggcagagtcttgctctatcccccaggctggagggcagtggtggcatctcggctcactgcaacctctgcttcccgggttaaagtgattctcctgcctcagcctcccgagtagctgggattacaggcatgggccaccatgcccagctgagttttatatttttagtagagacgaggttttgccatgttggccaggctggtcttaaactcctgacctcaagtgatccgcccgcctcagcctcccaaagtgctgggattacagcgtgagccaccaccccaggccaaggaagcagttttaatcacccaactcagtctttatttcacatttcagggctacaaacttgggagtcagagagagagactaggtttcagacatgagtcgtatcccctctccctcaacactgcacacacacggttctcctcaaacacctgtggaccatagtatgttgttgcccctcggcacctccttttctaaacagcttctttgagaagatgacaatgggctgcctcctgagaatagagggacaaggggtgctccagagcaagtgagtgcgagagggcagcgcctcactcccttcctccctgcctcctgctggcctgcacctttcagaggttgggccatacacccgactttggggggaagttgaagccatttgggatctgatgttacagttaaaaatgtggccttaggccaggcgcagtggctcatgcctgtaatcccagcactttgggaggctgaggcaggcggatcacgaggtcaggagatcgagaccatcctggctaacacggtgaaaccccgtctctacta

SEQ ID NO: 1243846 - DNA, 4001 bp, Homo sapiens
tcgtatcacaattgcccttctttttagcaagtgtatgaactcacagtgcttttctatgaataaaccatggaccacatgaaagatcatttttcttaaagaaaaaaaattccctaaacccagaggggaccagcaaatacttaacaggagattagagatttcctgtgagtgcatatggtgcggggtgacctgattctgtgaagcaaatgttattgtcctccttaaattcatgtgttgaattctaattctatgtgatggtatttggaggtggggccttggcaggtgattcagttcatgaaggcagggacctcatgaatggaattggtgccccttcaaagggactgcagagagctccctcatcccttctgtcatgtaaagacacagtaaaaaagatggctgtctatgaaccaggaagtcagccccacggaatctgctgacaatttgaccttggattttaccatctccagaactgtgagaaatcaattttctacgctacctagtctatggcattctgttttgacacccagattagctaaagtagcagcatatcaacttgcacacataattcttggaaactctgatgccaaatccttgatggcaaaaggtgattgatctgccggagacatgagcctacatcatccctctttccacaataaaccagagagtcaaaacagtcaagagtaggtcaaggtcttctaaaagccatacctgaaaggtttccaataacagatgactcgatggtaattcagccacacaaacaaccacaacaaaagacacaactatcagagattttcaggatagcctcaaaaacaccatctaacattagggagttcaaaaaggcatgaagtttcagaaatcaaactttattgtaatctcgtttcatcaacttgtaattctaacactattaataaatggtagggcaggtggtggcatggagagcctggggcacaacggctgtcgttaaaagctttgtttgctttaccctttggagccacctcctggtcccctcacccactgcccgcctgttaagggcctgtcccgggcagcacattaggggcaaacagcctggatgcccagctgtggacccgcatccatgcctggaggaggaggttgcctctgggagcaggcgtagctgctggaactcttcttcccagccttcttttaatgctctccggcacctcctgcacacagataaaccaggatcaggagaataaacggacctgcagcagcaggactgtggttctagtgaatgagagaagcctctctccagcgaggtacaggaggccaggccaaatgccctgctctctgcctgcatgtttgccaccgtgcccaggactaggggcagcatgggagctgctggctggggctgtgctggtcaccccctccctcccacttctctctccagccacgctttcagttccagggttagggctagtggctacagtacgtgccgtgatttcaggcagctcctcgttggtctggtccttggctggagctccctccagctccagtgctctctctggaggggcctcttcccatgctggctctggctccgccgctggtgctggcagtgctcttacttctgcacatggaccaggagctgagaaaggagaaagggtcaccagcctcagtcactttccactggaatttccaaacacagaaacgacctcactgaatttaagggaattccagcccaaaatcaccgcccccgcaaagtcttccaggctgcaggccacctcaccaagtgtctgtgcctcaatgagctcctgaatctcctggacaaggacagtgtgcagctgcagccccaatgggatctctggtgtggcctggcctgctagggcctgccccaggctgtcctgtggtacctggatgcgccttattacaacgggcgacaggcgtctggggtgagggatgagccttcttcggcatcgtcggaaaaggctctcactccctccattcctgaagcagcaacctctcgaagtggggaagcaacacgagaacatcttgctctcttgagcgactcccaccaagtgagctgtttacggcgctgactctaggatatgggtgcctggttaccagagttctaagttctgttcgtgtggtcatcatccaggaagtgaggtcgcttctttacggttctgtcccctagtccccttccttccataagacctactcaggactccactgggctgctgactactcaccctcccctcaggtcatctcctgacccgtacacagttatgtccacccagggtctgcttggacacctgtgcctgatgttcaccaggggccagatgtcgtcctcaggcctgatgtccacctggggcctgatgtctgccttggcctatgtccctcttggggccttgtgttcacctggggactgtatccagctggggcctgatggcctactgggtcttgttgttcacctaaggccttgtgtccacctggggactggtgatcacctggggcctgggtgtccacctgaggccagaggtgcacctaaggcctgagttttcacctgggcctgatgatcacctggggacttgggtctaatgtctacctggagccttgggtctaatgtccacccggagcctacgtatctacctaaggcatgatgtctacctgcggcctgatgtcctcatgagtctggtgttcaacatgggcctgctgtccacctagggccttggtgtccatctggggcctggttgtcaacttggggcctggtatacactttgagtccagggtccacctggggactgacgtctgcctggaggactgacgtcctcctgagtgaggtgggaggatctctggagctcaagaggttgagaccacagtgagctgtgattgtgccactgccctccagtctgggtgacagagtgagaccctgtctcaaacaaataaacaaaaaagccacacaaattatatagctatacaaaaatattttgtttctttttaaccttattctatgagcttttttcattatttatttattttacttttaaaccgtttgttgttaaaaaacaagacacaaccagacactttcgcctaaggctaagcagggtcaggatcatcaatttcactgtcctctacctccacatcttgtcccaccggaaggtcttcaggggcagtaacaggcatggagctgtcatctccttgataagaatgccttcttctggaaacctcctgaagaaactgcctgaggctgcttcacagttaccttaaaaaaaagtagtaagcatatactctaaaataacaataaaaaatataggatattaaatacataaaacaataacatcagcatctattattttcatcaagcattatgcactgttgataatcgtatgttcacacccacatcaccacaaacatgtaagctctgtggtgtccaatgaatctgcctttctttacctacaactgtcttggtaaattcttttaccacccatcccactgtcccagagagtcgctgctcccctacgacactgagtaaggaggagatacagctgacaccacctggaaatattccctgaggccaagctcaggccacagattatggtgaagcctccaacttccacactgtaagccaccaggggcctggtgacccctgtgacgaggccacagggagcatctatggatcaggcacttacagaggccccagggtataccccagcacactggaggcccctccccacacccacaaccccaggcatgtatacaggatccacactcctgcccacaaacaccaggtaatgcatgaggggaagggaggctgccttgagactaagcactgcctcactacctaaaagcactctgtcatcatgagggtgaaccagagattgcctggactggccgtttaatccatcactttggcccttgagttactaacattgttgcaactgtccaaagttactaactttgggttttctgcccacctaactgccggaagctaagatggcaacatcagtatcagtcaaataaagcaacacgcgttaacttagtgaccacta

SEQ ID NO: 1243847 - DNA, 4001 bp, Homo sapiens
aaccatggatcacatgaaagagcatttttcttaaagaaaacaaaaattgtctaaatttttgtttagacaattttgtttagacaatccccagaggggaccagcaaatacttaatagaagattatagatttcctgtgagtgcatatggctcggggtgacctgattctataaagcaaatgttattgtcctcctcaaattcatgcgttggattctatgtgatggtatttgggggtggggccttggaaggtgattcggttcatgaaggcagggacctcatgaatggaattggtgtccctatcaaagggactgcagagagctccctcaccccttctgtcatgtaaagacacagtaaaaagatggctgtctatgaaccaggaagccagccctctgcagacacggaatctgctgaccatttgacctcggattttaccatctccagaactgtgagaaatcaattttctatgctacctagtctatggcattctgttttgacacccagattagctaaagtaccagcatgtcaatttgcacacataattcttggaaactctgatgccaaatccttgatggcaaaaggtgattgatctgccggagacatgagcctacatcatccctctttccacaataaaccagagagtcaaaacaggcaagagtgggtcaaggtcttctaaaagccatacctgaaaggtttccaataacagatgactcgatggtaattcagccacacaaacaaccacaacaaaagacacaactatccgagattttcaggatagcctcaaaaacaccatctaacattagggagttcaaaaaggtgagaagtttcagaaatcaaactttatttatatttcatttcataaacttgtaattctaacactattaataaatgctagggcaggtggtggcatggagagcctggagcacaacagctgtctttaaaagctttccttgctgtaccctttggagccacctcctggtcccctcaacccctgcccacctgttaagagcccgttcggggcagcacattaggggcaaacagcctggatgcccagttgcagacacacttccatgcctggaggagaagattgcgtctgagagcaggaggagctgctggaactcttcttcccagccttgttttaatgctcttgagcatcaccttcacagagatataccccaccagaattagcacaataaacaggccctgcagcagcagggctgtggttccggcgaatgagagaagcctctctccagcgaggtacaggagtccagtctgaatgccctggtctccgcctccatgtttgccaccatgcccaggactaggggcagcatgggatctgctggctggggctgtgcttgtcaccccctccctcccacttctctctccagccacgttttcagctccagcattaaggccagtggctacagtaggtgccatgatttcaggcagctcctggctgggctggtccttggctggagctccctccacctccagcgctctctctggagggggctcttcccatgctggctttggctcgacagccggtgccgcaagtgctgctatgtctgcgtacggaccaggagctgaaaaaggagaaagggtcaccagcatcagtcactttccactggaatttccaaacacagagacaacctcactgaattcaaaggcattccagcccaaaagcaccgcccccgcaaagtcttccaggctgcagccacctcaccatgtgtctgtgcctccatgggctcccgaatctcctcctggacaaggacaatgtgcagaggcagccccgatgggatctctggtgtggcctggccagctagggcctgccccgggctgtcctgtggtacctgggtgcgccttcttacaaagggccacaggcgtctggggtgagggatgagccttcttcggcattgtcggaaaaggctctcactccctccattcctgaagcagcaacctctcgaagtggggaagcaacaggagaacatcttgctctcttgagcgtctcccacaaagtgagctggttacggcgctgactctaggatatgggtgcctggttaccagagttctaagttctcttcgtgtgtgtcatcatcgaggaagtgaggtcgcttctttacggttctgtcccctaggccccttccttccataagcctactcaggactccactgggttactgactactcaccctcccctcaggtcatctcctgacccgtacacagttatgtccacccaggctctgcttggacacctgtgcctgatgttcaccaggggccagatgtcgtcctcaggcctgatgtccacctggggcctgatgtctgccttggcctatgtccctcttggggccttgtgttcacctggggactgtatccagctggggcctgatggcctactgggtcttgttgttcacctaaggccttgtgtccacctggggactggtgatcacctggggcctgggtgtccacctgaggccggaggtgcacctaaggcctgagttttcacctgggcctgatgatcacctggggactgggtgtgtgccttgggtcttttcccttttcctgaacagggcttgcagtttccaaaccagacacaatctcccagttggagaaagaaaaaggatcctagatgatagtgagacaaatttcaggaaactccatccaaataagtaaatgagaatgaggacaggattcattgtaagtaacattctcaggtggtgttccaaagttatcttttgcctgggtacagtggctcacacctgtaatcccagctctttgggagcccaaggtgggaggatcactagaggctaacagtttgagaccagcttgggcaatggagtgagacccccattctgaaaaaaaaaaatcaaaaaatttaacaggcatggtggcatgtgcctgcagtcccagctactcaggaggctgaggtgggaggatcgcttgaactcaggagttgaaggctgcagtgggtgaggatcacaacactgaattccagctgaggtgacagaatgagaccctgtctctctaaaaaacaagcaagcaaacaaaccaaaaaccacaaacaaaccagacccctcttagcagaatacttccatgaggtaataaaaggtatgtaccaaatgcctacaacaaacatatgtcatgatgaaatgttaaatgcttcccatggaattaggttcaggacaaggttccatccaccatcgcatttgaatcccacgttgcacagtgtaaaggggcctgcccaaggtcataacattgcacactgggtaagtcaagagaacccagtacagcactttagatccttcattatagttttgttctaaaactgctcctgttatcttttggacatgagtctcttaagtattatcatttgaattcacgtatactagttcattttcacactgctctaaagaatacctgagactgggtgatatataagcaaaagaggtttaattggctcacagttctgcatggctgcgaaggcctcaggaaacttacaatcatgatggaaggcaaaggggaagcaggcaatttcttcacaaggcagcaggagagaggggagagcaggggaaactgccacttatgaatccatcagacctcatgaaaactcacttactatcatgagaagagcatggggcaaaccacccccatgatccaatcacctcccaccaggtccctcccttgacacatggggattaaaattcaagatgagatttgggtggggacacagagccaaaccatatcattctgacactggtccctcccaaatctcatgcccttttcacatttcaaaaccaattatgccttcccaacagtcccccaaagtcttaactcattccagcattaacccaaaagtccaagttcaaagtctcatctgagacaaggcaagtcccttccacttacgagcctgtaaaatcaaaagcaagttagtgacttccaagatgcaatgcgggtacaggtacaggcattgggtaaatgttcccattccaaacgggagaaattggccaaaac

SEQ ID NO: 1243848 - DNA, 4001 bp, Homo sapiens
gcacagagatacacaccaagacattcatacaacacagacacacacgcacaaagatacacacaacacacaaaacacacaaacacacagtcatatcacaaacacggagacacatatgcctacacatgcacagacacgcatgctaacgccttccaatatggcagccaaggggctcttgctgtggtcagggaagagggggagggagcctggccatccaccgtggggaggacatgcagcgcgcatcgtgaggactccagacccctgagggtggtagcagcaggagggcaacagaggatcctagagttgctgcacctgggggcagatccagttgttacagggcctgagcattctacagctggtggggaaaccctctttgtgccctgcacaagtggtaagcacttagaagacatccctgaaggagggagagaaagggagggagagggagggaaagggagggggagggagggcagagcctaccaggaagcctggaggaagcctgcgacctgggacccaggtcagctccctgacccaggccagtgggtgaactgacaagtgacagagtctggatttgaacccagggactcggctgcccatgttcttaacctgcgtcacctatctgcctctctcatactgactcaatgtagctcaaacaagtgtaaagcaagagcttccagcacaaacagtgggcttcgggctcaggcctccagaaacactgcctggggtgggagcctgggcgctgggccagcttccacccagatggggagaagggaagggctgcctcatctgcagaaacgagtctcttctgttctcttctccccacccctatctacaccaaggtgcattcatggatcgcaaggtttcttactaattttttgtttcattcactggtgtcttttattccttgttctaaattactttttttaatttttacttttatagagacagtctcactgacacccaggctggagtgcagtggcacgatcatggctcactgcagcctcaaactcctgggctcacacagacacacactcaatacagacacacacctggactcaaggggccctcctgcctcagcctccagagtagctgggactacaggtgcacaccaatgcccagctaatttatttttatttttatttttgtagaaacggggtcttgctatgttgcctaggctggtcttgagttctcggcctcaaacaatcctcctgcctcagcctccttaagtggtgggattacaagcatgattaattatttttaaataagtgacttgattattattgttttgtaaaaatcctcttagtcacctttgtccctataggtttctataggtgcttaataattttttaaaggtatttaccagttctggctaaacattcctttggtcctgagctctgtggagaggtaatgcatctgtgggaacatcatcaccctcatccccaacccatcacccccaggggatgggggggaacgggggtatattttgtgtgtgtgtgttttgcttaagtagagtggtcagccctgagtgtacaatagaatcacctggctgtcattatagacatacctgagctcaagccctctgcagacaaagtaaatcagaatcctaggaatgggacgagcttgttggcaagggttgggcatcagtacgttttacaaagtcctgaggggattgggtgaccaggattgggatccacttaagggaagtaatgctggggactctggggaccctttaatggcaggattattctttgatgaaggacctgaccttctcctggaagttgagtgtgagccttttcactttcaccctcgacttccctctctggggacacccagtgttctggcccagactgttacctgagaagtttctgtgattccccatccttcctgcactatcttggctgttcccctgcccggcgtttatattttgtctccagctgtcccctgtgctctcaatcccacttctctttggctctctctttgctgcagctaaccatcctcttgcccctgccccaaagtgacccatgagccagaagtcaggagtgaaggggggcactgtgacatcagaagttgccatgcaccccctcctgaatcttctgccctgctctcttcctcctctgcaggctcagcggtcaccagcaatgcagtcctcaaacacggacattagagtgattattcccacccccaagagtgaacacctactatgtgctggaccctagaccaaacacatacacacataaagatacacaacacacacacatgcacacacacacaccccaacatgcatgacctcatttgagatctctgatcatttcaacaagcagttactctggcccagacgcagccaactacagagatagacaagacctgtggtctctttccttagtgccagaatctcctagaaggtctattaagacagattgctgggtcccactcccagggtctctgattcagtatatgtggggtggggcccaagaacttgcctttctaacaagctctcagccttcttctgaaataaaatcctctttagataagctggagagagaatggctgtcactaacaggctgttgagaattagcctccttctccccaactccattgaccggccagtgcttggcaatggagagagcgagcagcttctaacctcccctgtggccccaaccgtgaaaaagtccccaagatgccaggaggacacagtgcagagcaggctgtaaagtctggcagtttaattgcagtcatcaactcggggcagcaccaggagacaggctggacttgctctccctgtgttatcatcatgccctgttgacaatcctttgaaatgtctctccctgtgtctgttccttctgctcctctccactcccccaccacctctccaatcccagagttcaacctgtccagccaggaatgtaaagtcccctcacttctctgcaaccacagcaagcacttgagcttcctccaaatcatactgactcaatcatatatttcccacgatctccttttcttcatagttctctataatcttcagagagaggtgcattctagaaaaaggccaggcagaaaacacctgtgtttcagcctcagttttatcatttagttgtaagaaaacatacatcaagtggatccccaacaaaaatctacctctcctcactgcccacgagtcagtacctagagcctcaggcagagccctcattgctgcggttctcaaaaagcctttctctatcctcccctctctccaggctctagttcctcttcaactccagccctaaactccctgaattcattctcgctctggagctcccgtgtcagcggagccatgccttcaacctttccatgggcccctattttgtggctcagtgtccctgagccctgagtatctccattcagttcttcaaacaagttctagacaagggaaggatctgagcaaagtcacggaggtgcgggacagcctgggcgtctggaaatgctacgggaaatgcacaggtgagggggatgggggggagttggggtgggccagtctgacaaggttctgctctctctcccagcaagtctggggaagacagtggacatctttgagtgcacaggccaggtgtgaagtgtagcggatgagcaggggacctcccctgtggttccacaagaacctccaaagactcaccccagaagtcttctgcagcttgaagtgactctctgagctgcttatacctagcgctgatgtgcaatgggccagggcccggcagggagccagaccctcggactcgagaaagccatttgagagtgacatcagcccaccacctgctagtgcgcactcacagtgtttccggaagccatgatgctaatcatgtctgtttctgtgttgtccatggcaagactccaagcccagaaaagaaaatctgtagcccaagttattttcctcccacagggcttgcctggcctttgattgttggctttggggaggtgcatttctccctcctctgtgggcagcaaattccccgtgagtcaacagatcctgtatc

SEQ ID NO: 1243849 - DNA, 4001 bp, Homo sapiens
tattgtaaaaactccaaacttcacactatttgagagtgctcaaagtgaaagcctcctgtaatctttacacccagagggatctacagttaattatttgttatatattcccccaaacttttttctacacaatattttaacgaaaatggtacagttatacacactttttgaatataatttagtagactttataagtacaaagtcatggcaatctagtgggagaaaaacagcttttttatgtcaatattttaaaactttttcttgaccatttatcagtttgtcttaaaataaaaatttatctcaaatttgagttttacattcttctttttttctgtatgccttgaagacaccatgagttttacattcctaaggatcttcgtattccttctgcccagaggcagccgtcaccctataggtgctcaaatgtttgatggatgaacgttttttaaaaattcagtgtgcagtccaagatgaaaaaccaaaaagtgaagcacacagaaaaccaaatatgtatcttctgtcggggacgactcatcctaagagaatttcttccgcaagaagctcaaaggaacatgttcaagaaaagaagtaattctcaggttatgcaattgctaggttattcttgtcggttttttccccctagtgttttgattgttctttttaattcgtaaaattgacactgaaatataatatcagggcgttaaaatatctctctgtagcacaactgttccccgaggcaggaatccagatcgcatttggagaaaagaaggcagccctttaacagcccagttaaaagctctttcccaaatcgcggacactcgagatgctcctcgggccatctaaaagactgcggagcagccaggagggcgagcggcagggagcattagctggctgagcacataaaagcctccctacgtaggtatccccgccgccgcgcgaggccggagcatctcttcgcgcgcgcttctctcccggatcaataacctccgccccctgctccctccctggcagtgcctggaacaatgacgggattttgcttcccagtgagttcaaaactattcatgcttccttcaacgcttctacctttcccttccacccaccctcaaaaacacgtgtgcaaacacaaaaaaaaaggggattcgggtaagagaaagccgtgggatttatgttcttttcactaagaaaggcccccacaccctttgcgcgccagcaagagacaacgtccccgagcacgatgcttatggccgggaaagactctttgtgtcccaagacggctgcgcgcgccctcaagctccggacgaagccccctttccattcccaggccacacagccctagaagcaccgccccgccccgccgcccttagaattaaggaataaccccagtgctaacgggggagccgcgtcggctccgtaacgtggaaggctcagagctgaaaggcgcccaaggcctgcacgcgggctgcgagcccgactcctgccgagggggtccgcgtggcaacggctcccgcgccccccggcccgccgcactcacaaggtgtctagcaggagcttggcggcaccctcggaggtaagcttctgccgcttctggaacgtctcccagcgctcccgctgctcgcccaggtccaggttggacgccgaggacgtcggggtcgcgggagtcggcggcggcggcggcggtggcgggagcaacgccagctcaggcggcggcggctcccccgggccctcctcctgggcccgcggcgacgagcgcctcagccgcggcttctccgacggcggcttctccaccgcctggctcttgctcccggcctggctagcggagcgccgtgtgcgggtggcgctgggtgccaaggcagcggccgcggaggccgcgggggccgcggaggccccggaccgcttctgcccgcgcagcttggcggccgcagagctcctcgatcgccgcatggctcccgcagcctggcgcgcaggcctcgcagcgcggcgcgcccccgccggcctgcgcgcgcccccgccgcccgccagtcttcaggcccagggggcgctgcgcccggctgccccgctccgccagccgcgccccgcagcgcggcgcctgcccgcaggagggagacccggcccgcccggccgctgggacgcacctgcctgttcagtcccgcaggcagaggggctgcgcctgggcctacgctcgcgatacccagaatccactcgcacctgcgaaggcgcccctgccctgtgtgaatccagcgggctcttcgtaccttcccgacctggaggggcctgggttgggcctgaattcgcaggctcatccgagcgggcagcctggggtaacttcgtctccaaaaacgagctaatttgtgtaaacggcctgccacctgctacctcctgtgtaacagcggccgaaaccatagttcttcaccttcgtcttttctgtcacattatagaacagtgtcatgaggataccaatagtcaacagatttggggtttcattttaattaaatgaatgacccgcgcgtcgaatttcattagtatgattttgatgaaggcagcaccaaagtttaaagacaaaaggcacgagaatcgttgatggaacccagatagtcttcttctccttctccttcttcttcttttttcagaccgagtttcgctcttgttgcccaggctggagtgcagtgacgcgatctcgcctcaccgcaacctccgcctcccaggttcaagcgattctcctgcctcagcctcctgagtagctgggattacaggcattcgccaccacacccggctaattttgtatttttagtagagacggggtttcaccatgttggtcaggctggtgccgaatactcccgacctcaggtgatccatccgcctcggcctcccaaagcgctgggattacaggcctgagccaccgggcccagcctatctttcttttttttttttttttttttttcttttttggagtctcactctgtcgccaggctggagtgcagtggcgcgatctcggttcacgcaacctccgcctcaccgttccagcgattctcctgcgtcagcctatctttcttctttattctgattttcttcatggtattgttagtttaatagtttattgaattaaaggcatagtttaactattttgtctttttttttttttttccatacaggatctgacagactggagtgcagtagcgggatctcggctcagtgtagccaagaactcctggcctcaagcgatcctgccgcctgggcctctggagtagctgagtagctggaacaacaggcggcgcccccccccccccccccccgccccagcgaattgttgctattgttgttttgtagataccgggtttccctatgttgcccaggctggtctctaactcctggcctcaagcgatcctcccgcctagttctccccaagtgttgggattacaggcgtgagccaccgagccccaccttgccattttgtcgttgttgttgttggaattatggtttacacacagcaacgtgcaaatatcttagatgtacagcttatgtgaccaccaccacttcagatacagaacattttcagcacaccagagtttccctcaggcaaaagaaaacagaggcgatcactgttcttttaccaccataggttggttttgcttattcttgaacatcattttaaaacggcacgtaggccgggcgcagtggctcatgcctaatcccaacactattgggaggccgaggtgctcagatcgcttgagcccaggagtttgagaccaggaggtggaagctgcggtgagctgtgattacaccaccatattctactctgggtgacagagtgagaccttgtctcaaaaaaaaaaaaaaaaaaaaaaagctgggtgtggggagtggttatccttgaggagaactaactgggaaagagaacaaaggactcttctaagatgctggatatggccaggcacagtggctcatgcctgtaatcccagcactttgggaggcggaggtgggcaggagtttgaaaccagcctggccaa

SEQ ID NO: 1243850 - DNA, 4001 bp, Homo sapiens
ggaataaatgaagagttagaggaatacaagaaagagcttgactgcttctgagttggtgtggaaaggaggaaggcagggacatctttgaggaagaaagatgagttaccaagtcttccaggcagaggggaaaatgtgtgtgaagccacaaacggagattgtttacagcctatttatggaaaacagagttgtctgggagtgggtacagcacagactgttatctgtggtgggagagacagttaagaaaggtagaagacatcaattcacacccattacaatggttattataaacagtgttggcaatcatgtggagaaactggaacccttgtgcactgccgatgggaatgtaaaatgatgcagatgctatggaaaatatatggcagttccctgaaaaattaaaaacagaattatatcgaccaattcctacttctgagtatataccccaaagaactgaaagcagaaactagaacagatatttacacatccatgttcacaaaaacattattcataatgtgacaaaaggtggaagcaatccaactgtctgtccattggcagatgaatggatgaacaaaatgtggtatacacatgcaatggaatattattcattttgaacaaaacaggaaattctgacacatgctacaatgtggatgaacttgaagacattatggtaagtgaaataagtcagtcataaaagaactactactatataattccattcatatcaggtaccctagagcaatggtcctcagcctttttggtgcaggtttcatggaagacaacatttccacaggatgagggtagaaggatggttttgggatgaaacagttccacctcagatcatcaggaagtagctcacctgccactcacctcctgctgtgcagcctggttcctaacaggccacagacaggtacgggtctgcagcccaggggctggggacccctgccctagagcatcaaatacatacaggaagtaaatgatgcttgccaggggctagagggagagaaaatgggagttactgttcagtgggcacaggtttagttttacaaaataaaaaaaaattctcgagacggatcgtggtgatggttgcacaacaatttaaatgtacttaacaccactgaactgtacagtaaaaaaatagttatcataacttaaaattaattaattaaaataaatacataagaaagaaaaacaatgaaaggtacagaggggaaatgaaattatgcaaatctttggccagacaactaggaagctgtggcaacttcactttttcttgggctacagcactttgtaagcttttgagcaagggagaaaatgccattagctcacaatctacctcttccagaaagttctgccagattctgcctgttgcccccagatgtcagacacctccctgcatttcccagggcatgcagtccagcatatctagatgatggcccttatttctgttcaatgtgattgcagtttgttccatcatccctgccctatcaaaattcatctccttgagatgaattaccaatgcctaactcagctcagcaatgagatttattttttcagcaagatccctatgtcaggaggacagaggttgtcttgttcttaccttcttctctttgaggttagattttcctgtatccctcagaggcttcaaacttcctgcctgctctgtcttggggacattaccattctcttctctcatctctatcagtctcagggcttggttttccttggcagatggatggtctaaactcagagaagcccacatcttcgttgacccccattaagatctcagaagcagtgatgagagccctcagtgcaggctgtagggcaggcagaacttctaacaagaagccagtgagagcacagcctccctcccctgatagaaaggtgacttgggcccagagggttagagtgtctgagattccccaccacaatctcttaggtgggggtgaggtgagatagtgacatcacaaccacactgcctggctcagttcctgatgtcagctaatgtgatgccagggctaaagggccagcacaccttctttgtgattctggtctcccaggggcagaaaataggaagcaggctaaagatgccctaggacttagggacaaggcaacagtatgacgaaaggttgacttctgtgcatcactgttcagcttacaaagtgcataatagagaacatttcgaaatacagaaaaatacaattcaaaattcacatatcccatctcacagagaaatgaactagcatattttttccatgttttcctgtgtgtaactatgatgattaatactgagtgtcaacttgactggaatgaaggatgcaaagtattgtccctgggtgtgtctgtgagggtgttggcaaaggagattaacatttgagtcagtggactgggagaggcagaccaaccctcaatctgggtgggcaccatctaatcagctgcctgcatggacagaataaagcaggcagaagaaggtggaaagagcagacctgctgagtcttctggccttcatctttctgccatgctggatgcttcctgcccttgaacatcagactccaagttcttcagcttttagagtcttggacttaaaccactggcttgccaggggctctcaggtcttcagccacagactgaaggctgcactgttggcttccctacttttgaggttttaggacttggactggcttccctgctcctcagcttgccacaggcccattgtgggacttcaccttgtgagtcaatactccttaataaactccccttcatatatacatctatcctattagttctgtccctctagagaaccctgactaacacacgaagcttatctatggcttactttctggctctcatgacccctatcaaatccatcagaaaatcatatttactcttacttaaagtatattttaaaaatatatccagaatatgatcacctccccagctaccactctggtctaagccaccatcatttcctctcatctggattaccaaagttgccttctcattggtttcccacctttgttctcatgcagctagaatgatcttttaaagcctaagtcagatcatgtcccttcatggcataataccctcttactctctcattactcagagttaaagtcaaagtcattggaacagcctcaaaggccctacatgaccaggccttggaatgcctctaatgtcttttccaactcccccatgtccactatgttctcgtcacactggcttccttaagtcctctagcaatgccagccatgctcttgcattagggtctctgcactagctcttccttctatcagcaatttcttcctccgaatatcaacatgcctcactcgactccttcaaatttgtttgaatgttaccttcttgatgaagccagctttggccacactatataaatggtaccagccctggtactcgagagtctccctgaatcttctctatcatttccttttcaatagcactttgacacttaaaaaaattctatataagttacttatgcagcatgttcatggctaacaatgtatctctcctactagaatgagctctgaggggacaggaatatatgccattttgctcactgctatatcctaagtgcctagggccattgtacaaaaattaagcacaaaatgctgaaagcaatgggtgtgtgccattagtctgttaactgttccccagtacctgttcttcatttcttttcaaaatagtctccctgcaacttttagcacagtgcatgcaaataggtccctgcttccccaggtgtgcccctgggactgttttctccagtaaaatgtcagaatgatatgcacaacttccatggcaattccctaaaaggaaatatttgtcttcctcatctttttcctctcttcctgctggttaagaaatggtgtccatcagaagagcagcctttaaagcagagatggagacagtatgttgaggatgactgaggaatctcactagtcagcctaggttcctaagtgacctcatgaaagagaaccatttgatcctagccc

SEQ ID NO: 1243851 - DNA, 4001 bp, Homo sapiens
caagcctggccaattaaaaacacaaaaattagccgggcatggtggcaggcacctgtaatcccagctactcaggaagctgaggcaggagaatcgcttgaacctgggaggcagaggttgcagtgagctgaaatcatgccactgcactccagcctgggtgacaagagcaaagctccgtctcaaaaaaaaaaaaattgaaaatgaaaaataaataatttaaaaacaaattacatcatattcacaaattgtatctaagttccaacttatcaaaagtttcataccatttatcagaattgaaaatttaaattactggaattgaaaaataagtaaagcaacatctttggcttaggcttagagtaattatagtgtgcctatcagttatataaattatttcaaaggtaacccaggtgacggacgttgcagtgagcgtgagctgagtttgcaccactgcactccagcctgggccacagagcaagactgtctcaaaaaaataaataattccaaaggtaaaaaagaagtaaattgggtgactcttgcttatagctacaatctatatttggatcatgtcttttattaaactcacccatgctgcctttttttaaacttctttttggacagctacaaaatgggcttacctaccctacagtcagcaaacataaccaaaccacaagtattaaaaggtctgggaaaaaaaggagtcacaactgccaagcaaagaatacacttcattcatatcacactccttgccaaacaaaacaaacgttcttggaagttgtgtaaaacccattttgttcaatcaaatcatattttaaatatattgtgggtcattaaagaaaactggaaacgtcgacaaattaaaaaggattagaggtgcacgttttctctggcttacacgtgtggatgttttgacaagagccttccctgactctacccgtagctcagtgtgtgctttagaaacaaatctcagtttattctctggcccggccctaccatttccgcaccatttccatggtcatttcacagaggaagaaggaagctgaggcttaagtgaggtgaagtcactgacctaggttcttagtggacagtgacagctgggcctgaacactgcacaaattattaataccatgcattccactaagctgcagcctgaccactgtggagaggctcatggaatttaatgtgccttttctatcttattttgactcatcttaaaatattaaaaacaaataaaagtagccgtgcaatgatcagaaaagctgttcacatttacttatgtcgttctcttgaacacttaaaaataattaactcagaaacacagggtagcatcctacatgcggcggtgctgggcttgggcctctccaagcggcctatgactttctgcaaaccaaccagcgccctggttctgtccccgcaaatccagctgattgttctgagactcttttctgggacggaattgaaaactccagcggtgccgttcctggcagtcccttcctcggcccgccgaggcccaggcccaggccgcgctcctaccttgtccaggacacagatttcctctcccagtcgcaaacccttgggtcagactcttggaccacgtcagaccgatcaaaccggctgatcaaactttacttagaactttcccaagtcgtcccggcctggatcgcgctctgcctgccggggacaccacagcgggcagcgccgggaccccaggggcgcgcgccccccaggcccggagaacgggcccagggcctgagggcgacgccccttcccgaacgggcccgcaagggcggggcggcagccaccggcgcaaaattccactcaagaacctggtgggaggggcgggggaaggaaattcagaaaaaaacgagaacctggcaccaccacacgcaagctttccgctcggccgctgccgccaacgccgccgccaccgccgcccctgccaaacggtttcaaatccttgcgggccgctgggtcgccgccgcccagcagcccgggggcggggactttcgcgctcgcatttccccgccccctactccacccctctagcctgcggtgcggttgccatggcgacgttcccggcggcggcgaccaccggcgccccaggctgggggcggagacttccgcgcgggcatttctccacccacaggtggcggcgtgcgcgcggccccgttgccatggcgacgctcctgctggcccagcaaccgccagactcgcaccccagcttgtgggccccttggcgggtccccagtcgaagcttccgggataacccgaccacagtttgaatgctgctgccctcccgcatcccgcgcagagtcgcttatgatcaccttaggggccgtggcgaaaaaataagggcacagaaaatggggcggctggaggatgttcacaaaaggggtgatccgttatgtggacagacatcagagttgaatgggtctcaagtgaaaatttcctcactctctgatatatcaaaacccaagtcaaattcttcaaaaggttctttttaaaacctatctcactggaagtaaacaccaacagctagctcttccttgtctcaaagacaaatcatgctaaggaaaataaagggtacagaatgcttttaagaatgtttagttttcaaaagcatacttgaacatgtttataactagggaatgatatataatccagataattagtactgagaatcaaggatgcaaaatcaagcatgcaattgcaggaatttaaccagtcagttaatacattcaagatagataaactggccgggcggggtggctcacgtctgtaatcccagtactttgggaggccaaggtgggcggatcaggaggtcaggagatcgagaccatccgggctaacacggtgaaaccctgtctctcctaaaaatacaaaaaattagccaggcgtggtggcacacggctgtaatcccagttactcgggaggctgaggcaggagaattgcttgaacccgggaagcaaaggttgcagtgagccgagattgcgctactgcactctagcctgggcgacagagcgagactcaaaaaaaaaaaaaaagataaactaccctactccagcctcaggaggaggaggacattggtcaaaggaaacaaaatttaagttagattggaggaataagtctaagcgatctattttacaacgtggtgaccatagtaaatgataatgtattgtgttcttgaaaattgctaaaagagtacatcttaagtgttctcatcacaaaattaataagtatgtgaagcaacgcttatgttaattagcttgacttagtcatttcacaatgttgtgcataataaatatatgcaatttttagaatcataaactgcattgctgaaagaatatgaaatgaatttgacaaatggtgtctaaataaacatgaaaagaaaaatagaagataaataaatagaagataaatcaaagaaaaaatgtaacaagctcaagctcatctcagaggaaataactatagcagaaaaatataactgaaaatgaaaaatgtctttaaatatttcctctacttaggtgaaaataagatgagtagatctcccttcccgcttttaagaacaagctgattgtcatttttttcatttatatatatcattttcatttatatatttttcattcatatatacacacacatgcaaataaaaatattaagatatgcatagagagttttattatttatgttatatgtatataacatgaaagggataccagcttgagcctgagctgtgttcaccttagaactcaagcctacatgtcatgtttagacgactggtaggcaagtttcacttggaaactccttacctgagaaccaaggaacctcctagaaattaagtcatcctggctgagcatggtggctcatgcctgtaatcccagcacttcgggaggctgaggcaggtggatcatgaggtcaggagttcaagaccagcctggccaatatggtgaaaccccgtctctactaaaaatacaaaaattagcaggtgtggtggcagacgcctgtga

SEQ ID NO: 1243852 - DNA, 4001 bp, Homo sapiens
aaaaatacaaaaattagccaagcatggtagcatgcatctgtagtcccagctactcgggagactgaggtgggaggatcacttgagcccaagaggtcaaggctgcaatgagccaagatcacaccactgcactccagcctgagcaataaagtgagaccctgtctcaaaaaacctgaaaatggaacgggtgcagtggctcacacctgtaatcccagcactttgggaggccgaggcgggagggtcacctgaggtcaggagttcgagacaagcctggccaattaaaaacacaaaaattagccgggcatggtggcaggcacctgtaatcccagctactcaggaagctgaggcaggagaatcgcttgaacctgggaggcagaggttgcagtgagctgaaatcatgccactgcactccagcctgggtgacaagagcaaagctccgtctcaaaaaaaaaaaaattgaaaatgaaaaataaataatttaaaaacaaattacatcatattcacaaattgtatctaagttccaacttatcaaaagtttcataccatttatcagaattgaaaatttaaattactggaattgaaaaataagtaaagcaacatctttggcttaggcttagagtaattatagtgtgcctatcagttatataaattatttcaaaggtaacccaggtgacggacgttgcagtgagcgtgagctgagtttgcaccactgcactccagcctgggccacagagcaagactgtctcaaaaaaataaataattccaaaggtaaaaaagaagtaaattgggtgactcttgcttatagctacaatctatatttggatcatgtcttttattaaactcacccatgctgcctttttttaaacttctttttggacagctacaaaatgggcttacctaccctacagtcagcaaacataaccaaaccacaagtattaaaaggtctgggaaaaaaaggagtcacaactgccaagcaaagaatacacttcattcatatcacactccttgccaaacaaaacaaacgttcttggaagttgtgtaaaacccattttgttcaatcaaatcatattttaaatatattgtgggtcattaaagaaaactggaaacgtcgacaaattaaaaaggattagaggtgcacgttttctctggcttacacgtgtggatgttttgacaagagccttccctgactctacccgtagctcagtgtgtgctttagaaacaaatctcagtttattctctggcccggccctaccatttccgcaccatttccatggtcatttcacagaggaagaaggaagctgaggcttaagtgaggtgaagtcactgacctaggttcttagtggacagtgacagctgggcctgaacactgcacaaattattaataccatgcattccactaagctgcagcctgaccactgtggagaggctcatggaatttaatgtgccttttctatcttattttgactcatcttaaaatattaaaaacaaataaaagtagccgtgcaatgatcagaaaagctgttcacatttacttatgtcgttctcttgaacacttaaaaataattaactcagaaacacagggtagcatcctacatgcggcggtgctgggcttgggcctctccaagcggcctatgactttctgcaaaccaaccagcgccctggttctgtccccgcaaatccagctgattgttctgagactcttttctgggacggaattgaaaactccagcggtgccgttcctggcagtcccttcctcggcccgccgaggcccaggcccaggccgcgctcctaccttgtccaggacacagatttcctctcccagtcgcaaacccttgggtcagactcttggaccacgtcagaccgatcaaaccggctgatcaaactttacttagaactttcccaagtcgtcccggcctggatcgcgctctgcctgccggggacaccacagcgggcagcgccgggaccccaggggcgcgcgccccccaggcccggagaacgggcccagggcctgagggcgacgccccttcccgaacgggcccgcaagggcggggcggcagccaccggcgcaaaattccactcaagaacctggtgggaggggcgggggaaggaaattcagaaaaaaacgagaacctggcaccaccacacgcaagctttccgctcggccgctgccgccaacgccgccgccaccgccgcccctgccaaacggtttcaaatccttgcgggccgctgggtcgccgccgcccagcagcccgggggcggggactttcgcgctcgcatttccccgccccctactccacccctctagcctgcggtgcggttgccatggcgacgttcccggcggcggcgaccaccggcgccccaggctgggggcggagacttccgcgcgggcatttctccacccacaggtggcggcgtgcgcgcggccccgttgccatggcgacgctcctgctggcccagcaaccgccagactcgcaccccagcttgtgggccccttggcgggtccccagtcgaagcttccgggataacccgaccacagtttgaatgctgctgccctcccgcatcccgcgcagagtcgcttatgatcaccttaggggccgtggcgaaaaaataagggcacagaaaatggggcggctggaggatgttcacaaaaggggtgatccgttatgtggacagacatcagagttgaatgggtctcaagtgaaaatttcctcactctctgatatatcaaaacccaagtcaaattcttcaaaaggttctttttaaaacctatctcactggaagtaaacaccaacagctagctcttccttgtctcaaagacaaatcatgctaaggaaaataaagggtacagaatgcttttaagaatgtttagttttcaaaagcatacttgaacatgtttataactagggaatgatatataatccagataattagtactgagaatcaaggatgcaaaatcaagcatgcaattgcaggaatttaaccagtcagttaatacattcaagatagataaactggccgggcggggtggctcacgtctgtaatcccagtactttgggaggccaaggtgggcggatcaggaggtcaggagatcgagaccatccgggctaacacggtgaaaccctgtctctcctaaaaatacaaaaaattagccaggcgtggtggcacacggctgtaatcccagttactcgggaggctgaggcaggagaattgcttgaacccgggaagcaaaggttgcagtgagccgagattgcgctactgcactctagcctgggcgacagagcgagactcaaaaaaaaaaaaaaagataaactaccctactccagcctcaggaggaggaggacattggtcaaaggaaacaaaatttaagttagattggaggaataagtctaagcgatctattttacaacgtggtgaccatagtaaatgataatgtattgtgttcttgaaaattgctaaaagagtacatcttaagtgttctcatcacaaaattaataagtatgtgaagcaacgcttatgttaattagcttgacttagtcatttcacaatgttgtgcataataaatatatgcaatttttagaatcataaactgcattgctgaaagaatatgaaatgaatttgacaaatggtgtctaaataaacatgaaaagaaaaatagaagataaataaatagaagataaatcaaagaaaaaatgtaacaagctcaagctcatctcagaggaaataactatagcagaaaaatataactgaaaatgaaaaatgtctttaaatatttcctctacttaggtgaaaataagatgagtagatctcccttcccgcttttaagaacaagctgattgtcatttttttcatttatatatatcattttcatttatatatttttcattcatatatacacacacatgcaaataaaaatattaagatatgcatagagagttttattatttatgttatatgtatataacatgaaagggataccagcttgagcctgagctgtgttcacctta

SEQ ID NO: 1243853 - DNA, 4001 bp, Homo sapiens
acctctactaaaaacttcaaaaaattagccgggcgtggtggcgagcgcctgtaatcccaactacttgggaggctgaagcaggggaattacttgaacctggtaggcggagtttacagtgagccaagatcgtgacactgcactccagcctgggcaacatagcgagactccatctcaaaaaaaaaaaaaaaaaaaaaacgcgggagtggttttgtgaggtccagacaagatgctggtctcaaggcctcaaggctgcaccgggcaaacactccctgggtaatgtgttattccagcaggggacgggggttctgacgatcgatcgaggggattagcttggggatgctggcttccttactttggaacttctcagagcaaaccctgccggcccccagcccgtccccacatggcacctctttctgaacgagtctttctgatctttctgaacgggtctcagctcgtgcatgtgcccctgccaaaaaccctgcaacagcttcctaggcacagagaataaagtctacacatccaactcctgcaagatctggccctgtactctctgtgacctcgccagctcccctgctgtgcccctttgttgtggctttagccaacacagcctccctggttctcctcaaactcagccagcttggccccggccagtcccctgcctctaggtctcaggacactccctccctgcactcagaggccttccttgagcacccatcactcttcactccccatccggctcggactcccttcctgtggccgcacacagttggtttatgaattgtgtggctcctgagcaaccccagcacctgcagggaaaggcactcagctgaacccgtagatgaacgggagaagctggcgccagggaccaacctcgagaattacctccctgccacggtggcctccagtaggccagcaggcacccagcctatcgcccaaggtcaccctgggcttccttcagcccggcaccccacagcaggtcccccaaggtcccttccacggagcgatggatacccctactccctagaggctgaccctgccactgaccaggtcccagtcctcagttatgcacttccggctgtgcggaagaaacttaacaccctcctcctgcagggcactgtccacccctggctggacccatgcaagcccttggagcccaggactctgctctcccagccacacttgcaagcggctctgggatggcgaacggggcctctccatggaaacctccaagccagaagaagggaggcctgggaggccactacatcttggataaaactgtgtccctcccaggacctgaaggggcggggactgatgaccagcgccaggacctggttcccagggtgggctgaccctgaccctgaccctgaccctggacagagaggccagagcccacgcgcagagcagagccctccacttgtcctcagggcagctcccatctccccattttccccagggcttaaggcagccgggccagagatgccgggactggactccatgttgtcctggggaccggaggggagtggagggaggtggagagggtggaggggatggaggtggggacccacaccctcaggcacgagcctgtcttcacctgcgcgggccccggacctccctcacctgtgcgcaccctggatccccctcacttcccccggatcccgccttcaattgcgcgggcaccagatccccccactcacctgtgcgtgccccggatccccatcacttcatcactggaccagggcctcccacctgcgcgggctccggacccctccaacctccgtgcgccctgcaaccccctcccttgcccgggcccccctcacctgcgcgggccgggggcgcagccgcgaagcctgcctggcgcgcggggcctgcagattcggccggcggggaggggatgcggaaccagtcgcgcccaaacctcgggtcggcgacctggcgccccgccacccccaacactgccccgaggcccggtgacaatgaagcggccggacggccggggtgagcagcggcggcagctagcaaccagcctggcaccacctccccagcccgtcacgccggcccgcctttcctgcgcgcgccgactccggattggcccttcacgctcccgctcaggccgtcccgggagctcattgggccgctcggctgtccttcgggaagttcaagcgtgggaggagcggcggatggctgagggacgcgactacagagagcggccgattggacgcggctggaaaggggcgggtcatatagggggcgggggaccgagggcggcgggaggagctggccgggcaggggcggggccccagcggttgtgggcggggcgtgaggtgggggtgtgatgggcgagtagggcgaggcagatgtgggcggggcaaggcaggtgtgggcggggcacgcagggcctggggaggagacaccagggagggcgcgaggagcacgcggcctcggctcggctccccgacacccccaggccgccgcactcccgcggcccggggctcccccagtgtcctaggccgctctgtccccacccacgtgcgcgactcccctcgttactcagtacgactgcgagggcgtgtgggcgccttgctaacctccctgacctccttcccttcgcgctgctttgttgttttttttccttctccaaagttttaacgctgcgccccgtgcgtagccgctctgtgactccccctctctccgggagccctggggattccgcccaggtcctctccagggaagccatccttcccctaaaagtcacagcacactggtctcccctgcccccgctttttaaaaagtccagtgctctgtaaaataaaaagtttggtttcagtaaaatccacattttttggtgtgcagtggagttgtgtaactttagttacagaacattctccctccggatcccgtacctgctgactgctggtggcggctgctcagttctctctgttctccatccctagaggcagccttttccagaatgtcacacaaaagggatgtcgcgcagcgcgcctgtgggtctggcttctaccacttcgcattttgagattcatgctggttcctctttattgctgagtggtatcctgtaaccggtgtgaaccaccggttcagatggttttatttattgatggttttattcatcaaatgaaggacgcagagattgttcctggtgcttggcaattatgaatgacgctgccataaacattcactcatcggcttctgtgtggacacaacttttcatttctcttgtgtaaatacccaggagtggggttgctggatcaaatgattgtttataagaaactgccggccgggcgcagtgggtcccacctgtaattccagaactttgggacactgaggtgggcggatcacctgaggtcaggagttcgagatcaccctggccaacatggcaaaaccccgtctctagtaaaaatacaaaaaaattacccgtgcctggtggcgtctgcctataatcccagctactcaggaggctgagtcaggagaatcgcttgaccccaggaggcagagattgcggtgagcggagatcaccactgcactccagcctgagcgacagagcaagactccatctcaaaaaaaagaaaaagaaaaaaaaaaggaaaccgccaagctattttctttttcttttttttccttttttttccgagatggagtctccctctgtcgcccaggctggagtgcaatggcatgatcttggctcactgcaaactccacttcctgggctcaagcaattctcctgcctcagcctcccgagtagctggtattacaggcacatgtcaccatgccaggctaatttttgtatttttagtagagacagggttttgtcatattggccaggctggtcttgaactgctgacttcaggtgatccacccacctcggtctcccaaagtgctgggattacaggcgtgggccaccacatcggcctactaagctattttccaaagaagttgtacagctctacgctcccaccagtgccacaggtgttgcagttgctccc

SEQ ID NO: 1243854 - DNA, 4001 bp, Homo sapiens
gtagccatgattaggttaagccgtgattatcaggagccctcaaactgatctgctcaaggccgttattatgagtgggttccacagggtattccttaaggaatacaatattataattatacaatatgtgatattaaatacaatttaatatacaatatttattttaatattgtatattaatatagaatttaatatgcaatattaaaaaaagaaacaagcaaagagaaaatgaaattttataaatatcaaagaatctaactaaaggactaaaaacttttggcctaagatataggcaaaattactcctgcttttagtattcttacctggtaccttttctcccaaaatagactgataaagagcaataaaaacattagcatcacagtcttgaagttcatgtattctcagatgtatatgacacttaaaaagaaggttattggcaatggttacccactctgttgggaaaaagggggaaagatcagtcttaaaaaccaccagaaaaaaatcacacagacatttaaaaaatccaacaacctcccccccaacaaaaacagacactgaactttgcagaagataaggaatttgattgttagagaatttcaaagaccctttaggcatggtttttaaaaagatgtatttaatttcttgggatgatttccagagtgctgtaatttctacatagtcaaaactatactgcaaattcaattgatactgttgcagcctaaaatcttaagttacttatataagccttacatgggtgtttttagttaaaacatatttacaagtaaacaggaatattatgtcataaacaacagtttaatgataatccgaggttaccagaaactcattaatggaggctgcttcgcacttgcaatagtattggtcttgtgtttacccaattatcttgtgcaagtcagggtttctctggtgccggaaaaagtggtgattaaacttaggctgttaagaactggtataataacaacatcaacggtaatgcatttgttagtttttcttttttattatatcgatctatatgaaagaaaatatgggaagtacatgaagctcagaattatcaatactgttgacgtttcctgcgtaccacattctcctctcccctagatattgctgggatttgcaaagtttaacggtttctgtaccaaaagtaacttagcttaaaatacttgttccttgaaatgcctgggaattggtaggaaagcactttcaatcggtattagaaacaaacatctccactatgttctggacacgtaacgttctggaaacgaatgagagtgtattttccatgcacataatccccctccccacgcccatttctcacagctggccaaaccatgacaactggtttgtacgcagtccttgtgaaaaggatgaaagcgtcctagacaaccaaattaattcgctcttcaaaagcggtgctagacaaagcccatgactctagagggcactgaagagaaaaaagcacaactattctacaggggcatattctactattctgcaggggcataataaatcttaagaatgctgttcctttaaagaccaatacaaaagcaggtacgacctcagggcccatagtgcaagggcggagggcacacggacagcggctagacgccccacagaaagacaagtccggggacgacccttctgaccgctctttttacagccaggacccaagtgtcctaccggcctcgccccagtgcctctctctctcccacagcatactgctgttccacggcctcgaagcgaagaggtggtgaagctgagagaccctatccagggaacccgccagcgcgacgcggcgtctgaaggtcacgagccccgccgacagcccagacccagtccgggctagcccgaggcctccctggaggtggacggtttcagtccacacatactgggaccccagggagacactcaccagcatccgagcctgccatgtttcagaggcaggtcgccgccggactccgacgcggccgggaaggcgacggtgtcctggaaggaccgatccacgcagacccgacactggggcgcggacgcacgaaccaaagcgcggggaaggaggcgtgaaagaaggacggacgttaaaagagcttctcgccgctgattggtcatcagaggagcacttcctttcacaggacgtgaaacgggggcggtttgggaagtttagagaccattctccgccgaccaaaacccgtcaaaggattatcagacacgcgggtcggacggtccacatcagccggcagcccgggcgggtcccggggtgcgagcagcgcacttccggtgagctatttcgttttgtatccctccgccgacgtcaacgggaaagtagtgcggaccgctctctcggtggtccggggtggtacagccacgtgacaacgccaggccccgccttccccctcttttggttacagacgtgagggctctttggagacgtaaacatctccgagtggcgagggtgggcggggctgggcttgggaaagggcggggtggcttgcttgaggtgtggaaagaccagaagaaggtgaggtcaagagagtgcagaatgaggcattccaatggtgggtgggccctgacctgagagagtggcgcggggaggggtgaaagcgcggcgatcctggaacgccagcgggcgttgcggcctatgcgcgaggggcggggcgattaggtcatagagcggctcccagcgttccctgcggcgtaggaggcggtccagactataaaagcggctgccggaaagcggccggcacctcattcatttctaccggtctctagtagtgcagcttcggctggtgtcatcggtgtccttcctccgctgccgcccccgcaaggcttcgccgtcatcgaggccatttccagcgacttgtcgcacgcttttctatatacttcgttccccgccaaccgcaaccattgacgccatgtcgggttattcgagtgaccgagaccgcggccgggaccgagggtgagtttgggagccgagctgtcaggcctggcgggtggggggatgggagggcgggtcagggtggcggccggcgggggctttgcggcttggacttggcctttccgggctatcttgggacttcctttcccgaaggcttgcgccattttgatattcacgtcacagtgattggaagagatttgacggtgtagtgtcttcaagcttgctttttgtgtggggattggggagctgtcggggcggctgccatttggtagctgttgagggagttgagagggagcgtattgtgcggatgaaagcgggacgcttcgaggcagacgaaggaacatctgttaggtgcggcgtttcgggaggtgtttttggggtggccgggcattctgtgggagcgaggggaccacttccaaagccctggtgctgttggggtaggagggcggccggcatcagccatgtggctgagtcgcgagtacaaaatgccggcctcggacatggcggcggcgcctttgttaccccgcccggcggaggagctcaaaatggcagcgtcgagaaaatgtggcgcagagagaaatgcgagacaaagggggaagcgccgccccagcgggaacgccgcccggccgactccgcccgggccgggactcctcccccggtagtcgccggctcctccttttcttttttcctgcgttatataattttgattcgttgatccggagctctaccgcggcgttcccccagctgggtttgctagcagaagtgtttctgagaaaacccttgttctgttatcgctgactgtactgtttaggttcttaccactaaagctgtttggttccaaaacggccatatgagtaacatcgtcgtgatgctcttcggttcatgtagccttgttattgctgatagtgaattgctaggctggtggggaagattacagtaaccacaagaagtggtgtgtgccagaatcccaaattctggcatgtgggtgacaagtttccgacatgataaatccccggcttccgacatgataaatcccaggctgtttacatgacctaag

SEQ ID NO: 1243855 - DNA, 4001 bp, Homo sapiens
gttgcagtgagccgagattgtgccattacacaacagagcgagactccaccgtctcaaaataaataaataaaataaactatacactgccacaaggtttttctttttctctggcagctaaacaagcacttatcttgagataagcaatatgaaaacaactgcaacctgtccagttcataggcacttactaactgaagccctgttcaacccgccataagaacaattttgattggacaacagagtgatttcagtaatgttctcctggcaagaagaccactcaccacggactacctctggccagtttactgaggcttcccacttaacgtgccgtcatgtcctgaaaaggccttttgacatataggacctaattgtaatacatttaaatgttaggtctccatcccaaggtgaatatgagtgatatattacatcaatgtttgttcaatacacatgtgttgggaccaccttcatgagtattcatagctcctcctataacctgttgaatatgtatgtttgtttgtttatttatttatttattttttgagacggagtctcgctctgtcccccaggctggagtgcagtggcgtgaccttggctcactgcaacctctgcctcccaagttcaagtgattctcctccctcagcctctcaagtagctgggattacaggcacctaccaccacgcccggataatttttgtatttttagtatagatgggatttcaccatgttggacaggatggtctcgaactcctgacctcaggtgatctacctgccttggcctcccaaagcgctgggattacaggcatgagccactgcccccggcctcagttgcagagttctatgtgtgtggttctacattggctcaacaagtgacattatgcaacccactgtaggctgctcaattgtttctcaatgatcttgtaaccaactctcaagatatctgatatccgaaatgtataaagcactcactttctattggagactgttaaagttaaaccaagagtcaagagctaagtcctagagtatgcttaaaactttagacagtgattgttctgcatccacattcttaaagctttcaggcatcacaacacacatttttgaaaagttttgcttctcctaaaatctaattcattgttttctcatccctcaaaaaaccaaaacccctcaaaacgaacaataaaaccccacagctttttcttcccagaatcttcaaaacaataggcagtcacaaataagatttcagcggagcggcccagtccctttttctctccgctttagctccccctggcgtccccttccccttctgtcctggtctgaaatcctcatcatttagaaaccttccttaggattagaggaccaacaacatcccctcagggggttgctcaaacacacgttccctcccagccctttctcactggtacgccagttgggattttagcagatttcctagctggtcccaggggccgacacagacagcatccttctgtgtggttacgaaggagcctagggctttgcgagcggcgtggggttcagagccaggaagggctgacctagtgggagaagggttacaaccacccgtactcatccggcccgcctggggaagaggcatttggtcccttttaggtgctggcgcttgtccgagctggtaaaaaccatctcactccctgaggcttggatcgaggaagtgactctccaaggccttggggcaggtcaggctgtgcgggtcctcctgtgcgtgtccctggccagggctcctgccgttgtcccacactgcctttcaggtgtccccggtgtctcactattcctgtttgcactacacgtcctccgaattcctaaaccagccagcccaaagatgctggaggcctcaccattgaagccgatcacggcgtcaagttccagctccgccacttgggcctccggcgaaattttgttatccatccttgggaggttctgattactttgctctcctccctagtggctgcagcgtcttctggtcgttatggtaacggacgagcgcatgcgctccagctccacgcccgcgcagaaacccagcctgccgagttcgagttcattagcattcttggaaatgaaggggtatggggactggaagagagatggggtgggactcctcttctttttttttgtgctatttctctggaaatttaggggatggcactaactgcgcagaactaattcctccatccccttgtgtagagtctgtgacttcttagtaactctaaaatcaagcaccgaatgaatggcatttaaaaaatatgtaatcaggcgtacaggactgataggaaggctgctataaaaaatatatataattgatacttctttgggcccctgtttggagcagtgtgaaaaaaattttaaagattttttaaaaagcgttgaggtataatttacatatcataaagttaacttaaagtaggttgtagtgagtttacgcagcgtgcaagtctcaccgcaatctagtgttttgtttattgttttgtttttgaagcaggataaatttttaagtaactgctacagagaggtcttgcagcgctcccaccttcctgggaaaatgctttgtttctatttaacaattttaactgagcttagcagttcgcgtctcttggtgggagtagattgctccagtgtactgtccgcaggggagcgctttgctttctctgattatagttctgaggccctagctactcactttgcaaactccaggctccggtcgcgcacgggacgaactgcggggagtgagccgcgcgggccgccgtagtcagctgctaagagcaggaagagtccgagcggcgggcggagtctgcaggatggcaccggacccctggtgagtcccgggtgagggcggcggtgcgtggagggaccttcggggaggccgggcttccggagagcaggcaatcacttcgcattgccgctggtggcctttcgggatgaggggaggggcagcgagacctttcctttactgagggggctcagccacatcccgccacacttggtccttgcaagggtggcccgggaaggagaccaggtggtccgctggagagctgaggacttacgccaaatctctgaatattcctttagcttttctgggctgcatctcgttgcggggatttcccgcccatcctggttttggagctagctggctggtgcaggcttccctggactcctataaaagtgaagtcgaaataacgtttttgtagcatgtcagtccatcccggtaaacccccttatttcacaggtggagaaaccgaggttcagaatccatggccaccagccagttagtaaccagctggggctaagacctagatcttgggggcccttccagatacaggaacctgggagggaaattgtgcacttgtttataaggcattttgcactttcttgagttaatatcatgaagtcttttcctttagcagtagcttctgcagtaaaacaatagctgataagggtgatttatttagcagttaatcccaaggactgcatgatgaaagatgcaacttttgatcccaaggaacatattgtttgatcccaaggaacgtattgttattgaacatagacttgacctttctgcttaataattaaaaacatattacagctctataacgttcttgttggaatatgtgtcttatgttgttatttctaatatagtttataattgtttaagttgcccacatcctggatattagaagaatggattccaagaacaaagttgagttacctggaatctaggttatttgggccaattatttaatttagcatttacttttttaaacctaattttaggccggacgcggtggtggctcacgcctgtaatcccagtactttgggaggccgaggcaggcagatcacctgaggtcgggaggtcgagaccagcctgaccaacatggagaaaccccgtctctactaaaaatacaaaattagccgggcatggtagtacatgcctgtaatcccagctactcgggagactgaggcaggagaatcgcttgaacccg

SEQ ID NO: 1243856 - DNA, 4001 bp, Homo sapiens
gcactggtgggccacaggggactccaacttcagctggggagaggcagggctgaagaagggcaggcttgagcaggctccttccacccagacaaaggttggctgctgcccaagtgagattctgcccacatctccacacccgcaccctttcctgtggcccacattgaggtatgaaggtctccagtaaccagactctcctctaccttgttggttccccacccaaacctcctggctgaagcccctgtaccagggtgatttttccagtcccagagaagggattctgctctgatccaaggtagccccacctggccagacactgggcaccccaggggagaaaggaatgagtgaggatgcagacaggagatgggtctagtgacggaggagggcaaagggcagttagcagtctggagacagtgagtcacgccagtcttctctgtggagagacacctggggtcttgggccaaggattgacaatagtggtcttgcctttgccccttcacggagcccatgggcacgatgcttgcatcctgggggagcccttggtcccacgcctactgagctgcaatggacttgagaatgcagtgaattgtgtctgtgtggattgggcagggccatccaccagggcctctatggggcatggagaatgtcttcctcaggcatttgcttcccctcactccccagtcccccactcccccttagcacacatgcacagcccccaccaggaacagggtctctttgtgggcctgatctgcccagctcctctggaaggctcctcaataaacaaaccttcctttatggggtggtaggtttactggagacgggaaaaacagcagaggaggggtggaaggcccaacaggaagaggtggctgctgctcacagttgggggtttggaagcactggagatggccctagggggccttttgtggggccagggcagtcccactccttttatatgtaagaatcctaggagggcagtggtcgagactggcagcagacagggattagggtagggatgtgacaaggcgaggaagggaggtggcagagctgctcaccttggagatagccagagggacagggaacctggggacgggggatggtgccagctgtggccctggctcctggggcctccaggaagggaagaaggaaccagggcagagcccacagccaggagctcaccttctccaggttggtgttgtccagccagagggtctccaggtatctgccaaaggactggaaggcattgtccgggatgcttttcagggggttgtgggacagcttcagctcctccaccacccgtagcttgctcagggcagctgaggggtagctggacagctggttcctgtccacgtggaatttggcgaggttctccacgtcgtccagggccccgggctgcagggagctcaacgcgttttccgacaggtagagccagcgcaggtccttggctccctggaaggcgcctgcgcgcagctcacggatcttgttgttgttgagctgcaagatgaagaggttgaccagcggggagagcaacccccggggcagctcagtgaccttgttgtggtccaggtagaggtaggtcagctcggtcaggtcgtcgaaggcacctgcgcgcagcacgcggatgtcgttatgggacaggtacaagtagataagttgcttgaggccgcggaaggcaccggcggccacctcgcggatctggcagtgctgcaggtgcaatgacacgaggttcggcatggcccggaacgaattggcagccagcaccgggaagttgttgcgctgtaggttgagcagcttggtcttctctgacaccttggggatcttctgcagccccaccttgtcgcagatgacgtgctgcaggtcgctgtggcagtggcagttctgggggcaggcggccagcgccggcagcagaccagccaggaggccgaggctgagcaagagcattgggcggaccatggctgggacgcctggggccggggctgggggcagcagcggcggcggggcgcgggcagcggcgagtcctaggcgctcgggtctgccgccctctttatacggtggccctgaccgcagccggcagccgagccagctcctacgtggagcatcgaggccactgggcttaactcgctcgcgcccagagatgcgcccccgccctccacggggaagggggcggggccgttcccccagccggctaccgtgcatgagggggtgggaccgtggcccccgagccccgagccctgagccccggctgtagccccccgctctcctatggtgctcctctgcctaccgcctttcccggggcttttctgggaagggggaatagttatgtctggagccccgagtttacatcggagagagggaggcgttccctcaacttatttgtttgctcaggtttgagcctccacgccgcgccatccacacacgctcggccgggtgccctggatgcgaggcgggaggaagcggggccggacagctggatgcgtctccctgcggtgggccagctgcctgcgctttaaaggggcgcttgtgcggcgcctgccgagcgtgagagccgccccggcgtcggtctcccacttcagactcgacgcgccgaagctggccctgggtagacccgagctccttccccaccctcgggcgcgcccccacccctctcttccaaccccgcttgcgtttctgtcgccggcgccctcatcccctttttccaccgctgaaggctaagcagagaagtgggaagtgggggagagtggcccacaggaatggcaaacacacctggaaaccacaggccacaagcacagtcgcaccatcccccctccttcatcgccccgaaatatctccatccctcatccccaaccctagtggtcaggacccgcccctgaggggtctcagggtggcggctgagtggcgccgaggtgtacttggcagatgccacattcgggcggtggccccaggactgtgaggaggggtgcgggagggggtggggcaggtcgagggaccagccctggacggctctggctgccagaccctaagttctgtgggcagtcccgccccagcccgccagatttctgtgtgcccacttgccagccacgatgtccggattcctgtggaaaggggagggtgagcaggcagggtcacagctctggcctcagggtgagctccaagctgcctggcacaggatattgtctgtgatgaggggtggaaggagaaaccagaacccacattgaaccaaaccccagccgtgccagagccagagcagctgatatgggggaagcttggtgcagggaggaggatggatgagatctggtatccgttgattaaaggggacctaggatacggggtaactagcctctcttcccttacccagtaccctcgtgttggggcctggtttccagggcctgcccttttcccaaacctctctgccccttgcctctaggataggagggtcatacttggcctagaccattccttgatggtatttaggcttctccaaggctggcttctggtttttctgttgctcaggctttccaaccactggaaatgggggaggtggggtgggggtaccactggtttttaaaatcactgcttaggttgtttttttattttgatggaaataaattcacgggaaactctccagagcttgggggacgcctgccccaaggccaggcacttgttcagggtttgcagaatgcgggggtggggttgtgtctgtgccactcctagctgggccaaggcaggctggctttctcatcaagtttatggggccttcagcttggaagggaggagccggggatgtggcctgaaatcaggaaggtggggttaaggcagccaggggatggggggagaagtgtggggtgttggtaataccggagccacaggcacagacaggtggctgctccagggaaacggggcactgagagagctccagctggaagagaatggtgtccctgctctcaattttctttcagatctggggccctgcagagatctagtctgctcactcccagcacctctgcctc

SEQ ID NO: 1243857 - DNA, 4001 bp, Homo sapiens
aagtcccaatacaaataggtgagcgctgccaagcccctggcaggacctgacggcctttctttccctcttttcagcgcctctgccggaggcaaccccaaaggcaccctctccccacaactcctcattcctcctcctcctgccaaggcagggggctctctgggagaactttttcaaaactttaccctttttcagacaagcttggggggcggggagactttatccagtttccaggagacacacatccctccccgacccacaagaaagcaccccccgctcccccaaaggtcgtctcggctagacaggaacgtttgccacagaagccacacggatcaatatgacagttttacaaagagcccggagttggccgttttgaagtttggtgcatttgtgccgcatggcagccagaggcccgggggtgcggaggtccccctgctgttccccaagcagggggtgtggacacccagatgctcacctatcccaaagaagactagaaatcactccactaggagggtggtctgagggggacaccgctgggcgcctgacgcggcgcagcggtctggagagcgccgcccagagagtgccgccgggtgacttgtcacctcgggggacgggtgctgagtgatggtcaagctgcagaacagctgggtgggcagttcacgccccccaacgtgctcagggagtgggtggtttcagcgagagagtgagtgacagtgaatggcagccacgtgagagtcacagctgggcagcttggccaccccagactgacggggtcaagagggggaccccccccaccgcacttgacacaaaagagcccagagccccggcgagatgaagggggtggagccgggggtatctggttccccagacactcttctctccgctccccaatccgaatggactgctgtccctgcacaggctgggggagcgaggggacgagctcctgccttattccaggaagtggtctgcgtggactgtggccaccacctgcccctactcatcagcagcccacaaacattcacaagacccctccctcgcgtgccaccgcatgcccctcagttggcgggcacctaagtctccgcgggtggaggggggtccgatggacaccgtccccactctgcctgtccaagtcctgagcggagggggcaggcccgtcggctgctccgtgcggggaaaccccactctccctcggtccaaccccaccggggccagagcccgaggggcgctcgcgcggccgcccctcccccacgtgcccctcccccacgccgccgtccggccgccagggtctcggcggtccctcgctcggccagggagggggccctggcttcgccttggccgtttcctgcctaccccctccccgccgagggtaaaaaaaaaacctcctcctcctcctcccccgaaagccgcgaccgagtggcccggtccgcgcgcgcagctcgcgcccagcgctctccagccggggtggcggcggcggcggcggcggcggcggcggcggcggcgggggaggggtgcggcgggggaggggaggaggcctggccccgcggtcgcagccgccaccgcccgccccgacctcccggaccgccgcggggccacgggcccgagccccggattcgcgctccggattcgcctcggctcggccgcgcggtgggtgcctcgcccccgcccggcttcgcgcgcccgcggctcccactcgggcttggggggggagtcggggcgggcgcttacctggcggcgggggcggcggcggcgggggcagcggtggcggcggcggcggcggcggcgggaagaggtggcagccgggggggctgtggcggtcgcggccccggtcgtggcccggcccgcgcccgagtactccctcgtcgtcgtcctcctcatcgtcctcgtcggccgcctccacctcctcctcctcctcctcgtcgccctcttcttcctcctcttcttcctcctccgacaccaccatctcctcctcctcctcctcctcgtccctcagaggggaagccatcctgtggctctggcccccccaccacccccccacccaccgcccgcccgcctcccccaccgctaccaccaccacctcctcctcctcctcctcctcctcctcctcctcctcctcggcggcggcgtcctcctcctcctcaccgcctcccccagccccccaaacccccgggccacccccctccgaaacccccaccctcggggccgccgtctgaggaggggggccaaaccacccccaaaaattgtcttggaaaaaattgaggaaagactttttttccttctctctttcctcccaagagaacaagaaagggggatttaaaatatatatatatatacatatatatatatatatatatgtatatatataaaagttttcgacttctctctgcccccctctccgttgctttaaatatatttaaattctgaggggggcgctcagaaatatttctcagagctgaggcactaagatggccgccttgaaattatttttaaaacaaccccccctccagcaccgccaccccctccataaagaaagggagaggggggaaaatccccttttcaaacaaaatggctggcttaatatttcatttttcacccccccattctcctccctgttacacccccatctccaagcctttacccagaaacccacaaatttctcctttttcataactgattagtgcacagattaatagagatattttccttgtgtactgaagtgtgtgtgtgtgtgtgtgtgtgttgggggggcatgaaggatttctgcataaaacaaaaatggctgctgtgactaactccccccttataaaaaatatttgagggggggcattaatcagtactcatgctcagtctgacatcagcataaattgttaaaggttaactagttagatactagtccaactagatttaattttttttattttctttactagtctcttcctccccacctcccttctctaaagaaaagcttttttttttttgaatacttcagaagggagtggtttgatgtgaaggtttttttccccttcaggcattgaaaaggaaaaagatgaaatatatgtttatatataactctgtttctacatacctcattgaagtcacaacgcatttaattgtgtacatatcttttaaatgagaagcgggactggatttttttctgctttctttaaaaaaagtgatagaaatcctagtgacttttgggggagagatatgaatagatacgatgattgagtttttttcaaaggagtccatgtttgattctcccctttacccagccttttcagtgatttataattgttataaattttatctttactcttttcccctttccctcgctttcccctcctccaattgttagaatgtaaaattcaactgacttgagaaattaatttggggggtaaacaacaaatttttaggataaagaggaaagagtcaaatctgaagatcgtgaaattatgttctcttttcttccgtttcagtatatttgccttccctccatgatctccaacactatccgataaagtagaagcaactgaggtaccgtgaaagagaaaggagctggaactgagaaaaagcagaggtaggggttatacccaggcgttttcatctaactttctgacctgtgatttccaactgtaccccagtgtttatggtaaagtggtaccaggaattggacagttggaaaggagtcccaaagtagctttctcatacagagatttgcccagagaggtctagacagaaaatgatccttgccaaatggagcaaaggaaggagggcaaatagctcagttctaccctctttcattcttgttgaccctttcttactctagcttcctcccattcctttgatctccctttgccccttcccttgcttcccattccatgcctgtggaatcatttctctctgggttattcctctacctctccagtgtaactgctggccacccatcttcggcggtgctcaggagcaccctgagagggaggggtaggtgggcagcaaccagaaagtat

SEQ ID NO: 1243858 - DNA, 4001 bp, Homo sapiens
cctgggctttcttgcttcttgccccattctccagtccagtctccattcctcccctcctcatgcccgtctttaatgcagatttctcactctcattccctaattctactcaccttttgccccccatctccctccccctttttccgccgctttgtcttcttctcctttttttctcggtgcttccttcttcgtttccgacccggtccggttccatattcactgcccccactctctgacttctcccggtactcatctcgctcagaaccaaattcctcctcactgtcctaagagaaagaaataaaaataacatttattcatccctaccattgccagaaactgttctcagcacataccatatcttacctcttttaatcttcacaacaatcctgtgatagtaactaattttttatctcctttttttttttggagatggagtcttgctctgtcacccatgctggagtgcactgacgtgatctcggctcactgcaacctccacctcccgggttcaagcgattctcctgcctcagcctcctgtgtagctgggattacagacgtaccaccgcgcccggctgatttttgtatttttagtagagacggagtttcaccacattggccaggcttgtcgcgaactcctgacctcaaatgatctacccggctcagcctcccaaagtgctgggattacaggcgtgagccactgcaaccggcctttatctactttttacagatgaggaaactaaggcacagagagccaaataaacggcctggtatcctagacagaggaatgctggactcttgaattcatacagtcttccagagcttgtgctttcaactgcttctctttgctgctgaggacacactgacaacgaggctcttcactaggttgcagtgaatgaagttagggtcccagatccctgagatacaggccaacagtggcagggaagtggggggcccgggggatcaagcctccctggcttcagaaccccacccccacaccagtaatcaggaccagagaaaatgtaggtctctgagaatgggtctcttgagccttgccacagagttaggaattcttgacacttacacgcttcttgcgttttcggggttttcctggcttgttctccttctgcttcttgggtcctcgttttctcttcttcacacccaatgctgacggcagcagccgaatgtcatccttatctttgaagcaaaaagcatcagaaaacctaagcctctaggtttccagcctctgaggcccctcaacttgccccttccccacctcggcagttcccactctctaggaagcattaactcctccaagccctgcctcccttcactggatgcaaacagaaagtgtttcgagtactctgggatgctctggttctgaatgggaggtcaggggtcagaagagaagagcagccaaaccactcccctccctcccctcctactaacaagagaccaggctccaggccatgggctctgactgtggcaggtcctttcagtcaccgccagggctcctcctgccttccccctcacttcgccagctggcatcctgcccaggaactggggaagccatgcccagctgctggcctggcctgaccccagcacttggagtggggagacacaagctggcagctccctaagccagatgctggggagggagagccaaaggtggacacctgggttctcacactaacaccctggggccctgacatccttttgccaagagggaggcctctatttacatttcctcggataattaccaggcatcctgtcaccccaacacagtcctggaggaaaagaaatcctcagctggtcatttttacttcttgcccacaggatcacagtgtctgccgccttcatcacacaggagaaagtctccacaattacctaaatattcctcctcccaagtagcctaaaacctaccttcaattctattcccatctccctgctccctttgggaactagggggccataccctttgtttcccgatctcacccttcacctccatattttgttccagatatcctgacccattcatctatacgcagtatgggagacccaaacaaagatataggcacagacagacacacccagcatatgccttctcaaaagcacgcgcgcgcacgcgcgcacccacacccacacacactctcaggcccacaaatccagaggatggcctgtacctgcttcagcagggataggtccctggctttctccccagatgtctctgccagaggaccccaggccccccaccccattatctgtgaaggtgtcactctgtgaaggcttggggaacggaacggagagttaccccacataaaggaagacaggatgccccacagacctggggccctggggctctggttcacgtccctcccctaccaagcactagactaaccagccagacctgtctagtacagagagaggcagccgatgcaagatgggaaagcctgggcttggcccagcccctagctctaggacacacaatcctttctccttccctcaacagccaacggaaaattagccacaattaacaccagaggcctccgtttccactgcctcagagtcgctgcctcgccttccttcagtgccacctttcctgctaactccagcatcctgtgtccccttgtgcaggaagacactctaggactgtgtgcgtgtgtgcaggggggtggctgccagagcccgggtgtgaaacggaatggggactgtaataggaagtcagcaaggaaggcgccatgccccagcagccggctccccctggccccagggacttcggttgacttgaacatggaaacgcaggctgccgaggcagtggcaagggcaggccaactggctaaggttcagggacacggcctcggccaccaccagccaggggtggtgcacaagccggttcactctactccccaccccagcgggaggttcccgaacttgggcaggcgtcggtggcgggagaggcaaagcgagaacggcaaggaaaagcaaggaagggtaataaagcaaatctaagtcccaacctcggtctcagcagccactcaatgctggcctggagcccagactctcccacatccccggctcggatctcagggaggcagggaggagagaggcgggggccggagggcgcagggcggagcctggccgcccgagcaagcgggaggagtctcggccgaagcctcgcctcccgcccgcccctctcttcttctaatctcaccatcaatctctcacacatatatttattttttctcaaattcccctccctcccccacaacgcaccaccataataggtctgctgcacatgcgtactgcaggcagggggtgggtttgtattttcagaccttttgcaaagaaactaccagaattttccgcaccacccacaatcattccccacccccacccccaaggaatcacatctatatattatgttatattatttctctcgacttgccagaagggggagggagaagaaatgagtttttggcttcctgctcccttcccccaccaacacgactgctattattttaaacgtttaacaatgtaaggagactggagagagggggaagggataaaattggtcttgagtaagaatgtaaaacaaaatggtgagaatcaaagcagtcggaatggaaaacaatggaaatctctcctgtgcacaaatgcatactctagacaaggaagagcgagggcagcctgaacaaatttccttagaggagggttcttttccccacacttaggtagacagaaataatgagtgtgctaaaaataatttcccgaagttttacctccgaaagtcatctgagggggtgtatctgggtcactcattcgacttggagggctgaaagggagataaaaattgcccagggggagaggggaggtgggttttcatttcagttgtaaaatgtaagcagcctctgacgtctcttctggtctattcagaaagccaagagggaaaggggaggccgggttgacacaaagacccatctcaacctcggatcctttcacgcttctctccc

SEQ ID NO: 1243859 - DNA, 4001 bp, Homo sapiens
cccggcttctctccttgcgcttcagccgcatgagatgcctgtggcttccctgcccctttgccaaccatccggctgcagggacacccactcggccccgctgaccgcctctcatctgtgtgccgtcccagagagggcactcggccactgaggaacttcagccagtcctgctctatcaggtccttaagttttccaaacgtcatcacttcagacaatgctgagcccgtgcaggcacagggattatggccttaaggcaggaggctgaggagaattagctcagtcagggcctgtgtgcctctttaagactccgcatgggaagccagtgctccctctacctgagagggctcattcccggttccctccacccacggagtctccccctcgccgtgccaaggcctgtgggtcctctcgttgctacagtgaaaggtgccccctgcccagccccactgctggggagacccaggggccaaaggcaggcaggtgtggccaggctgcccccctgtaaaacaaggtctcagtggagggtcacaggccacgtggggaacacctgttatcctagaaaaacagaaaaaaaaaagcaatcatttgtgctagtgtgtgctaaggatgctgttcccaagcacccaaaatcccagggagacctacggcagcccgcaacacgggtctgcacagccgagagcccacagtgacccttggcaagtggaaagctgtgcttgaagagaaaccggagctgagtccttaaagagaggggagggagtgccttggggctggcagggtaggtggaaggtggacgatggaggctgggtccagctgtcttgcaggcagctcgggacggtgcccagcgctgtgcccatcttctctagggacaaatgtgcccgttgtttcttttcacagcttatggactcagatgccaacgtaagattccctctttcatttacattcgcttctcttttagtataaaattaacctatttctgttgcacaaaatttagaaaagaaagcatccgaaaaagctagccctgctttcatttcggggtctctttcgtgacacgtttatctcgttacaaaaatggactattcttaacccgccctgtccctgacatgccaggcgattcctcctcctacagaagctaactttcacatgggaaaaggcaccaccaccggcccggctgtgccccggggggtcagtctggagtcgccgcaaacaaacgcgccaaacacggtggtcccgtacccaggcgctgcggaagcccggcaggaccccggcaggaccccggcaggcgttcggcgcacctgtcggccgctcctcggaccagggcagacttccttccagtcctggcctggatggggtgagggagaggggatgccccgcgctgcctcgcgaagccggcagcaccgccggggctccggcccagggcaccaggaggcaaatgagccgcgggacgggggcgggggcagcgactccgggagagccgggacctgctcccgcgggcccagagccagggaaagcccagcgccgcgcggaccccacggacgggccgccaggctgtggccgagccccgaacgccggcgtcgaatcccgcagtcaccagccgcgcccaccccggcggggctcgcagaggcggacgcgcgggccccggggaagacggcagccacggcgccgcgcaggagaccccggcccgaggccccgcgggcgaggagggacgcagggcggagagaccgaggggcccggctgcgcgctgcgcctcagtttccccatccgaacgcggggggccgagggcgcggggctcttccggccccgccgcccgccccggccccgtcgcctgtcccggccccagccctgaccccgggcccgggccctcaccaggatggccttgtcctgctccgtgacgcggctctgcttcttgcggccgaacaggttacccatggcggcgcccgcccctggcccgggacccaccaagtccaatcgccaccgccgccccgcggccaccgtagctcgggtcctcccgctacggcggccgcgccgggccaggcgccgcggaacgcgaaggccgagcgccgcctccggccgcgcgccgttgccgcgggttcgaaaccacagcccgccggtctcggcgaccgccgcgaacaccgcggcctccttggaccggtacggagaagtggcacggatacctggatgttagggcccgcgatgttcgggcccgggatgttctaaatgacgtgtttccgtgcacccttcctgtgcaggtgaaggcaaaaatttcttatctcctaattaggtgggatccttttagattaacataattcagtctccccaggctttcaggaatcttgtgcaggaatcactgtcccactggctctgaacacaaaatgccgcattaatgatgtgatatccaacgttttgcacttttttttttttttttttttttagatggagtcctgctctgtcgcccagggtggagtgcaggggcgctatctcggctcactacaaactctgcctcccgggttcaagtgattttcctgcttcagcctcctgagtagctgggactacaggtgcctgctgccacacccggctaatgtttgttagtagagacggggtttcaccatattggccaggctggccttgagctcctgaccttctgatccacccacctcgggctcccaaagtgctgggatgacaggcgtgagccgccgcacccggcccgctttgcactttaaaatgttccctgaaatgcgaccagcagcgccctccacccagcctttcagccctgggatcttccctcttccactgcgctgctccctgtctgtagatcagtgccaggaggagaccagcatggctgggctcagcttctccttccaaggaatcgtggctgcgtcccccacagaagcattcttccctggggggctaagaaacacatgaatggggataaagggtaaaagggagaagccaccccggttcccgcctgagtatcctgactgtggttcctgagcattcactaagtgtcaaagaaaagcactcagctgaggatggcttgaggccaggagttcaagaccagcctggcaacatagcaagacccccgtctctacaaaaaatataacaaataacatcaaaaggagaataattatcacctgttccaaacctctggactccagaaccttcactgaggtgagggggcccctgaatttttgtggggttcatctcccaccctctgatttgtctcaccaagacatctgaagtacttttttccttggtgtccatggggacgttgaggaaaaaaaaaaaaaagacttgctactccctgctcctcatgaagggggaaggaagagctgggtagaggaaggcgtgatccttggctagggatccccccaccgcctgtgcccacaaacctaggtgaggacagggatttttgttttcctgcccaaatgttgcatttccaaagaccaccctggcctgccacgcccccatcctgtccctataaaatccccgagactctagcagactccatctggccaggtgtggtggctcacgcctgtaataccagcactttgggaggctgaggtgggtggatcacctgaggtcaggagttcgacatcagcctggcctcacatagtggaccgtgtctctacaaaactacaaaagttagtggggcatggtggcatgcacctgtaatcgcagctacttgggaggctgaggcaggagaatcgcttgaacttgggaggtggaggttgcagtgagctgagatcacaccactgtactccagcctgggcgacagtgtgatactctgtctccaaaaaaagaaaaagaaaaagaaaaggaattggaatccatttgatgccagtgtcttgtcattcctgagacgcttgagtatttccctccctctgttacacagttactttggtaaacaggtacaggtccctttgggggactcttcccgtggctttgctgctgtattccttgcagcaatgcttcaggggtctccctcaaggaacctggcccccaactca

SEQ ID NO: 1243860 - DNA, 4001 bp, Homo sapiens
accacgacgctaatgtccagagccacgtcaaaattcccatcattgctgcagagaagggatctcatcagggatcaggccccgcgcccggaggccccccgccccccgaggccccgcgccacctcccgggctttggaagttctcctacttgttcagtagcaccacgtcagggagccacacggattccgccgtgatgcggagcgaatcgatgccgtcgtgctccgcagggtcccagctcagcctgtagtcagtccactcctagtgaagcagaggctgaggggctgccccgggttggaggccgggagggacttgggatttccaaaggaagcccaggaagggagtgcaaggaaggggagcaggacaggcataaactgtgggtcaaggggccgtggttctggctctggctccgccttcactcgctgggatccacatcagctaatttccctcccccgcaccgggtttcaatattttactctgtaaaaatgaggaggctgcagtagctagcctctaaaacggttttcaaactgcagttcgcaatcctttagtggatggggaatgaaattagcggccccaaaccagtgtttcaaaaattagaatgggccaggtgcagtggctcacggctgtaatctcagcacttgtggaggttccccccgaggctggtggatggctcgagcccccgcattcaagaacagcctgtgcaacatagtgagaccgcatcacacacacacacacacacacacacacacacacacacacacacacagacacacacacacacacacacacaaaattggaattaaaaatgcatggggtgtaactcctgtagtaaagttaagtgttgtttcttcgagcttttgcttcagttataaacgtgttatctaaagtcatgatgtaaaaaatattcttactgggctggatattcaaggaaattgtcaaggcagagggaagccctttcccaccccgtggggtctccataccaggtctaagtacacctttgtgctcatctcttcatccttctcgttctagaagggaaaaatttaaggcgtaaaggtgaagtagggtggagagaaatgagggggctcggggggccaacctctctcctgggaacgccgccccctttttctgagccccatcctctcgggtccaagtccacctcccagaagcggcgttagtttaagacctgcctctatctcagaaacacctcttcctgccgtctacactcccagcctatcaacctaccagacccgcccctgcctagccctccgcctagctctgtccccggccctgccttcagctcataatccacccagccccgaacctccacccgctgccatttattgacccctgagcaccaagctccgccccaccctgggcactcaggactcatgtggccctacgtcgaggtccgtcccccagcccctgcctcgtccccagccccactttaaggtccgatcacaggtccgtccttcaccctacccagttctactccaggcccgtccaccacccacggccagagcttgtccattggtctgatttcgatccaatcttcaccaaaggctggtccatctcagcctggtctcgtcccaggccccgcccccagcctgtccctggtccggccttgcctaaagccacgcccccggccggtcggctggcctgacctccaccccccgcgcgccctcaccaggctgatgagttgcgccaggatgagaccaacgctgaccctgacacggtctcccacctcccgcgctggccgcacggagctatcatagccagagaaaagtttctcccggagtcgaccctccgcctccgagccgcggacgcctgggggaggagagaataagtgcagccctggtgcctggccacgaccgctggccccgtcactgccccttcggggcctacacttacctggggcgagcggcgcccccagcgcccccagcagcatcagcagagcccctggggtcatagcctggcggctcgctcagtgacttcgctcagagagccgctgggaccgccagcacaggggaagtgacgaggagcccgggaatgtgcacctgttgctggaggacagccgccagcccacccgccccgcccccgggacttgatcctgcctcgagcaactgccaagcccgccaccgacagatgacagacagcacttcagttgtataaatcgtctttaattgagaaagctggagtggagacccgatcccctgggagcagtgccaggagttgggtggagactgagtggggtttgtgtgggtgagggggcatctactcctcttgcaacaagccagaagtagaacagcctaaggaaaagtgacctgccttggagccttagtccctcccttagggccccctcagcctaccctatccaagtctgaggctatggaagtctccctcctagttcactagcaggttccccatcttttccaggctgcccctagcactccacgtttttctgaaaaaatctagacaggccctttttgggtacctaaaacccagctgaggttgtgagctgtaaggtaaagcaagttctatccaattagaagctgttggggcgtatgaggtctggagtgcaagaggccttcacccttcttggcctgacctgtaggggagaagggtgagacttattgctgaattggggtctcctcactgggagggtcaaggctgtatccatttgtcctttttattaaggacatattactctaaggacctcagctttaaaggggacctggaaggaattcctgctgaggtagctaagtattcatgtccacccaacacagatgcaggttcagtcatgccataattttgacccctcccccatcccagcttccctactatgagccagggatccttccaaaattcctctgcccttctccagactctgtctccctggcacgacctcagctgggttgaaggagctagaaactgcatgtaaaaataagcttagcattctatatggaagaatcatatttttagagaattatctaggaaaaacaagaaatggttcttgattcatccagaagtgtttttatgaatcatagctgggtcttttccagaactcatccgtaataggtatcactcaagaaggcgggagggtggggctagaacttacttagaacaataatatggctatacaggccccagctccatcctgggtaaaagggctgagagtcatgatctatgtcctagagctaggattcagggggaagtacggctccataaagctctagaattgggtgtctctgggataagaaggttaaacccgtggtcatctgagactggttccggttcaggccaaagccaacagctagacaaggcccaaatctagcctctttctacttggaaaccaggggtccatctgagtcaatgacagaggcctgacagatccagagaaaaggctggcagcatgcctgggttccagcacagagccctagtgcagaagtggccctggcgagggtgtccagtgttccagaatgtgtccagaccaaggtagaaggtagagtagggaaagaaggacacatgaatcctgagctccagtgaatctagaaatggctcagtggcaatgaaaaggggcacaggactccaggaactggctgagccggggtgggaagtgtttatgccctggctgtccatgtgggaactcccagcgccatctcaggaaaaggcatggcgttgtgtgagtgtggaaagaaagaagtgatcagccaggaccatcttcagacatccccctctctgactccctcctaggcccaaagatctaagggtctcagcagcctcggaagtcacagtcagcccctaggctccctcagggtagagcacctagtgggacctggctgctcagggcatgtgtgtggcagcaggggtgagagcaggactgggagacaggttgtggtggtggctggctcactgggagtgcagggaacctccagtccagggactacatttcagggggcagggggactggaaggggaggcctcggggacactgtggagagaaggctcctg

SEQ ID NO: 1243861 - DNA, 4001 bp, Homo sapiens
cttccggcggatgatgagcgagtagatgacgtcagtctcccctgggccgtcggtggcgccaccgtggtggcggcggatcacccccgggcagaagtcgatggcccactcgccgttctctgcgggacgggggcacggtcagctggctgtcagagcggggcgcccgccgagctgacagcgggctgaagaggaggctgcggctgtctgcaccagggtcatgggccgtcaggatgggggcaattacggacagaaaagggcattctcgttgagggtatggaaagccagaaggcaggactagagtaacaatcgagaatgatttcaggacaggggtaagctaaacccagttgtggaagtcatcctccagtgtcgttggtccggggcaagcccaccgtggaagtcccctctctggaccccgtctagaagcgggtttttctgagcaggcaggggcttcaccagtataggcctctgtgtcgatgtcgatcttgttgatggtcttgccgtcgttgtctacggcaaaagtgaactccacctcttcggcattgtacgtctgagagctgcggagccagggccgggagcccaccccagaagctctgacctgggccccggcctcaggcccagccctggaagctgggatctagcggggccgcgatcccaagcccaccccttcacccaagcccagcccgcacgcctctgttcccatctgtacctccggccgcgctggagcgtcccacccagtgcctacgcctggctccgcctccagcgcgaagccccgccccgagggcggtgcttcccggttggccccgccccataaggcccccccccaacaataatcgtccgggcctcggagtagctcttcccaccggaaaataagcgaacagttctgccaatcgaaggggaagtaggtgacctccactgcgcagacgctgcggtagatggccggaggcagccacgtcacggagccgccctcgtagacgagcacgttggcgtcgtaggccactccgaactggccatcaatactgtgggctcggggaaaccgagctttttgcacaggtctgcaccctctcagagtacccccttccccaaccaagtccagcccgcaccccaggccggcttccctccagcctggcgtctggcccggttctcacttgttttccagcacaatctctggcagccacacgagttctgaagggactcgcagggtttctatacccccaaagtcgtccttgctgtagttgagtcggtaatcctgccaatcctaaggggtgggggatggaaggccgcgtgccctgcatctcccacctggcgctgcctgggaggggtttgggggaaaaggggtgccctggacaagacctcacaccattccccagatttgactcacgattccaatccagacgctagtggtgagagtctcctctttttcattctgcagatgggagatggggatgattgaagtgagatttcagggccagaagtgagctttaggacagagctcagcggttggggccagaagtgggatttttggcttaagatgagggtgggggtagcttaccagtgagatgagattcgtcagggtgaccttgaggctgatggtgacagtatcctcaggctcccgcactggccggcttcctgggtcatagttgttgaagagatggtgataaagacgcagttcctcgttcttccccacacccctgcctgcgatggggtcaagaaggaagggtcattggcaatgaagaggctggagcacctctctcccctctgcctcccctgggtcctcacaggcctctgaggctgtgtactatcagtatctgtctcctaaaccaattatgctgtgcctgggaacgaaatactgtgtctaagtctccatcttggtctctgtctttgtcttcccagtcccttcatgtcagtatctgtgtgtgtccaattgcccctctagcccctgtccgtaccgagaagccccaagaggagcaggaccccaagcggagcccttgccatcctgctgcgtggttctcagggttattctgagctctggcaggcttggagggggcatgccagggtgcctgtgtgagggggaggagggtgttagttccgggctgttaggggactgtcacctaatcctctgctcacccctgctgcagctggggacattttggctgcttccagaggcagctgccccatcctgtgtttcctgcccctgccccgccccagcccagcgtcctttgcctggtatttggccaactccccagccacagatgtgggcgtctcctgagaggcacctgcaaccacaattctagtagcagggggtgggagacactgctttcagcaggcactgttgtcctttgagtaagctgccctgtgtaggtgaccctgactgatgaacacatctggggatgtgacacaccccttgcctcccattctcacccatgtggaacacacactatcaccacccaagctcacaatgcctttcttgccgacagagtggcaaaaaacagtctccataaagacctgataaagagacaggtggtcacaggggattagccctgcggtacagagattccatctagcaaaggagatcatgtaaaggacccacctccttccacaacctgatcgccaggtttgcccatgcccagcccctctgggtgggagacttgtttctccttgtctatccctgctgccaccttgtggtcacagatgatagtaccgtcttcccatcctactctcctaaacacacacgtgcacacatacacacacacctgatgacaccttaatagatccttttgatgttcctttttaaaaaaaatttttttgagaccaagtctcgctctggcgcccagactggagtgcagtggcatgatctcggctcactgcaacctccgcctcccgggttcaagcgattctcctgcctcaacctctggagtagctgggactacaggcgcatgccaccatgcccggctaatttttgtattttttagtagagatggggtttcaccatgttagccaggatggtctcgatctcctgacctcgtgagccacctacctgggcctcccaaagtgctgggattataggcgtgagccaccgcgcccagcctcgatgttttttgtttttctgtttctttttttgttttttgttttttgcagggggtggggggacaggatctcactctgtcacccagacaggagtacagtggcaccaccatagttcactgcggctctcaaactcctgggctaaagcgatcctcctgcctcagcttcccaaagggttaggattacaggtgtgagccaccacgcccggcctcagtgttttttaaagccttcttgaaccattctaatcacctggaggggtgcttattttaaattcagattcctaggctccattcccagagaattatgatttcgggactagggtgccaggaatctgtatttttaggaaactgtccaggtgttcctcgtgaggtaggaggggctggcctaagcatattttctgcttacatctcatttcctcacagcagtccagcaaagcaatgatcactgtcctgaatacatgaaaggggatgctaaggtcgggatccagggtcacacaagtagattggcaataatgcatgagacttatcaatcaactctattgatctcgcacacctgtgtttattttacccttcacaaaacactttcgggtccatcacctttgggtctccttcccccacctatgaggtaggtcataatcacctccatgttacaagcgaggacacatcaaataacagagtgtcctcctagtccatttcccacacttgtgtaaagcctctgtttccactgctgccttatcaaccccacgatttccatttcagactccctttctgggtctctttgacccagcttacctctttgcatgtggctggtacatggactaagtctcaaatctgtgctgctgcttattccagagcttccgcgtcaaggcttgggacaagaattgtgataaatgcaaatatttattcaaacatcagtggacacct

SEQ ID NO: 1243862 - DNA, 4001 bp, Homo sapiens
aggtgcatggacctaagtgggactcaaggaccctgggctgctgacaccatgccacatagcttgaaggaataccagtcagagctctgctcaggaaggaaaggggccagggaggcaaacaatatgggcaggttcctgctgggacgaaaggctcctgggcagaaggggaagcaagtggggcaggcagtgaagctgagaagacagcaaactgtggcaagcggccaggaagtcccataaactgagaaggaagagttttctggaagaagagtagagaggggcacaggggaaggctgggaggctttggaggcaggagagcctgagcagaatctcttcccaatgtgtctatggccataccaccctgaatgcgcccaatctcatctgatctcggaagctaagcagggtcaggcctggttagtacttggatggaagaccgccaggaaataccaggtgctgtaggcttttggggttcaaggcctgggaatctgtggcccaggcgcttcctggaaggagacagggaagggccaggtgagcttcgccatgcagtgcacctctgagaaacaaacagctccagaagagcccactggaagcctggccacaccaggctggctgcgtgactgagtttctgtctctctggcttcattgcaaggggtagatgcagtgagcttaaggttgctggtggcactggccttttgttcccaagcccccttggtgtccctcaggtatgtgtgggaagaataagatcatcctgggtgggaactcactggagacaccaggctgttcctagccagaggtatcagtaggaaggcagacaggggtctcacctgcttcttgctgcggccacacacacaccacctgtaggttttccctgccaccagctccaccttgatgggggtcttcagggccaccacggacctggctggggttctagggaaccactgggcctgtggccagggaagatgaggggctcagggttagctcaagccctggaagcaccgtccggcctgcgacccttcctagtttcccactggcctgtgtgtgtggcaggtttcctctacaagaggctgatctgatgccacccaacaagaccgttccccaggacaccataggaccgtgagctttggacagggagatttcaaagccatgcaggcactcaggtttcagggtccagctgccttccctcaaacgctggctcccacctgcgtgctagggaaggcgggctgggatccttccagcctacggcagggccacccacactggggcttggttcattaggtgctgctgtcctcagtacagaagactggcgccctgcccagtgccctctggtccgccccacctccctgagagccacgggctaactccagggaataggcctgtactcttcctagctccatttcctgtttctgcctttgagatctccgtgcctgggggtcttgtgcgaggaggaggggaggatggggggactcaccagccaggaggagatgtcccgccgcgggttcaggtcctgcaaggtacgcaagcatggcaggcatcacaagacggtggtttggaaacggaaaaataaaatcagtggaaagggaaggacacgggaggccatctaggaaggaggaggtgacagggctgaaggggcgagggaggaatgagagggtaagaaaaaggtcgcaagagaaggtgctggctgcggaggtcctggcagggactggcgctcgggaaaagcctgtgagctgaggcaagccagacaccggcgggacgggccgggagctccgggatgctcggccgggccggggctggagtgggggctggcaggggcccggctggggttcgggacgggggctggtgcagggcgggggtgctcacccgggcaccacgcgccgccggccgcaggatcgcccccgcgccgcgcatggtcgcctcccgcgccgcgcccgcccgctggctccgcccccgccgggtcacctccccgccccctcggtccccggcccgccaggccccggaagacgccgcggcgttctgcgagggcggaggccaggggcgggcggggtacggaagcccgaccacggcgcccgcccagcggcctcctcagcacgccgggcgtgagcggtcggtcccggcgccccctgccgggcgggcctggcggtggaacgccccgcgcgcagcctcggcgcctggggcacccccgagggcgcaggaccctcccaggagtcgctgttgctggccgagcctaggccgcgcttctgggagcaagcgcgcgggcgtcgcgtcacctcgggacgggtcagggtcccgacggccggggcccacggactgatgcaccctgcgtggtgggcccgggtgtgctgagcgtctgtgcgctctctgccgctgagtgcggacagaagggccgcagcccacgccctcctacacccccgcagttggcacccacctcctgtccccttccataaagcgagactacgcaggggctcttcggatttttttttttttttttgcaaaacattcttttattaaaagaacaagtgctgtttacgaactgcccttcgtacaaataacatccgttatacaaagatacaagatccgggttatgcacaattccaggcttggaggtggcaggggggcatcgcctttgggctgaggatatcaaggttttagaaagaatgaaaaaggagcccctgggtttgcaatctgtggcttcccctccctgctccctaggaagggtctgctacatggaaacaggttgggatagaaagggggcgggacgggagcaggggtgaggtctccagtcccaccacccaagtcccaagttgagctggagaaagtgaacaaaggggaatgaaggcacccctcagttcccaacttttcagtaggtcaagacaaagtggtcgggagctagacacactctcaatcctgatggacatggtgggagagagccaaggctacttgcccaccttccttggaattcccagttgaagttacctcaatccctctaggcacctctccccaggaaaataagttgagataaaggagaactgggtgcaagctgcctacccctaactggcccattgcacaccaaggaagatcctagaagctggcagggggagcctgtgcctttgaaaacctgtcttcatttccaatttgggagagagaagcgtggaggttaccctttctcggagctggcccctggcttgggctcctctcatttctctagacccttcctaagagtctggggtgagcacctccctagaactcagtatgggggaaacaggcaggggtcccctcatcagcctcaaggtcaggacaccttgaggcagcagcagacccaggagcctgagggggaaaataccccacaaataggaaaaacaaaccaagacaatccttaaagtgtcattgtccatggagaggatccaccagctctgagctaagacagtcagtgccacatagacaccctcccaccccgggcacagccctgcactcacaccgtgtgtcacacacacacagggacagccagccagccagccatgtggagaccatgttgtggggcaggggaaccaagggccaggaggccacagtcctgagggcttgtcctggccctgtcactgagccccttctaggcttggagctgtcatctgtgatgggaggagctggctgaaatgacccctaaagacaggtccctttggcgctggcatgcaccagttgtgaccccacagcaggcactgcctctatatgcacccccactcacacctcctcactgagggtgggaacacccaactccacatgctcacccactcacacctcctcactgagggtgggaacacacgaagctctgctctcatgcgtttccaaactctgcttccgctctgcaaaccacatccttcccctcccccagacaaagagatctacaaatctgggtcccttcccaccctccaccattcactctcaaaaaagggactgaggttaggagacggtgagatcgttacagccatccccctgcgttggtattctgctcctcctga

SEQ ID NO: 1243863 - DNA, 4001 bp, Homo sapiens
ccctctccgctcaaggatccgcccggggcgccggggtttcggtgaaactgccctggatagggggaagggtgaaagggtgcagcgaagagaagccgagacggtggtccgaagccccgcgcggcgcacatgccagccggcgtccctgctctgagcccgctatcgaggccaccgggtttgtggcttcggctaatcggccgataagattagaggcagcaggcggcggcccactctgaccagccgcaccgcccttcggccctcggcgcgccccgtgccccgcgccccggggccgtttctgtctgagaaaaggacgggagatgacggaggccatggcctgcccgggaatggaggaggggatggccccggcctaagcaccgctgctccgagccggggacgaggctgggttgggggaggaagaggaacgtgggcgaccgaggtgcgcgcccacgtgcagccgccggaaccccggcccgctcccgcccagccccgccgcccccagccgaccacttcctcgccctgcagctccccggcaacccagggcccccagccgtggggcctcggctctcccacgcgcgccaccccgccacctcggtcaagggcgcgtccgccccgtcggtcccgcggccttaccggacagggcgagcaccgagtcgtacattttgcagctcatcatccccgtgctctgcgtgacgcagtccatccacagccccttgtacatggcctgggccgtgatgatgttgtcacccgcataggagctcatctgccactgcgggatggcggtgcaggccaccagacccacccagcccagcagggccatggagaagcccagcaactgcaggcccgaattggccatttccgccctcagaaaacactgggggcgccgggcggggagaccctacagtaaaacaaacgacacttggggggcagccccacaaaagaaaacttgaggtggagttttccggtcacccaaagagacaaaaagggtttgggccaggtgaatgcaaatcttgtcaccaaactacacacaaatcgacccctccagtgaagcgatggcctcgcggcacagggagtaggatacgccgggagggtggttccagacaaaattggtggtccccgaaggccaggcggttccctccgggcgctctcggcgaccctaggcaaacaaaaggtggaggggccgtctgggcgcgtttctgagcgccggcaagtcccaaagtatcctgggctgtaggtccgaggctgcggtgcgcagcagaggtggctcggaggtgagccagcaggtgcgggcggacaggtggggcgcacctgagtatatgtagggcgtcgggggcgcggcccgcgcgccccgggagcgcgggagggggaggcgggaccggaggggcggccgaggatgacctgacgtcaccgaagggacactcacctgaaccggaagtcgtggcccccacccctccttgcccaggtgaggaggaagaaacctgagcaccagggtcacgccccttcgcttgcccggttttgaccgccgctggggaggaggcggtggctccccaggagtcccaagctccgagtcagcccctccggactggatttccctcgaacaccgggaagccccttcctttcttcccaacaggtgcgcctgggacgctgcggggcgcccctgacaagcctcggcgccgccctttccccgccgggttctgtccaaagtgctctctcctcggccctgctttcgcccccacccgctgctctccttttttttcctgtctcctaccctggtcgatcccaccttcgggggccctggctcgatccctgagagtcgcccccttcagcaccctcttcagtgtcccggttctctggctctgctacagacacccggcttagcgtggctccccaacagccccaccttcctgtgcccccattccaacccaacatgacttacagcctgaaccctttgcactcaacctccccacctaccactgtcccctccggcatcaaggctcctaactggaggaagaaaccactgggacctaaagccggccgagggtggggagcagggtgagggctaggtcagagtcttggccacacccatcgttcccctcccttagagtcttttcagacctatcctccacctttcccacccctcccccacactcgcccgtttctctttccctcccgggcctgggcttggactgccaattgctgtgcactctgtcacgcctcactgttccgtcctccctataatctggctctctaaggtggtcgtccatggtccctcaccctgcagtcctgctatctctccccaaagcattgctccctccttcctcccggcaccccttccagccttttgctccttcctccttcatctttggtcatctccccttcctgcctttcctgctttggagcttcctgtttcactccttgtcttttttttgttgttgtttgagaggaggaagtctgtgttacccaggctggagtgcagaggtgcaatctcggctcactgcagcctcgcctcctgggctcaagcgatcaccccgcctcagcgtccccagtagctgggaccgcgggtgcacaccaccacgcccagctaaagtttttgtatttttggtagagaagggttttcaccatgttgctcaggctggtcttgaacacttgaactgaagcaatccccctgcccccacctcctaaagtgcaggattacaggcgtgagccaccgcacccagcccactccttgtcttttcgtttacctttgcgccttgtctccagtctccttggaacccagcatcagcaattaatctttctttcctcttcttaggtgcacactgcactttccccacccaccctgcccagtttcctcccaatcttcctactaccctccaacctcctcatacttctcagattctcacataccctgcttattctggctctctctcatttcattttcctctctccattttttacctcaactctctcacgttttttatctttgttttgccctctcaaacatttctctgtctttccttcgtttattcgctaaacatattaaagtcccccttatgctaagctaattgacctgcttttgtataaaatgaagactttcatgaactctttttttttttttttgaaacagagtttttgctcttgtcgcccagactggagtgcaatggcatgatctcggctcactacaacctccacctcctgggttcaagtgattctcctgcctcagcctcccaagtagctgggagtataggtgcccaccaccacgcccagctaatttttgtatttttagtagagacggggtttcaccgtgttagccaggcagatctcgaattcctgacctcaggtgatcccaacccacctcgacctcccaaagtgctgggattacaggcgtgagtcactgctcccagccatgaactgtttgttattcgtttttattgttgtacttttggattaatggtacttttctggattaatgtactcttagaggccgggtctcactctgtcgcccaggctagagtgcagtggtacaattatagctcactgcagccttgaactcctgggctcaaagcatgcccccccaccccccaacaaatagctgcaattacagccacgtgtcatcattgttctggctttgtttgttttttgaaacagagtctcgctctgtcacccaagctggagtgcagtggcacgatctcggctcactgcaacctctgcctcccgggttcaagcaattctcctgcctcaccctcccgagtagctgggattataagcgcgcaccaccacgcccagctaattttttgtatttttagtagaaacgaggtttcaccatgttggccaggctgggctcaaattcctgacctcaagtgatctccctgcctcagcctcccaaagtggtgggattacaggagtgagctaccgcaactgactttccttttttttttttttttttttttttttttttttttttgagacggagtctttctctgtcgcccaggctggagtgcaatggcacg

SEQ ID NO: 1243864 - DNA, 4001 bp, Homo sapiens
agggagaccaccattagggctcgagtggcctgcaaggccgctgcgggcgaggggaaagggcgccgtcattgctggaaatgcaggcggctccagccttcgtgccgccggccgcgcccactaaccgctggacctcttctgtccggcgccgtgttctgccgagggccaggggcgcccaggtgtccaagacctgggccaagcgggcaggtccccgcccctcccgacagcgcggccttcctgctcccgccccgccctctccgctcaaggatccgcccggggcgccggggtttcggtgaaactgccctggatagggggaagggtgaaagggtgcagcgaagagaagccgagacggtggtccgaagccccgcgcggcgcacatgccagccggcgtccctgctctgagcccgctatcgaggccaccgggtttgtggcttcggctaatcggccgataagattagaggcagcaggcggcggcccactctgaccagccgcaccgcccttcggccctcggcgcgccccgtgccccgcgccccggggccgtttctgtctgagaaaaggacgggagatgacggaggccatggcctgcccgggaatggaggaggggatggccccggcctaagcaccgctgctccgagccggggacgaggctgggttgggggaggaagaggaacgtgggcgaccgaggtgcgcgcccacgtgcagccgccggaaccccggcccgctcccgcccagccccgccgcccccagccgaccacttcctcgccctgcagctccccggcaacccagggcccccagccgtggggcctcggctctcccacgcgcgccaccccgccacctcggtcaagggcgcgtccgccccgtcggtcccgcggccttaccggacagggcgagcaccgagtcgtacattttgcagctcatcatccccgtgctctgcgtgacgcagtccatccacagccccttgtacatggcctgggccgtgatgatgttgtcacccgcataggagctcatctgccactgcgggatggcggtgcaggccaccagacccacccagcccagcagggccatggagaagcccagcaactgcaggcccgaattggccatttccgccctcagaaaacactgggggcgccgggcggggagaccctacagtaaaacaaacgacacttggggggcagccccacaaaagaaaacttgaggtggagttttccggtcacccaaagagacaaaaagggtttgggccaggtgaatgcaaatcttgtcaccaaactacacacaaatcgacccctccagtgaagcgatggcctcgcggcacagggagtaggatacgccgggagggtggttccagacaaaattggtggtccccgaaggccaggcggttccctccgggcgctctcggcgaccctaggcaaacaaaaggtggaggggccgtctgggcgcgtttctgagcgccggcaagtcccaaagtatcctgggctgtaggtccgaggctgcggtgcgcagcagaggtggctcggaggtgagccagcaggtgcgggcggacaggtggggcgcacctgagtatatgtagggcgtcgggggcgcggcccgcgcgccccgggagcgcgggagggggaggcgggaccggaggggcggccgaggatgacctgacgtcaccgaagggacactcacctgaaccggaagtcgtggcccccacccctccttgcccaggtgaggaggaagaaacctgagcaccagggtcacgccccttcgcttgcccggttttgaccgccgctggggaggaggcggtggctccccaggagtcccaagctccgagtcagcccctccggactggatttccctcgaacaccgggaagccccttcctttcttcccaacaggtgcgcctgggacgctgcggggcgcccctgacaagcctcggcgccgccctttccccgccgggttctgtccaaagtgctctctcctcggccctgctttcgcccccacccgctgctctccttttttttcctgtctcctaccctggtcgatcccaccttcgggggccctggctcgatccctgagagtcgcccccttcagcaccctcttcagtgtcccggttctctggctctgctacagacacccggcttagcgtggctccccaacagccccaccttcctgtgcccccattccaacccaacatgacttacagcctgaaccctttgcactcaacctccccacctaccactgtcccctccggcatcaaggctcctaactggaggaagaaaccactgggacctaaagccggccgagggtggggagcagggtgagggctaggtcagagtcttggccacacccatcgttcccctcccttagagtcttttcagacctatcctccacctttcccacccctcccccacactcgcccgtttctctttccctcccgggcctgggcttggactgccaattgctgtgcactctgtcacgcctcactgttccgtcctccctataatctggctctctaaggtggtcgtccatggtccctcaccctgcagtcctgctatctctccccaaagcattgctccctccttcctcccggcaccccttccagccttttgctccttcctccttcatctttggtcatctccccttcctgcctttcctgctttggagcttcctgtttcactccttgtcttttttttgttgttgtttgagaggaggaagtctgtgttacccaggctggagtgcagaggtgcaatctcggctcactgcagcctcgcctcctgggctcaagcgatcaccccgcctcagcgtccccagtagctgggaccgcgggtgcacaccaccacgcccagctaaagtttttgtatttttggtagagaagggttttcaccatgttgctcaggctggtcttgaacacttgaactgaagcaatccccctgcccccacctcctaaagtgcaggattacaggcgtgagccaccgcacccagcccactccttgtcttttcgtttacctttgcgccttgtctccagtctccttggaacccagcatcagcaattaatctttctttcctcttcttaggtgcacactgcactttccccacccaccctgcccagtttcctcccaatcttcctactaccctccaacctcctcatacttctcagattctcacataccctgcttattctggctctctctcatttcattttcctctctccattttttacctcaactctctcacgttttttatctttgttttgccctctcaaacatttctctgtctttccttcgtttattcgctaaacatattaaagtcccccttatgctaagctaattgacctgcttttgtataaaatgaagactttcatgaactctttttttttttttttgaaacagagtttttgctcttgtcgcccagactggagtgcaatggcatgatctcggctcactacaacctccacctcctgggttcaagtgattctcctgcctcagcctcccaagtagctgggagtataggtgcccaccaccacgcccagctaatttttgtatttttagtagagacggggtttcaccgtgttagccaggcagatctcgaattcctgacctcaggtgatcccaacccacctcgacctcccaaagtgctgggattacaggcgtgagtcactgctcccagccatgaactgtttgttattcgtttttattgttgtacttttggattaatggtacttttctggattaatgtactcttagaggccgggtctcactctgtcgcccaggctagagtgcagtggtacaattatagctcactgcagccttgaactcctgggctcaaagcatgcccccccaccccccaacaaatagctgcaattacagccacgtgtcatcattgttctggctttgtttgttttttgaaacagagtctcgctctgtcacccaagctggagtgcagtggcacgatctcggctcactgcaacctctgcctcccgggttcaagcaattctcctgcctcaccctcccgagtagctgggatt

SEQ ID NO: 1243865 - DNA, 4001 bp, Homo sapiens
gaccagcacaagtcctcagtcacacaggcccctcacacccctggggacccacgtgatagcgatatgaggggtcccatggtcagagctgggggcaggggcaggaggacacagggagagctgggggcagccagcccttcatgggcttatgctcacctacctgctggacaatcaggttcacaaatgagtttccttccaaacccaactacttatctttccctccaccaatgcgcagctctcatccccaccccacagagcatcagaagctgggtccactgtgatcctccctgtcccagtctttctagagaccttgcatcctcttcacactaggcccgtcagaggctggggcctgacctcctcagagttaggacccaccagtgcgcgtggtggaggtacagaaatgataggagaaatccttctaaacatataaagagggcattttaggagagtttcccctttcctcttaccatttttaaacccctggactttcaccttattctccaagtactggaagttttcatacgtccttgtcatgcttgggccaacacggctctgaggttgtcacagctgaaatggaggcagggccggcgcccagtctggggtggagctggggaataggaggttgggactaagttggagccaagggcagggctgacgttgagttgggagatgaggctcaggttgagaatgagcccagggttaagacggaaatgagcctgggtttgcagtcgagttagaattggggtcgagttgagtttgggagtgaaactggagggtaacgttggagctaaacgcattgctaggactacccagtgggccagttaatcaggcaggactggaggttgtatctcatgctaggattggggtcagtatgcacgttggagccatggatggaattggggttaactttggtggtgaatttggaaacagaatagagtcgaggttcaattttggctttgggctggtgttaaaattcaagttgattctggggttggggttgaagtaggagctgggtggggggcgacaggtgcggtggctcacgcctataaatcccagcactttgggagaccgaagcagacagatcactttaggtcaggagtttgagaccggcctggccaacatggtgaaaccccatctctactaaaaatacaaaaattagctgggtgtggtggtgtgcgcctgtaatcccagctacttgggaggctgaggcaggagaatcacttgaacccaggaggcagaggtggcagtgagccgaggttgtgccgttgcactccagcctggacgacacagtgagactcagtctcaaaaaaaaagaaaatgtagaagctggggttagtattgggattagggcatggctgggctgagatgaagataaggctggaaatgggccaccaatgaggctgagtctgagtcttagtttatttttatttttatttatttattttttgagatggaatttcgttcttgtcgcccaggctgttgtgcaacgaggccgtctcggctcactgcaacctctgcctcctgggttcacaagattctcctgcctcagctcccggagtcttagtttatgacaggggattgtggctgccgtaacccaatctagaatccagtgaagggaacagagtctcaaatctccacgtagtaattaaaccccacactgccgccttatatttattttcatttagtcccacccaagacccaaagtccccctctccctgcttcctctgacatcccctgtcccctgggtctcaccggcaccggcagcaccattacctgtgggaggtctggagggtgtgattcccacgttggttgtgctgcaaggaccagaggtgggacgtcactcagagttgggagcgctgtgtcctggagagctggggtagaggtgactggagtcctgctggtcttgggtctgaaatcccaggagccctatcatctgggacatcccatctcctcaactttagacagtaaatgagaatgaacagggattagaacacacagagaccatgtgtgggtggggagagttgggtttgaggccagctctgttctcctcctccaggccatgcctacttcctttcctcttctcggagcttcctcatttttaccatctgggagcagggctggatcagaggtacaatctgctgttgctcctctaccctacacttcctttcacttcctgcctctacatttcccagaattgttgggtctccatcatcgcacctctgatcctagagaagcccagtctgttctcttgctcaatcctggcctgagtccctggcatcagcatcctctgggtcccagtcattcggctgctcagctgtggcctcgctcgcctcactccactcggaaggagggaagggggtgccagagaatagaacttcttggccctaataggacgggagaagccaaggaaaagagcaaattttattgagtaatctgtgataggattatgccagacatttaccttccacaaccattccccccaagcacctggggaggcattttggatgacggactaaaggctcagagcccaagatcactcacagcttgtaaggagacagtttggcaccctgctctggctctcagcacaggcgctgtcttcatgaacaggattccatttcatcccatgatccctgctcaacccctaagggagctgccctgaatccacgcgcacatccctttcagtaggaaggaaactgagtatcttacaaggtggagaaggagaagaaatacattttaggttatattttgtatgtacatggggttgtgttctgctatgtgctttttttttttttttttggagttaacaagctatcaggaacatttctccacatcagtttataaaatgtacttgatctacctgcacctcatttcatcataggcaccgtaatttatttatttagcatttctctattgacagaaataaatcagaaatttaagttgtttctttttcttttcttttttattttatttatttatttatttttttgagacagagtctcactctgttgcccaggctggagtgcagtgacacaatctcggctactgcatctcctgggtttaagcgattctcctgcctcagcctcccgagtagccgagattacaggtcccgccaccacacccagctaattcttgtatttttagtagagaggggtttcaccatattggccaggctggtcttgacctcctgacctcacatgatctgcccgcctcagcctcccaaagtgcagggattacaggcgcgagccaccgcacccggccaggtcgttgccagttttgtttttatttggtattcggtattttgattagtatatgtcgcaggttcggtttttggaagccaaggttgaggctgaatttggggtacaagctatttattagggattagcacttcgaaaaggaaagtggatgaaatggtgctgggcagagggagaagcccagcactttggagagcttcaaccaaaccaacagggagctctgggttcaaacaatgccacccccgggagctgtccagcattggactgccacagggtcctgtagagcaccagctccttcggtcactggcagtcagccctgacatgggtgtgacctcaggaagcagctgtctgcaggttacactccccacagtgggtcaccacatccttcctagaagggggacctgggtagctctctgtgtgtctaccacagtcttgcagtgtattcacatattaatttggagataatcaacattttgacattgttgaatcttccatgaaaagaacatgatatttctccattcactaacttttttttttcagtctggttcagtgggtttgaagcttctttttttttttttagttctgggatacatgtgcagaatgtgcaggtttgttacgtaggtatacgtgtgccatggtggtttgctgcacctatcaacccatcacctaggttttaaggcccgcatacattaggtatttgtcctaatgctctccctccccttgccgcccaccccctgacagaccctggtgtgt

SEQ ID NO: 1243866 - DNA, 4001 bp, Homo sapiens
ttacttcagatgagttatttgaaaattatagatgactgaggaaagtgcattatttaactcattttatgggtaaaaatttattattctttacatttcaagccttaaaggaaaataagtccttgctagtgcaaacatggtaatacttgcaaagaaatatgaaattatgttacttatagcctgaatgttaaaaccttttattaacaagaatcctttatgtatgctatgccaatggggaaatgtaaataaaaatggtcttcaatggtaaagtgtctaataggtcactgatatcagtgtcatgtcaaaccactgcattccctgtcattatggaattagcccttcagacgactgagctgaggcaggtttctttaaggggatatttgggaagaaagcaaattaataggaataaattatttaagctacagtaaaaaacaggattggtgacacaggaaaatcaaaagctctgaagaggtttaattcagtgaagccttccaatggtcacctgcctaggcccgccactggcatgttgccagataacaatatgttgcctccaggataaggaaccatggggaagaactctagaacttactaaagggaagccagtcacagaccaaatagccctgcaggtctcagagcagctgtgctgtccccagggctctgttcaattccatgcgatcctgaagaagatattcaaaactacctgctactactcgagaagactaaaagataacctctgtatcactctttcctaccttccagaaccaaagaggggttaagagccacaacatccccagagaaataaaaaaagggggaaggggaggcgagtttccttagggagtttgaccgcacacactctgagattgacatagctctaagaaatgcgttctcccattctaccctcgttccgttctttcagtgaccttctgtccctactgcctcagggaaggcaagagaaaagccaccgcctcaccaccacccccaacccccaccaccggagaaggtgcctttctcagttgagagccgcagagggagggaaaaaaaaggttgctcctccccaacccacccgccccacaactcctgggtgcagacacgatgagggaaagaggagagcaatggaaggtgacagccccgcactggcccaggggataagaatccttgctctggtagaaacaagggagaatccccctcccactcccctacccaaatgaatgaaatgaataaaatggggagagagtttgtacgcgcagttctggccatccaggaagcaagatcgagaggcctttggatccaggcctggtccttgcagctctttgcaccccaactcctgtcctttccatccaagccccacatcatttaatattttaagctttccaagatagtgccccctcctccacctaccccaatcaccgacaacccccccgcccctccagctccgatactgctcgggcccagactccagcgtcttccatccttcctaccaccttctccacagccctcaccagcccgggcccggccgcacctggagatgctcctgaaaacgaattggcagaatctgggccatggcgctgtcgggggttatggtctcctcctgtcactggggctgcggggcagtggctgcccgggctctccaagggagaggaggagaaggggaggggggaggctgggctcagcaggatcctctccggggacgcaggaaactggcaggcagacgaaagagctcgggtcgggggcggaggctccaggggccaggagagccgcaatggcggaaccgggcgcagcgcagactccggaaacggctgagcccagcggaaggatcccggcgacagaactccgcccagtcgcctcaccccctccgccttatgtacccctccacggagcgccgcgcgcggcgggcgcaggaattcggggcgcagtgcgcccggtgcctcgcttcctgacgccacatggggggaaacagaggaaccggagggactacttttttagactcatcactttcgccagtcttctctttctccccccactttttttttttcattttgccacatcatgcgactcggggcgaccgacgtcacttccgtgggcgctttaggtcccacccacgtacttccaggtgcacgtgatactgatggggaagggtcggctgattgctgccagaaatggagagctcgttttaaggaaatgcggcgtctcctgggagtgaagaggcttttgggccaccttgaggcatgacgggtgccgcttcgtttccctgcgaccgctgcctgtttcgactgagcccctcacaggaggacgtggcgggggcagacgggcgcagcctcccgccctctccgtgactcagggaaacggcctcgccgcagagcgctccctcggcagctggctgcagcactcctcccccgccgggcttcagagtgggtggtttcctacagcctagggagggggcctgaaacggggtttaaaatcttccctgccctcacacaagcccttctgactgttggagaacctgacgcgcggattctaactagaactggcactctcttcgggtgttagataattaactcaaaggacagcgaaggccttttatgatgtctttcaagctggccttatgacagcttttcttaacgtttctgcggacattttggcggacttgtgtcggcctagctcagtgatcagtttcgttaaagaatttgagtatccgaacattaaaggattggacctaaattctagcaggaggatttttagccacatcaaataatttacgtctcaaagatttagataattagggtaaggatgcttagtaaaacccgaaggttccatcgcgccactgcactccaacctgggcgacagagcgagactccgtctcaaaaaaaaaacaaacaaaaaaaaacctgaaggttcctggaggaaagagatgaactattagccgtgtatttcggtgggaccacctcaacataggttcctgtaggttagcaatgtagaaatgtagcgcttcaaagccggagcatcctgtcttcaaagagcatgaaggtatcaacggcattcattgtcgattaataataacctttctggtactttcttgctaaagtataagccataataatatttcataatcgcaccaatacaataaaggatgaaagacgttagttctgtgccttttatctttgtaagagaggtgattctccccccccaccccccgccccgccgaaagagaaaagctcaagtccacaataattatttttagtgtccttttcagttaaaggacataaaaccctattgggtagacgatagttttgtatgctaagcagtttaggttacagtgagaagtttgccaatcattttagttgcttttagtgtttttccctttacttaactgtctcacatactgagcatgagagaagagtctggcaggtaagagggcaaagattgttctgcaaagaaaagccttgccaccatgttgtaagagtgaatatttatgcttgcaaaatttctttttgtattgttaagctaaatacacgaagatcctctgttccgcaacatttgaaataacctaatgccagtctagtaataactgctttaaaccctttttggaagtagacaaattctaaattaaaattctaagggagtaattgttttattacagtaattcaatagcttgatcaagtcaccttttcaatctcagaatccggagataaaagagccgtatcatgaatgggccaccaaaatttaattagtgtctggcattttcatacagaccctgtaactttaagtacatttagaatcccaaaagcagttgattttagctatttggagtggaatatctaaccaaaaagtgcgctgaggttgttagtgactgctacgtcatcacacatagaaattacactgttttgagaaataatttaggaagaggaaaaatagatcgtgatatcctgggtcattttgaaatgatcttcaaattaatccaaaaattttcaagagaaaaaaaaagtcaagatgataaacattaaaaa

SEQ ID NO: 1243867 - DNA, 4001 bp, Homo sapiens
gtattcccaggaaggtaaccaacccttgcccccgaccctcaatggcctagatcagctccttcctaagggggctgaagagccttccagagctggatctcagaggtcagaagccttggttctgatgctcaggtgggccccagctggggggtcttcattaaggctccttccttctttcaatagatccgggctggctgtaacgtaagtcctagctagctgtactaccttcccagggacgtaggagcccatgtcctgcccacgagtatgctcccagtttccccaaaacaaatagctgtgcccttccctgactcagtttacccccgacagagcccccccacccccagcagagttaggaaggggcttcactgactccctcacagaaatcctccaacagacgctcgtcagccccctagttctcagcacgggatccaaaccaacacgcctgtcccagcttcctctgggccaggccacggcagccttggcttgctggccatgagctggaatccaaacacttcccttaacagctaaatcgctgtgtgaccttgggcaagtcacttcgactcttcgggtctctgctagaggggaaatcagccaacctcctctcatccagcctgcccccactgattcagagccacatcagcacaaagcctggtaggttggggcgatgagcatctgctcttctgcccaaaccttggccttgtctagacaatcagcagtactgccccagcacctgtccctcaccccaaggcaactccgctatgatgggaacagggtcagagggctgaacgctgtccccatcctgattcccaagtcagccctggcgcactcactgaagctaggaagggagatgatgaggcgttaagaccacaagtcccaactgaggacagtcgacggaggagggagggactgggggacaggagtagctctgcacctccactgccacccagagcaaagagggcctgaggaagatgacgactgagggcctgggaaggggattccagccccaaggctggagtctgagacacggtggagggaacagaaggaagagaaggggctcaggagaaagggaaagcaggccccacccgagacaagctgcagccactgccacagtcaccaccatacagcccccatgggggatcgctgggagcttgactccacactaacgacctttgccttaaaaacagcaactctggtctgacccacttttcgcaataaggcaggttaatgatcaagttctggcacaaacacttccccctgccaaggagtttggctctgccccatgcaaaggcagacgccccctacaccaggtcggccgagcaggccaacacacctgagagtctccgccacagcctgaagacctgcggttatagcctggcctcagggcatgaaccagggacgcccctcacaacgcacaccccgcacctcgtgctcttcccacaaaccaagcctgggaagcctcgagcggagcttcactcccagggctgcagccctgcgcacaggggatgcctgggaggccgccgcggagcaggtgccgaagggggctgtcccgcaaacgtcggagcgaccccagctcagagagctcccatgctcgggcgcagagggggtggggccgccgattctttcggtctgcggcggcggcgcaccccgaaaccgcgtgtgcgcgcacgtgtccccgcgatgaggcgcgcgtgtgcccgccgagggtgccagccgaggctgccctccacgggaccgcacgtgcgaaacccgggccgcagccgggggcgactgtgaaggtgaccttcagcgcgggggcgacccggtgaaggccccagcgagatacaaccgggcccgacgcggagggaaggcggcgatccccgcggagtcccgaacccgcccgccctggtccggcgccccccgcccagcggcccgctggccctggccccgctcaccggccgcgcccggccgccccttgcccccggcctgcgagccgtgttcccgggcgctgtcggccggggcggccgccggcaactcgtccgtcttgataaccatggtggcgggagcgggcgtccgcctcggctgtccgcgccgcccgccgcgccactaacccaagtgccctgcgcgccgcggctgctgagggaaggacggagtcaccggcccacgtggtgcgcgccgtggcctttgaccccgccgccgtttccctgccccaccctcgcgcccggcccagcccacggcggcccgcgagggacaaaacgcgccgcgcctggttccccgcccacggacgcggtgactttccagaacgtcttaaaggcaacgcactctgactcaaggcccagggaggctgggcgccctcgcggggcggggcctcggggagactccctgctgctcgctgcccgtcgggcgggcactgtgaccttgggtggagactggtctggttctgccatggctaatcctcccctctccaaggatcccctgttttctcttgcagatttgctaaatgaccgcgcagtctgtcatctgcggtgttcgcgtgaccctcagcgccctccccacccggcaggccctttcccgccgaatgggtgcggctggattattgagggagtggagggtcgcttagggcacgggcacgagaggcgagggcgagacgtggctaatggggatcaagagtcagaatggacccgccaaactttgccccgagccagaacgggctccctacccgcgtcctcgacccatgggtcctcacctccaggctggtgtcctcattttacagtggaggaggccgagaccaaggtcacacagagagcaaggggtagagccgggtctgactccatccacagccaggacgctttaactcgtatttttcacttggcaggggcttggcggggacggaacggtgaggtcagagaatgctgcagaggggacattgggaccaggtcttgcagtgagttgaagtgctccaggcagagagcgccggtgggtctttcctggccaggccgcagggggcctttgggaagcacccgaggcctataaccttcggagcgtttgtcaagctctaatgagaactggaaagcttcagcttcccgaggtgggctgggagggccttaggtagggcctcgcacaaattgcgaaggaaagccgaccttgttctggagagcacgtggtgaggaaagccagcgacttgatgtgagcatttaaacgggaggaaggaagatgagaactggtaagattcttctcggccgggcggtgcagcggctcacgcctgtaatcctagcactttgggaggccgaagccaggcggatgacttgagttcaggattcggaagtttgagaccaacctgggcaacatttcaaaacccccgtctctacaaaaaatattgtttaaaaaaagccaggtgtagtggcacgcgcctgtagtcccagctacttgggagctgagctgggagtatcactcaggacggctcagattgagcccaggagttccaagctgcagtgagctatgatcgcaccactgcactcctgcctgggtgacacagacaccgtctcaaaaaaaaaaaaaaaaaaaaagccgggcgcggtggctcacgcctgtaattccagcactttgggaggcagaggcgggcggatcacgaggtcaggaattagagaccagcctggccaagatggtgaaaccccgtctctactaaaaatacaaaaattagctgcgcatggtggtgtgcgcctgtagtcccagctactcgggtggctgaggcagaagaatcgcttgaacccaggaggtggaggttgcggtgagccgagatcgcgccattgcactccagcttgggcaacaagagagaaactccgtctcaaaaaaagaaaaaaaaagtgtgcatatatatatatagtgtgtgtatatatatatagtgtgtatatatagtgtgtatatatatagtgtgtgtatatatatagtgtgtatatatataagtgtatatataaaatatatatatttataatcaatatatataaaagtgtgtatatatgtgtgtatat

SEQ ID NO: 1243868 - DNA, 4001 bp, Homo sapiens
cattgtcgcagctccttcttgaaggccttgtggttccccagctcttccaggaagacctggccggctttgcggagggtctcagagctcttcttggtcaggaaccagccgaagtagagcggcaggaagtccttctccagcccaggcttcagcttcttcaggtcatcagccgacagctgccactggttcttctccttgagctgggcacagtccagccgccacgccgtcttgggctccaccagcaccacctggtactggtactggtcggccatttcaaagagctgctccagccgttcccgttcgtggttggtgtcatcaagcacaagaattctgatgtcccggcggcggcagtaggcagccaggtcctcatcgagccgcttgtactcctcggagaaggctcctcgagcgccgggggtgatcttgtaagcgtcagccgacaccatcttggtgccatcacggtacttgtccacgatgacccgtgccagcgtggacttgccgcttcctggcaggccgcgcaagatgaagagcgtcttgcactctagcagcgtggccactgtgtcctcatcctgaaggaagggaaactgcagctcaggcttgtccttggcccctgaggatgacatcttgcggaagaagatcttgggcaggaatgtgtggctttttcgggagaagcctctgttctgtgtaaggaggggaagagatgtcagcccaggtcattcgcgggctccccgccggccttacccctagtccctagactggttgtgggtgccttcccaagcggggcagtgctggaccttctttccctttcggtccgggagcacctttccgcttctggtcgtggaggaggaagagggaagcttgtctgaagctctcctaagcgtgcgctttccccattcctgccacttcggaaaggtaaacgtgctggaggcatgcggggcgcgccaggagcctgcggttctgggactggcctcactcttatatgcttggcacctactaaggacgtcctctttggaggtgggggtctctgtgtctgggccaagccacagctgccacggctgagtgcacagagaagggggggagtggagaagggttaccccaagactgcctcccttcccccaacaatggccgcaacagataatactctcttgtctggcatgcgggtacaatggtcccacagaagggctggtggggggcagggcaggagagcactggacaaaggccctctttcaccaagcctgccacctcctcctctaccctctcccggcccccacaaagtcgtggtctttgtgcctgtccagaacagggcagcacagggcacctgcaattaggatccagctctacccgccgctgtgctgtgtgtcagaagcgcctctcggagccacttgttttcctatcttctagaagccacaagggacggcagcttttaccgtaaagggtcccctcctctgaactggctccacctcccgcccgcacccgggcgcggggcagcggttccgcgtgatgagactgggcccggggagggggcgccgaagcggctgccccagcgcgggcctgcgtggggtcgggagcagctcccgggctcccggcccaggcccacccaggctcccagaggcgcagcagcttctgcggtcccgagttccctcctgagaaacaccaccgtttccctttacagcggcctctccggcaccccaaaacccctccgcttctcccagacctcagggccgccctgagtaccaagaaaactggaagtcgaacccggagccccgggtcctcgtttgcaagacgcttcctcccgaggggccccgacactcgtttcccgccctggtgctaccccgtgcccggccccgcccggcctctcaccatgatgaggaggggcgccaccgtcgccgcctctgccggcaccagcgctccggggccgcccgcctgcgcggagggacacgggagtccagcggtggcacgacccgagcccggccgctttacatagcccggggggcggagcgggcacccgggcgggctgggggcgggccgtctcctctgcgcgcaggcgctgcgaaccaaaacccgaaactctcgccgcgcgcgggaacctcggcccggtcccgccccctgcgcgcgcctgctccccacgcgcacccacccactgcgcctgcgagctgagcggccactagctttttctgcgtgttgaggggtaactcagtcaccctccccggtcccgtggattagcaggaagtgagtgaggcagggtcgtgcaaagtcggatcctgtctttaatttttgatattttattcatcatggacttttgcattaattaaaaacttttttttttaccacattggattaaaatattatcatgcaatttgctggcattccggtaaactctgcatctgaaatgcctcactggcctcattcgtccaggccctgtgccagccgaaagtcagtctcagccccgacctttccttctaggagctgtggagacagaccaggatggcaatggccaaagggacagatgagtaacggagtgaaatcctaacatcctctgaggccagatcctcagctgccacctcctctgtgaaaccactgagagctccgttggatttttgagtttcctgtccaagtgctgtgctaagcactcagtcctcgcagcaacccctgaggcaggtatcccattgttcagaggagaagccagcttggagagcctgatttacctgattatgccacccagaggtgtcagaggcggagtctgtctgccctcccgactcccaggccactcccctatctttggcctcactcccagcattcgcttggttctggcttgcggcattctcctacctgtgacagctggggccgccccaccactgttccatccataaagcctccccgctgtcctgcgcactggagggactcagtcagtcaccggtgtgtgggaagcacctctcctcccaggccttcccctctcctccctgtgacttcttgttccctgtagcgcccgtatcttcaccctcctgaaaccctttcttcttggcacctttctcatttcttccacgatgctcttccaagaatgggcaggggtgaagaggcaaagtgacagactcagggtttgcaagagtgaaagacacctatttaatggcaaaatagtgatggaaagcagcagaagtaaaaccctcatttttcctataacagacaaatcgcttgaaaatccagtttaataaaatcccatgatccctctgaacaccagcttcctgatcctcatctctaccgatggcttcattcatattccttttccatctcatttcctgtttttttcgtttctcctatttctccaaattgtgtttttcccagttcttctggctctcttctgcccacttctgaaagtttctttagttcttctggttcctgtctgctgaattctcctgagagtctttgctctaattctcccgaaggcctcctataaatttctcttgactctcttctgccagcttctagtagcttcctgcctgtttctcctgatcttgtgcctaattctcctgacaggcccttggcaactgctcccaaatcgcttctggcttttcctgcttccacactctgctttccgcttgctgggctctgcagagcttccccaaaagcctcatcgtcctcatctgtctctttctcatcctcactatggtcccactgcttcaccaccttctcgggctcatctctcactctcctcatgtccttctctcttgttattattctatcttcatacagtgaagcttctgaaaaataagagaaaagcgggaagaaagataaaagtttgttcatgtcaggccgggtgcggtggctcacgcctgtaatctcagcactttgggaggctgaggcaggcagatcccttgaggccaggagttccagaccagcctgggcgacacagtgagaccctgtctgtactaaaaatacaaaaattagccaggcgtggtggttggcgcctgtagtcccagctacccggaggctgaggcagaagaatcgcttga

SEQ ID NO: 1243869 - DNA, 4001 bp, Homo sapiens
acgttttcctccttcacttcctaaatttatccacagcagaaccctagactttgcctctagaatgtttttaatccaccctcccttgttattccctctgccctatcacctagcctactgacattgactctacctgtctgcctacatcccatctccctctggtttaatccatcctttacctcctttacatcactgccaaaataatgtttactaaggcagggttaccatcgtatcccttattttaaaaccttcactcccttatttaaaaaccttcaatgtcttcttggtttcctaccaaaccaaggataaactcttccccttggcattcaaacttccacatggaatgtctccaaactacctttccagtattaatttcaactattcttccacatgcactggccaacatggactacactgtacccacatgcaccctaagcaccccatttccatagctttactcatgctacctctttttggtagaaacactgtctccttcctcccccttcaccaacccaatgtcctccttccttcaaggtctgcctgaaatgtcccgatgcctgggccatcccctgaattcttcctattaccccatcgctcctctcaacccccataaacgcttgttttatttctctctgacgtctcttatctaaccatagtacctagtcattgcatatttgttctaatatctcccccaaattgcacatggtttgaaggcaagacctctatctctatttcatctttcttttctctttttttttttttttttttttagacagagtctcgctctgtcacccgtcactcaggctggagtgtagtggcgccatctcagctcactgcaagctccgcctcccgggttcatgccattctcctccctcagcctccggagtagctgggactacaggcgcccgccaccacacccggcttttttttgtatttttagtagagacggggtttcaccatgttagccaggatggtctcgatctcctgacctcgtgatctgcccgcctcagcctcccaaaatgctgggattacaggcgtgagccaccgcgcccagcctttttttttttttttttttttttttttttttgagacggagtttcattcttgtcgtctaggctgaagtgcaatggcacgatttcggctcactgcaacttccgcctcctgggttcaaacagttctcctgtctcaacctcccgagtagctgggattagaggtgcgcgccaccagtcctggctaatttttgtacttttagtagagacaggatttcaccatgttggtcaggctggtctcgaactcctgacctcaggtgaacctcccacctcagcctcccaaagtgctgggattacaggtgtaagccaccatgcctggccctctatttcatctttctagccaagcggtgccactcaagtattccatacatgtcgaagaaatcaaggggagggcactgttgtgacttatccatcactatatccccagcaccccacagagaggtgttagcaaacattctctgaatgaataaaatcaacggaatctcaaggtcggtgcctgaaagacacaagccccagtctcccaagaacccagcaccccggccctgcagccgcacccacgatctggggctccctgaagcggcccagccgccccgaagcctccctcactgcttgctcattctgctgggccaagtgaagcagggcgtcttcaatcgtctctgtggcgacaactccaaactgaaagtcaacgagggaggccgatcgtggcctcatgggtccgtccatattcacgagcctcttggggcacctggacgggttcactggatccacataccgacccccttagctcctctccagtcttctgccacaccctggattcctcgtccccttccaatgagtgtgtcgtcgcctcaagtctgaggaaaacccaattaccaccacagcctcgaaccctccacagctttttcccgccccaacggccacggactcctcagccaatcagaaagcacgtccgcttctcacctcccgcgtccatcccctgtgcccgggaaccgcggctctgccccgcaaagggcacgcggactacaactcccagagtccactgcagcggccaagggctactgttcccagcgaggcccgcgcggcggcaccgcgaagggaggagtggcaacatggcgtcttcgggagctggtgaccctctggattctaagcgtggagaggccccgttcgctcagcgtatcgacccgactcgggagaagctgacacccgagcaactgcattccatgcggcaggcggagcttgcccagtggcagaaggtcctaccacggcggcgaacccggaacatcgtgaccggcctaggcatcggggccctggtgttggctatttgtatccgtccgtgttgtagactcaaggggaccgcatataggggcaggggaacagagtgtgcaagagggctgaaccacccgtttaattttggggtaaaatgggtagtactttcctttgttattcctaaggtactcttttaatttgatttattaataataacggaattggggttcagggtttagaaacagcagcggcgggaagccggaatcactgatttgggagagtaacaagagtggtagagcaaatctaggaaaggggaatgtgcatattctgtgtggtttcctgaacctacctccccagatggttacaccttctactcgatttcccaggagcgtttcctagatgagctagaagacgaggccaaagctgcccgagcccgagctctggcaagggcgtcagggtcctaatctggatgggtattgatcatgtccaacctgctggagccccttcacatggtggatgatgccccatgaccctgtagaaattgaatcctgctcacaacattgttggccttcttactaaccttggaccgtgattgagcccaagaaaccagggacttacgcatttggccaatgtcaaaagaacagaactttgcccactgcacacttgctgtgtacaatgactgagccctttcttgtagtttgtttccttgtttgagaggtgtgcatgcgaccgtggcttttcccaaagtttctgactttgtggtttacccccttcaccttccagggacgcagttgttacgaggttagacgtggcagctctgtgcagtgtttgagcctacagtgggatacatagggtcaaattgagaataataaactgagtcattctcctggagtcaagtgagtatggaggctgagaggcagcatatggcacttcatgctggaaagcttcacaagcagtagctgcagtggtggcattgccccagggagctgtaaatgtttaactagaattactttttccatgagatctttccacctgatttaagggagagatcactgggcagtttgagactgaacccacgtcttaggggaaggaaggtcactcttctgtcctctacccacaagaacatactgtaactctactgcttttcccatccccagagagagggagggagagagaggtggatgaagggtgaaagacaagcagtcttcattcttttaactttccctggtacctgcctatacaggtctagggtggggtctggaggggatcctaacttagtcaagtggatcactgaccttgcagtttcctcattaactgatggcaggaagccagagggctgggcagcttccacccctgcctcccattgtgaaaagaaagtcccttttaaatcctcccctgcctcaccccacaagtctttgctcccccaattcctaaggcatggcatatggattcacggcgttcttgtttccagcatttttattggttgctgctaatgtggtgtgagcatatcccctacactctcccagctgggagtgggcccctctagaagcatccaggcttgggtgggattgcttagtggttgactcttggcaggggaggtgctagagatgaagatggtaggcagcagaactaacacctccacacagcaaacagttcacatatgtttggctcttcactataatggagctg

SEQ ID NO: 1243870 - DNA, 4001 bp, Homo sapiens
agcccacaactttcacacccagccaatctcgacttctggaaagtaaacactccttggtcttccctgcttggcggctttgcccgcacagtttccataaagtgccctgtcccacaatcctattatttcctcagacctgaaatcaaatgtcacctccttaggaagctctcccaggttttaccctaaagtgtgttaaaccctgtgaaccgagtgtttcgcgcacgtcctaagctgacagtccctctggacagagtccctggagtggagtcactgctccttgtccgagccctcaccaccaccccctccattttcccagaggctggtgcccggcccagagcctggagcagaggaagctccccaagtgttaccgccttggcgcccagagtaccgagttgtgccctcgctggtagaacggtgtccagctgtccactcggtcgccgtagagtagcatgtaacgtgtgacccagtcccaagaattaaaggagccctgtgtggccacggcccggatccggtgcttcttcattaagtctatctggagccagggattcggatccccaatccgtggtgaccacccgcttatgcctatagaaaggacaggagctttaaccggctatccctctccccgaagtcctccggaggcccccacccttccgcggtgcgctgccagttggcagctgatgttccgcggagctcaccgtgcagcctggcgaatctcggcgcagtaaggagactgtagtaggaggaggcgcccagggagcgtgcatacaggggacccaccagctcctcgtcgcagccgtctagggtagggaaaccgactgttagtcagcgctggcccctcccagacccttccaaaggccggcccacttagcgaccgaagcttccccttccgtgcccccaacccccgcccccagaggcacacccagccctaccttaaagccatctattcaatcctggctgcagcaacagctgcatgctcagaggaggctaccttctccttctaggcaaacccctaggctacacctataggcccaaggccagaccctccctagctagcccaatacctgccctggtttagtactttcccaaactcaatcctaaacctcagcatcttccacaacctaagtcaacccaagacaccaatccagctccaaccctagcctcaatccaactcggcccccaaaacctgcaccatccccaaatacaggccttgcacccaacctcagccagtgctagcaccatcaccagctccatgtccagccttagcatcagtcaggggcaccagctcctgcttggatccctgccacaaaacccagccccagccacaaaccccagccctagccacaaaccccaccccttggccagctccaaagtccagccttaagccctggcaaaaccttaatcctagtatcggtcaccagtatacacttatcccccagccctagcctcaaacccaggcaccagctcctgcttggatcccaaccccaaatccctgcccgctgacttcatcctcttcccagagcccagccccagccccgggcgcgcgcggcagcctcagagctgcaatgcggagcgcgggggagaggcaggaaaagatgagagccagcgggcgcgcgccggccgggaaggacccgcgaccacccagccgcaatgcggttcggggccgccctgcaggctctggactcctgggcccaaccccacctgcctccaagcccaacactcacagtagccccagccctcggctcctgagaccgcggcgagcaggatgcagaagagccggagatgcatcatgcagggctgacggtcccggcagccgcctccctgtgaacggctccggctagggctcgagttctggcttgggctccaagctctcctcctggggtttgcagcagaccgctctctcctccttacccacccttccctccctctctcctttcgcccccaagcgctctgtctctcctctctcttttctctctctctctctctggttcctggtcctccgctcttctctctctatcctctcctttccaccctctttcctctcacctccccccttccccagcctctgtctcctggcacgcgccggtttcccggaccccgcgcaagcgcgtgcctcagccctgctgcgaaagggcgggggtagagagcctctcgccaccgggaaaaccccaagtaacccgaggctgcccgggactagggccacaggagtgaggacagggaacctagggccagaagcatcctgaaaatttcaagaaaagggaggtggtttgggggaggggtgcctggaaatggaatgaagggtaagtaaaagaatcttaacattttcggaaggcaaattatgctctaggagtggtgctgggcactgtgaatttagcatttttgccctactccactttgcagatgaaaaacctcaggctcagagaggtcaagaaacttagtcaatatcacacagcaaatgattatattccgaagcccgttctttcttcactgacaaagacagtaaattattttttctttctttcgttcattcttttttctttctttccttcctttttttctttctttctttctttctttcctctttccttcctttcttcttctttttttttttttcgtaaaatccagatcctgcacaagagagtgaagtcttttggaggaggtggaatgggaaagtgaccccgtagaccctaatccccacctccctctcggcccctctccccgcctcttccttcctgtcccgctagtagtttaacttctaccccctgtggctatacctcagaaacctgtgtagccagagatggggacggaggccacagagcaggtgggagtgggggcagggagggggagaagggttacagagagggaggagacagggaaggaatgggattccccacctggcaatgggcctctgccatcctatggcttattcaggattcttggcgctgtctcagactaggggtcctccagataaatgggctggtggtgtgaggctggggttgtgggacagggactagggctgaggggaaaggcgggttgaacctagaggtccagggtcccacctgggccctgaaaacctgagtcccaaccctggagacccccttggcatgagtggttcagtgtgctggtattggaggtacagggaaggtgggtatggaagggaaagaagagaaacagaaacccactccagacggaggttggagtccagggctcaggtctgaggcaaagcctgcatatgggcatccttccaggagagggcgctgcaaagggaactgaagctgtaggatttattaataatacaaactttgggctgggcgtggtagctcaggcctgtaatcccagtactttgggaggccaaggtgggcggatcacctgaggtcaggagttcgagaccatcctggccaacatggtgaaaccccatctctactaaaaatacaaaaattagctgggcgtggtggtgggcgcctgtagtcccagctacttgggaggctgaggcaggagaatctcttgaacccggaggcggaggttgcagtgagccgagatcgtgccactgcactccagcctgggcgacagagcaagactctgtctccaataataataataataaataataataataatacaaactttgtattatggcctttggagaacacaggttctccccatccattattttccatattgccatcttcacagcaaaccttgagaggtgggctggtcaggatttataatctcaacattacaggttaggtaactgaggtctagaaagagcaagtggcttgctcaaggtcacccaggaagctggaagcagaggtaggaggggtgcaagggaagccaaggcctgctgaaggtgtgctaggaagagtctggagaagagcttatgtctccccgtgtactgttacatctggccacacaggagctctcagcttggaaggcaagtgtgggcgggggagttgtgtggtcagatgtgtctcataagatcccgcctctcatttgaccctcccaggttt

SEQ ID NO: 1243871 - DNA, 4001 bp, Homo sapiens
acatggaaatcagatgcagtctgtgttatctatctcctacctattgccagggtagaattttcactccagcactttggaaaacaagaaaaaccaaacggatccaataagggatgtcctaaacttgaatcagaaattcaaatactacagaagccagaaagagagtgtaaataaaataatcgaggaggtataagacaagagttgcggagattcttgccgattcaagaacaaatgtaaggactgtatggcttatggctatcattttcaaactctggaagacctaaccagtctgcaaattgactctgacaccttttctatacaatactaataactatcttctctgtaacatgttgtagttgactaagctatgtcttaatgatgtacatgccaaagttggaaccatactatcaacatagtgttgagctggaaggatcggagctgctatcctaagtccctagctccctcttgggatcaagaaaccttacccattcccagtgcacgggaaatagctcaccaacctaccccataggtttgctctatctactcggagcagagatgtctctcacaaaaaaacactgggaagtttcataattttcaaattatggtgtcccaggtcactccctcccttataagcatggctgcctatgcagttaaaaggaatatgaaatccaacaggaagagttcaaatctcatcaaagctttttatttttaccaaccccaatcccaagactctctggtgtctagtgccacagtggtctccaagacacacttccctcacctttttcttcaagttcttttccaatccgactgacaagcttcgactcaattcttgggcgaagccgtctaacccttcatgaggcggggaggtggagggtaaatacagctgggctcgggccgtggcctccgcctgccggctgaggcgcaaagaagcatagagctgggaggtcacttcagacgacacttggttgagcccagggggttctgatgaatcactcaggagatcctccgccccgaggggtgaactggggctgtcagctgatgttgccatgaatacagggaagagacaaccggagacagcaaagagctgggaggttctgctttagcaaagtccaggaggaaaagttcacggagaaagacttgggagaagggaggaagactccacgccaaggatccttggtgaattaaggatatcgaggctttctggttagaggaaaggtttccaccagttccaggggccatgggagtgggcaaaagcatccctttccccagctcctgggaacagcgttaagagggtgcagcgcagagcgggtgcggacagaagacctactgtgggacaacagcgctgctgaagctcctcttcccgactacgagtgctggaagctgcagatcaactccggcacaggctatccccggtcaactgagctcttaagttctcacacccaaaacgtcccaacggaaacggacccaaatccactaggagcccaatttctgtccccctgccctactagtccctcaattggttccagtctcaagagagggcggaacctcacgctcccccatcccttcacccgttctacccagggtcagctccagctcccttgtactttcccttcgacccctcctggcaagaaagccatagcgagcttccttgttccctagaatctctccctcccgaccaccccaaaagaaaccttgtgaaccctcagtcacgccctaagtcgtccctaagaagcacgccgccctcaagcctagcccgagatcctctgccccgacgaccacctggttccgcctactctccacccttccagtcctcagtccccaatttgccaaagtggggggcaagcgattgacctcctcccctgagatccccctctcacgcctccccctacgctcaaaaccgttggcagcctcccgcccactgtccacggctccgcctctctcgcctcgatgacgtcacccgcccgcgagaccacgctcgcagacactcacatcacttctgtatcccgagcgcctggccgcgcgtgcgcggctccggtggccacagattggctgagggagggaggcggagtctgacaagcagcactggagcggagttaatgcccagccgcggccgagcgagaacccccctaaggggcggagctccgtggaaaccggaagtaactcttgacgggcactcggagcagttccggtgagtccgtgggtggggtccccacctggttggaaggctgtgggtccgggaacccgagcccaaggagtgggggcggccccggagcgaggctcacactccctgccctgcagatgactgtccacaacctgtacctgtttgaccggaatggagtgtgtctgcactacagcgaatggcaccgcaagaagcaagcagggattcccaaggaggaggtgacgagagggccccggtgcagcccgggcgacctctcatctccaaacacctatagtcccaacccagcccctcctctccaaaccccagctcgttcccaccccccaccccatctcccgcatcaaccgagagctaactctgcccctctccctccaggagtataagctgatgtacgggatgctcttctctatccgctcgtttgtcagcaagatgtccccgctagacatgtacgcggagtcagagaagatgttgggaggagggctagccttgggaatttggggatgggggaaactttctgaagtggaaggagcattggcctccagaggggggaaagggtacttaagagaggctgagtccggagcgagagtgctggagctggcaggagtgggggtggggagggtctgaaagtagagaagttggtgggggctaaattgaggggtgacgatgggcgatgtctttactcaaccaggcttctacaaaggatatgtttagataaagagggagtcgatgtttgcggggatcagaagtgtctctttgggagagattctgctcccattctttaacaccctcctcatctctgcaggaaggatggcttcctggccttccaaactagccgttacaaactccattactacgagacgcccactgggatcaaagttgtcatgaatactgacttgggcgtgggacccatccgagatgtgctgcaccacatctacagtgcggtcagtgccagccccagggacccatcccccagagctcttcagaaccccaagactccctcatctcccctgccccaatcctactatatgtttgctcaactcaagagttttctcaggggcccttaggttcttaactcccaccaccactttctcctcagagagggcttgccttccagcccttattccttgtgcattcacacacccctgaggttatacaaggtttggggctaaaaaccagaagtatccaaagcctggctctaacatcttccctttccatagctgtatgtggagctggtggtgaagaatcccctgtgcccgctgggccaaactgtgcaaagtgagctctttcgctcccgactggactcctatgttcgctctctgcccttcttctccgcccgggctggctgaagcaacctacctcaagtctcaggagaattcatgtctgcctggggcccttccgaacctgtgccaactaagggcccccactgtaagcccccgcacccccaccccctgcccagagcaacagcctaaaggcctgccctgatgctctcctcctaccagagtgaagcccacagagtccctccacctccacaccaggccctctctccagttttatcccctgcctaatgctgcgagaagcacagaataaactttttgtcactctctgcggcctgagcgtgttggtttgagggccctctcagtcctgccccacgcatgaaggtggaaagtagggcagccacaccccctggagggccacgaagtggctttgcggatgggtttctcaaccgtgggaatattgatgctttgagctggataattctttattgtggggaccgtcctgtgctttgtaggattttagcatccctggccaccacccactagatgctgat

SEQ ID NO: 1243872 - DNA, 4001 bp, Homo sapiens
gcccaccatggagcttgtgttctcagaatctgatgctttctgatcaacaaaactgagcaaggaagatcccaacactgaaggggtagaaggccaggggggcatggagagtgcagctccattatagtgaagagccaaacatatgtgaactgtttgctgtgtggaggtgttagttctgctgcctaccatcttcatctctagcacctcccctgccaagagtcaaccactaagcaatcccacccaagcctggatgcttctagaggggcccactcccagctgggagagtgtaggggatatgctcacaccacattagcagcaaccaataaaaatgctggaaacaagaacgccgtgaatccatatgccatgccttaggaattgggggagcaaagacttgtggggtgaggcaggggaggatttaaaagggactttcttttcacaatgggaggcaggggtggaagctgcccagccctctggcttcctgccatcagttaatgaggaaactgcaaggtcagtgatccacttgactaagttaggatcccctccagaccccaccctagacctgtataggcaggtaccagggaaagttaaaagaatgaagactgcttgtctttcacccttcatccacctctctctccctccctctctctggggatgggaaaagcagtagagttacagtatgttcttgtgggtagaggacagaagagtgaccttccttcccctaagacgtgggttcagtctcaaactgcccagtgatctctcccttaaatcaggtggaaagatctcatggaaaaagtaattctagttaaacatttacagctccctggggcaatgccaccactgcagctactgcttgtgaagctttccagcatgaagtgccatatgctgcctctcagcctccatactcacttgactccaggagaatgactcagtttattattctcaatttgaccctatgtatcccactgtaggctcaaacactgcacagagctgccacgtctaacctcgtaacaactgcgtccctggaaggtgaagggggtaaaccacaaagtcagaaactttgggaaaagccacggtcgcatgcacacctctcaaacaaggaaacaaactacaagaaagggctcagtcattgtacacagcaagtgtgcagtgggcaaagttctgttcttttgacattggccaaatgcgtaagtccctggtttcttgggctcaatcacggtccaaggttagtaagaaggccaacaatgttgtgagcaggattcaatttctacagggtcatggggcatcatccaccatgtgaaggggctccagcaggttggacatgatcaatacccatccagattaggaccctgacgcccttgccagagctcgggctcgggcagctttggcctcgtcttctagctcatctaggaaacgctcctgggaaatcgagtagaaggtgtaaccatctggggaggtaggttcaggaaaccacacagaatatgcacattcccctttcctagatttgctctaccactcttgttactctcccaaatcagtgattccggcttcccgccgctgctgtttctaaaccctgaaccccaattccgttattattaataaatcaaattaaaagagtaccttaggaataacaaaggaaagtactacccattttaccccaaaattaaacgggtggttcagccctcttgcacactctgttcccctgcccctatatgcggtccccttgagtctacaacacggacggatacaaatagccaacaccagggccccgatgcctaggccggtcacgatgttccgggttcgccgccgtggtaggaccttctgccactgggcaagctccgcctgccgcatggaatgcagttgctcgggtgtcagcttctcccgagtcgggtcgatacgctgagcgaacggggcctctccacgcttagaatccagagggtcaccagctcccgaagacgccatgttgccactcctcccttcgcggtgccgccgcgcgggcctcgctgggaacagtagcccttggccgctgcagtggactctgggagttgtagtccgcgtgccctttgcggggcagagccgcggttcccgggcacaggggatggacgcgggaggtgagaagcggacgtgctttctgattggctgaggagtccgtggccgttggggcgggaaaaagctgtggagggttcgaggctgtggtggtaattgggttttcctcagacttgaggcgacgacacactcattggaaggggacgaggaatccagggtgtggcagaagactggagaggagctaagggggtcggtatgtggatccagtgaacccgtccaggtgccccaagaggctcgtgaatatggacggacccatgaggccacgatcggcctccctcgttgactttcagtttggagttgtcgccacagagacgattgaagacgccctgcttcacttggcccagcagaatgagcaagcagtgagggaggcttcggggcggctgggccgcttcagggagccccagatcgtgggtgcggctgcagggccggggtgctgggttcttgggagactggggcttgtgtctttcaggcaccgaccttgagattccgttgattttattcattcagagaatgtttgctaacacctctctgtggggtgctggggatatagtgatggataagtcacaacagtgccctccccttgatttcttcgacatgtatggaatacttgagtggcaccgcttggctagaaagatgaaatagagggccaggcatggtggcttacacctgtaatcccagcactttgggaggctgaggtgggaggttcacctgaggtcaggagttcgagaccagcctgaccaacatggtgaaatcctgtctctactaaaagtacaaaaattagccaggactggtggcgcgcacctctaatcccagctactcgggaggttgagacaggagaactgtttgaacccaggaggcggaagttgcagtgagccgaaatcgtgccattgcacttcagcctagacgacaagaatgaaactccgtctcaaaaaaaaaaaaaaaaaaaaaaaaaaaaaaaggctgggcgcggtggctcacgcctgtaatcccagcattttgggaggctgaggcgggcagatcacgaggtcaggagatcgagaccatcctggctaacatggtgaaaccccgtctctactaaaaatacaaaaaaaagccgggtgtggtggcgggcgcctgtagtcccagctactccggaggctgagggaggagaatggcatgaacccgggaggcggagcttgcagtgagctgagatggcgccactacactccagcctgagtgacgggtgacagagcgagactctgtctaaaaaaaaaaaaaaaaaaaaagagaaaagaaagatgaaatagagatagaggtcttgccttcaaaccatgtgcaatttgggggagatattagaacaaatatgcaatgactaggtactatggttagataagagacgtcagagagaaataaaacaagcgtttatgggggttgagaggagcgatggggtaataggaagaattcaggggatggcccaggcatcgggacatttcaggcagaccttgaaggaaggaggacattgggttggtgaagggggaggaaggagacagtgtttctaccaaaaagaggtagcatgagtaaagctatggaaatggggtgcttagggtgcatgtgggtacagtgtagtccatgttggccagtgcatgtggaagaatagttgaaattaatactggaaaggtagtttggagacattccatgtggaagtttgaatgccaaggggaagagtttatccttggtttggtaggaaaccaagaagacattgaaggtttttaaataagggagtgaaggttttaaaataagggatacgatggtaaccctgccttagtaaacattattttggcagtgatgtaaaggaggtaaaggatggattaaaccagagggagatgggatgtaggcagacaggtagagtcaatgtcagtagg

SEQ ID NO: 1243873 - DNA, 4001 bp, Homo sapiens
ggtccagcagggggatgacatcaaaagtcaaggagggcttgatgtccaccaggaattcactcagatgttccacacgttctgtataaggttggagcagctcagggagcaacttgcctggggaaggagcccagaagaacagtgagatctttttattggggaggagagtatgggccagtttgggaaaaagtgtccctaagtacagtatccccagagggggtggcagaaagggttcaactggtaaggcctatggtgatggtgaggggagcatgaaggtgaagaaacaggcaagcacaatagtcactccaagggctggcatgtgtccagagaataagccaccaggaaaccactccagagaacgagcagtgccagagggcatcagaggcagatggaaaattccaagacccatgccatgcttgagtttcctcctcctgtctgtggcactgctacctgcagctcactcacccattcattcccagtgtctcattagggtgtatcacctggaaaacttgctaaaatgcagatccctttgcttcacatttggggtattctgattgagtggtgactggaccacatgctgagaaagctgttcatttgacaaaatggccttagcaccaattgagtgtcaaccactgtgacatttgggaagggtgggaagtaatgaatggccctacccttccttgatctcggcataagggtcgggggtggggagatttggggatcctccaccctagtccagggtccctcttactcactcttcaacagatctttgtctgctactcccaccacaagctgctcctgggccaggatgcacgcgacactgagcaacaccttgtgggcgttgtgcaggcggtcaaacgtgccaccgacagcgccacggtagtagccacgcaccggctgctttggagacccggccacgggggaagctggcctgatcgtggagggtaaggggacatccaggggctccacgggcacttctcctatcccataatcggagtatagcagcaccgaggccagtcgcggacaacagctgtaacagctggtggcgtaacgcactagctgctgtttgaccgggttgtactggcttccatccagggtctggaaatctgtcaacacgacttctggcgggtgggcgagattctggactgaggtgggcaggggagggagaaaggtgctcttggttcggatattggtcagtaggattctgacgtccaagtgcctgtggacgtcggcgccagcatagaggtgcgtgatgaaatcaagaacctcaaacgtggcctgcacggggctggactggggctgagccgggccctccaggctcatgcccggctgcaggtgaacatagagtgtgtgattcaccagccgggccgccgaggtcaggatggaggccaggcgaggggctagggaggccagcggcgtcgtcagcaccaggagacccgaccggaatacggccatgctgcccaggcctgcggacagtcagggagacgaggcgacggtgactgaagggcctgcggccgaggcagaggcctgtatgggaccttggaccccagagaaggaggcctggagcagggacggggtttcagtgctgaccgacaggagccgggggaggggacggggcctggtagacggcgcctcggggctgtgctctaagccttggtgtcctcatttctcagacggggcggtgacttcgctgaactgagtcgaaatcctgggagggggaaactggacaggaacccttgtcacagggctggggatccaaaaatcctgggccctcttgctaagctgcaccagggtcttcaaggaatcgaagagggaggctaaagggggacgctaaagctcacgtcggccccctactcactgaaacctcaaggcttgggttccacttgcaccaccgcggaggcttccctggctgcaacccggaagcactaacggagaaaccgcaactcggaactacggaaacggaggaaggtcaaacgtctcgacttcgcttcagcgcgggattctcgcgagatttccagtggcatgggctgtgtcctgctgatggggtggggctgatcccgaaggctctgggagtgggtgaagccttgatgccgatcggacccccgctgggaccgggcggagaaaggcaaggcaggtttcaaagcccatttcacagattcccttctggcctgatgaggagagattagtttcagccaggccacccaagaggcatcggcaaagccagaactaacacccagatttccttcattccagggacagaggtggggaatcacagggctgcgctgtattagccctcctagtaccctctcagtccgaggattctcacatgggaggctactggacaggtctgtccacgtacccatttcacagatggaaaaactgaggccttgtgtgtacctggctgctgtaggaggctctcgcaccacccagatcctctgatgcgcttgtttgcggggtctctgtggacaggagaaaaaggcaaaggctgattgggcgcggtggctcacgcctgtaatcccagcactttgggatgccgaggtgggcagagcatctgaggtcgggagttcgagaccaacctgaccaatatggagaaaccttgtctctactaaaaatacaaaattagacgagcgtggtggcgcatggctgtaatcccagctactcaggaggctgaggcaggagaatcgcctgaacccgtgggcggaggtcgcggtgagccaagattgtgccattgcactccaacctgggcaacaagagcgaaactcccggccgggcgcggtggctgacgcctgtaatcccagcactttgggaggccgaggcgggcggatcacgaggtcaggagatcgagaccatcctggctaacacggtgaaaccccgtctctactaaaaatacaaaaaaaaattagccgggcatggtggcagacgcctgtagtcccagctactcgggaggctgaggcaggagaatggcgtgaacccgggaggaagagcttgcagtgagccgagatcgcaccactacactccagcctgggtgacagagtgagactccgtctcaaaaaaaaaaaaaaaaaaaaaaaagcgaaactccctctggaaaaaaaaaaagaaaaaagaaaaaggcaaaggctggatacctagtgtgggagatttactgcgaagctaatgggcgcttgaaaggctgagtgtggaggggaagccaggttgctattagaatacatctcaggtaagttgtgcatggagatcaaaagggagagaagccagtctccaagattccagtaatgtgccgtggtatccgaaacttaaaaaaaaaaacaaaactcacttttatatgtaattttgtgtttatcttttgtattcttgaagacggtctccaaaagcaaataagcccccagccccacaaaacctgggcttatgatggagaaaaggagatgctattttagataaggtgattcaggaaaacagcaaagacctggaggaagagatacagtcaaggagggaagagttgtagagccacaaaggtattaagggaccaggcttctcacaggagacatgttagatttaaagatagggtctgatttgaagacacaaacagcaaaggctgccagagaatgtcccaagacatctggacacacagtctgacacaccacatacagagtcatttttattgagtaaatgtgtattttactgcctcccacagggatggaccagtgaacaaaacaatgtccctgccatcctggggtatagagtactgtgtgtcttggggttgcagacaggaatcatgccaccataaataaatctataatacatggccaggcgcggtggctcacgcctgtaatcccagcactttgggaagctgaggcaggcagatcacctgaggtcaggagttcaagactagcctggccaacatagtgaaaccccgtctctactaaaaatacaaaaaattagctgggtgtggtggcggtacttgtgattccagctactcaggaggctgaggcaggagaatcgcttga

SEQ ID NO: 1243874 - DNA, 4001 bp, Homo sapiens
gggagggatgaggtcactcatttcaaaaatatgcaaacttatttgcaacttcctatagttttattgtgtcagtccagtctactgaccaggatttctgtaaagctcagatagcatgaacaagttccaaattggagttagactgtacttttcaattttttcttctatgtcccagtaagttctcccaggctgttaaaaacaactaactgtttacctttttcacccttcatgccctttcacttcgttcattgctaggtctatattctttaaggggccgtgcgcggtggctctcgcgcctgtaatcccatcactttgggaggccaaggcaggcagatcacatgaggtcaggggttggagaccagccgggccaatatggtgaaaccccgtctctactgaaagtacaaaaattagtcggacatggtggcaggtgcctgtaatcccagctacgcgggtggctgaggcaggagaatcgcttgaacccgggaggcggaggttgcagtgagccgagatcgcgccactgcactccagcctgggtgacagagcgagatcctgtctcaaaaaataaagaaataaaaattctttttttttttttttttgagacagagtctcgctctgtggcccaggctggagtgcagtggcgcgatctcggctcactgcaagctccgcctcccgggttcatgccattctcctgcctcagcctcccaggtagctgggactacaggcgccggccaccacgcctggctaattttgtgtatttttagtagagacggggtttcaccgtgttagccaggatggtctggatctcctgacctcgtgatccacccgcctcggcctcccaaagtgctgggattacaggcgtgagccaccgcacccggccaataaaaattctttaggaacgcaagctgcagctccaatatgaggatgtgtttgtttacctcccatccttcctcattgtgtctaatcaatagcgtttggggggaagaacacgggataaggagaacctgaatgaaaaaagccttagttctgaaaatgaaaatgttcagctattaaaaggtaagggcttggccggctgtggtggctcatgactgtaatcccagcactttgggagaccctgtcacatacatacataaagttaagggcttgatagctggtaccctcaacaactcccaaagggtagaacagctatttggggttgtggaagttattcttggggagataaggggaaggttgggatgaggaagaaatgacttggagtgcaggtgtcaacataggggagaaacctgaggaaaaacaatgtcaggacatgttatataggtgagcgttgaactgtcaagacagaaactcctggcgttttccgctaaaattgaaaggagcccagtgaggtgtaggaatcaaggcccggaagtcgggggaaagcgcctgaagaaactgttgaatggcatttccagaacggatcagcagccgcatatgtgcaaggaaggctggcactgtcctctgaggggggcccaaagggtgaggggcggataggctcctggctaaggaaggtgaggactcgcggggtctgggactgacagaggggggcggggttgacctgcaaggccaggggctccgggacccgcctgcgggtcgcagggtgggggcacggggactgacctgctgggcccgcggtggccggggcgcggccgagccggcctggcggaggcgggcgcagtactggtcggtggccttcacggcgtccactagccccacggcgcagcggcgcatctggccgatggtgtcggccgcctcgatcaggtcgcggtaccgttcgcccaccatctgccgcagctcctccttcttgtgctcgatctcggcccgaacctggcgctccagcccgcggatctcctccgctccatgcgtctcgaaaagagccgcagggtcgcgcagatccagccgcttcagcgcgggtgaggttgccgcggtggccatggtgcactcgtcagcccccggcgatctacctacgcccttttagtcccgccccctccgccatcttcgttgggggcggaagcgcttccgccccgccgggggccatgtttgttacccgagggggcgggcgcgagggggcgggcgcgagggggcgggcgcgagggggcgggcgcgagggggcgggcgcgagggggcgggcgcgagggggcgggcgcgagggggcgggggcgggcgcgggcgcgggggcgggcgcggtcctgcgcggggttttcttaaacggagccggctgggaagtgaggtcgccagagaggtgaggtcgccaggttggctgcgaaactgtggctgaagtcttccctttcccttaggagcagagcttctctgtggagttaggtgtcgggatcgggccccgcggactgacggcgttggcgcaggcgcagccgccgctctccgcgcgcctggcgcccgcgagcagactcgggcgcgctcgccgccgctgggtctcggatcgcaccccgcgtgcagttttaggaagagggacatccgcgcccctcgctgttccccgggaagagctaccacgccgcccctgaaggggttctgagcgcttgtttggcgtctgcttttcctctgctgttgattcgtgttggaggttttccatttcgtttaaaaccgatgtttagcccctgaagacgttttccctgcgagagcctgaccttggtggccatgggggaggagggcggcgggctgggcgggagaggctgggacgccccggggaacgcagcgccagacgggtgggcgctcctcacgtggcccaggaatagtagaatctggagattgtggcttgtttctgctaagtcccagacccttctttttttttttttctgttttaatttcttttggaagatttcacccacaccagtgtcgacaaaatgatgcaatgtgcgcagcggccatgctgagcccccagcaactcagggcctaccctgcatccctgctcattccctctcccacccgccacctccggacgcacagaatttcaatctgcaaataaatggtgcatttataatattccagtttaacccgcaagagccttgcggcgtagggagtatcattctcactttacagactcattttacagatggggaaacgggggcccggagaggcaaagggttttttactcagtaaaagtgcagttttcagagcctgtccacgagattatctcattttctcgcacatcggccatgccaggtaggtaggagtaatattcctagtccatttatgaggaaaaaaaaaaaagaaacaaaagcttatttacctgcccaaattacatagctgataggtgacccagtgagtatttggacgtcgatttttaaattactggctcgcgctcttttctacgttttcacataatttcccacagagcaccctctgttggcaggcctgcagtttgcagtctctaatcccattctgcaagggacacttactggtattcggctgataagcatccgcagtatctcctttctgtgattggggaattcatcgctatctagcaaaatctttttttctggcgccctttatagctacggtgccagcctgcggcctgggactggcacagcaggcacaagcgcctaggacttgggtgaagagttagtgacattaagaagcaggctgtaatcccagcactttgggagcccaaggcgtgtggatcccttgagcccaggagttcaagaccagcctgggcaacacggccaaaccccgtccttacaaaaaaatacaaaaaaaggggcgcgcgccgggtggctcatgcctgtaatcccagcactttgggaggccgaggcaggcggatcacatgaggtcaggagttcgagaccagcctggccaacatggtgataccctgtctctactaaaaatacaaaaattagctgggcgtggtggcgcacatctataatcccagctactcgggaggctgaggcagcagacaggaagctgaggcaggagaatcacttgaacctgggagacggaggttgcagtgagccgagatc

SEQ ID NO: 1243875 - DNA, 4001 bp, Homo sapiens
gtgggggaaggaaggctggcacagtggcttacgcctgtaatcccagtgctttggggggctgaggtgagaggacagcttgagcccagggattcgagaccagcctgggcaacatggcgaaaccctgtctctacaacaaatacaaaaattagccaggcgtggttgcctggcctgaagtcccaactactcgggaggctgaggtgggaggattgcctgtgcccaggaagtcaaggttacagcaagctatgatcgtaccactgcactccagcctgggcatgggaaacccagtctctttatttaaaaaagaaaaaaaaaagtctgaataaatcagtccaagatatgaatccaaactggaatgatcagataccatcatcttactgtggcaactcaaccacatttcagcaattcacactacaattgctcctggatactcatctcattatcatttttttaacttccaaaagcatatttaagattattttgtgtttcccaatttacagcccaaaaggactcaagacacttatttgagagaatcccaaaatgtctgggtgagacacaaaatgatacgccaccagaagtctcaggggacactgggcacatgagaactaaggctggacaacagcaggttatgaagaaaacacaacgattcccctttgtcagcttcctgcacctgaccctgaaggccgccatgggtaaggccgggtctccggcacatctgcaccatgggcacgcaacagagtcgcacagtgcctagctaagcgcggatgtgctaaatcaaggctgaaagaaagcctggccctgcccttaggcatcagggattttccaagtttgattctcctgtcatcagaagcatcccgggaaggatgctcgttacactgcagattccagccaggcgcggaggctcacgcctgtaatcccagcactttgggaagccgggaggatcacttaacgtcaggagttcaagaccagcctggccaacacggtgaaaccccgtctctactaaaaatacaaacaaacaaacaaaaaattagccgggcatggtggcgcccgcctgtaagcccagctactcgggaggctgaggtgggaggatcgattgaacccgggaggtggaggctgcagtgagctgagatcgcgccactgcactccagcctgggtgacagaatgagactcagtctcaaaaataaaaataataggggcaggatgcggtggtgcacgcctgcaatcccagcactttgagaggccgatgcaagcggatcaactgaggtcaggagttcgagaccaccttgaccaatatggtgaaaccccatctctactaaaaatacaaaaattagccgggcgtggtggcggacgcctgtagtcccagctactcgggaggctgaggcaggaaaattgcttgaacccgggaggtggaggttgcagtgaaccgagatcgcgccactgtactccagcctgggtgacaaagcaggactccgtctcaaaaaaaaaaaaataataataaaaaataataataaaatgcagattcctgagccccaaagttgactacaccaatcaggatctccggggttcgcgaacgtgcatttttacagccccacccccctccaaccctcgtccccttccccatcccccatcccctccactaccaggtctagcggcttcaggcccgggcgtgcgcaggcgcgtcccccgcccgccgcccacccggccgtcccgctccctgcgccgcgcacctgaggcagtcgttgtctctcacaaggcgcgcgctctcggcggggggcaagagccccccctccaggtagaggcctaggaaggccccagaactgaagccgaagcgctggcggatgagactaatgagatctgtgacgactcggcatctgttcaagtcgaccagaagccagaaggccgtacagtgcggggtagctggcggcgggtaatcaaattgaagccgtagcctaaccgtctcggaagctgccatcttgcttggtgctcaacggaagccgagagataccacggggccaccgagaggcgtgctcgggcggctcgcccccgccggagcctttggcgtgtgccacctagtggtgaaacctggctactacaggctgcgtctaggcgagaactcggagcgtggttgatttcattcaattttgttcacggcagggctgaggaagggaataagtgaaatgcctttattacatttctactgggcgctatgtagggtctcctaattaaggcaactctctggataaataacatttctcctcagcagtagtcttctaagatatttgctcatcgacgtgaaagatttttataaaacaatcctaacacatttcgctgacaaaatttttcatcatgatgagttgaaaaagatgtaagtcctagtgtgttctcaatgttgaaattttgaaataacactgttaatcattcttccaaatgtatccagtggaatataaataccttagccttttaatacccaccaccaaacaaaaatgtccttgcatttctcaccagataaataaatcagtatttacattatttcttctattttttgaactagaatttacatttctccacataatatatattaactcctttaattttcataacaaaagttaggaattatgaactgttatccttatttagaggatttaaaaaaaacaaggttcagagagtttaagaagtaactagaggccaggagcagtggctgacgcctgtaatcccagcactttgagaggccaaggtgggcggatcacttgagaccaggagtctgagaccaccctggccaaaatggtgaaaccccaactctactaaaaatataaagattagccgggtgtggtggcatgtgcctataattccagctactcgggagactgaagcagtagaatcgcttgaacccaagaggtggaggttgcagtgagtcaggatcgtgccactgcactccagcctgggcaatagagcaagattctgtcttaaaaaaaaaaaaaggagtaacttccccaagttcactagactagttaagttgtagataccagggagtcagtagatgaattgaaaacaaaattttttaactgaaagtaagggtttttggattttctttttttagagtcttgctctgtcacctaggctggagtgccgtggtgcactctgcctcccgggttcaagtgacttcccacctcagccttcctagtagctggaaccacaggtgtgagccaccaagcccagctaatttttgtattttttgtagagatagggtttttccatggtggccaggctggtctcgaattcctgaattccagcaatctgcctgccttggcctcccaaagtggtgggattacaggcatgagccaccacctccgactaaaatcaagtttattagagaattaaaggaataaaagaatgactactccatagacagagcagcgagcccatactataagtatactcagtcaagtatacttatagttacttcttgactgtatgctaaacaaaggatggattattcatgagttttctgtatccctaggaaaggggcagggatttccctcagaactgagggttactccccttttacaccatacaggataacttttgggcatttccggctgggcgcagtggctcacccctgtaatcccagtttctccacatcctgactaccatttggcattgtcactattttttagtcattctggtagatgtgttgtggtatgttgtggttttatttatttgtttgtttgttttgaggctgggtctcattatgtctccagtgctgaagtgcagtggcgtgatcacaaggcttactgcagccttcacctctgaagctcaaatgaacctcccacttcagcctcctgagtggctgggactacaggcatgcactgccatgccctgctaaattttgtaatctttgtagagacggagttttgccacattgcccagactggtctcaaactcttgggctcaagctatcctcccacctcagcctcccaaatattgggattacaggcatgagccac

SEQ ID NO: 1243876 - DNA, 4001 bp, Homo sapiens
cccgtcggcagaggcctccagcacggagggccagcgagcgccgaccacccccagccccagccccaggccccaggccccaggccccaggccccaggccccgagcgcagccgcacctgagccgtcggggcagacgggacagcactcgccctcggggacttcggcgccggggcagttcttggtctcgtcacagatcacgtcatcgcacaacaccttgccgttgtcgcagacgcagatccggcagggctcgggtttccacacgtctcggtcatggtacctgaggccgttctgtacgcaggtgattggtgggactgggacaggcggaagaggggcgttgtcagtagtgactgcaacccccagcttaaccacctttcccccgggtctaagaggcacacttggatttttcacttcccgcccctccccccgttcttctttcctcaaatccttaaaagctcgcctgctcctcatcagcgcgggtgacagcgccgaggcgcctggccagggaggctgtaactctttccagttctcaggaatttaaacaaagctttagtccgcggtggcttccaactccaacctcagcccattggcgctgaagccaagtgaaataaaaaccacagggtgagagggggagggcggggggagaataggaggggccccatcgggagggcaggctcgtggggagtggcttgcgtggtagagacaggaggagggcgagggaggagagaagggaggtccagccctcatcccgcccccattccctgggcaggtggggtggcgggggcggggctaggagaatgggagcggctgattggaagggaggcccccccaagacttgaaatgtacctcaaaattaggagacaccctaacctccagcacctagacatcttaaaagcccgctctcggggccatccccagtcccccaaagccagccaatgcctccaggtcacttttagccaaagaaccaaaaagtccgcaaatagtccagaagttagctaaccactcccaccgcgctagcggctccccagacggccactaggtgtcgggcaacgctaagcaatggggccggggcggggccgacctcaccggcccgactacctctttaagaggcttgggctgccccatccctggctttactttccagatctagaggtgggggtccgcacccagcaataacccgggtcttcccgctccggctcctgccccagtaagcgttggaccgggagacgcagtgctcagcatcggtcagcagggggcgcaaggaccccgccccgccgagtccgcgccaaagtttctcatcctccacccgcccacgctccgcaccccctccgcggctgcccagcacccccacggccccagcaacactctagcccgcagagagggcaatctttccttatgaatcatcccacggccttcctgattgcttctacatcttgggcttcaaatgccccgctcggcgcccccatcccatcttcgacgtgctttcctcactctgcacccagatccccacttccccggttgcgcgctcgggattctctcttgcaccaactcacgccgcgctccaccctcacctcccgctcccggggcgcgttcaaccccaacctcgccccagggtgagctccctcctgtctcagggcgccgaggaagagccctcatcatctcccttccattcccgagtctccggatcatccacgtctcgttttaagccgcggcccccgggaccaagcgcaaggcgcgatatagagtatccttgcactcccaaaagtttgggacttactgtcttcgtcttggccctcgacttggccttcctcttggccgtgcgtcaggagggcggtggccgctaagaggagcaggagccggaggtccacaaagctgaacatgtctagaccctagacatgtagactctttgtggctggggagggggttagcgtccgctcatgcgtggcctcacactccgcgtgcctcctgctccgaccccgaggagaaactcccgtctgctccgacgactggcccgggccccttttatactgtcctgatggagagcagggaggaaccctgcccctcggagagggggagccggccgcccgtgccccagccaatcagagctgcctggcccggcccccaatttgggagttggaatggagagggggaggaggagggaagggagtccaccccacatctcccctcttcgcagctctgcctccccagccccccagcccagcctgggccagaggtgctgtggtaggggtgcagctgggtcctcagaatggcgtgggctaaccagtgggtaggggtgcccctctgctctcttcctgggacctccaatctagaagaagtggaactggggaactggggagctgggtggggagacttccaaaggtggaagggttgggggtgttggggagggggtcctcctggctgtgccccagtcaccctctgatatcctggcaagagctaagggaggggcataaagaggcatgctgaggacctctccaaaacagaggaagctgggaattaaaaagatgtgcctgtttgggggtgtcttctggtgtggctaggggatggagcttaggaatatttggggaacaatttacagattcctttctagacattaagaatcagatatctgagggaggggtgcaggcaagggagttttaattttgaggatgtcaattcttctgctgtgctccagaacagaatcaaatgccttcctccaaaccctaggcatgattgagagatggagtggggaggctgaggtgcagggtgagaaacatgactaggtggcctctgcagaagaaagctttggtggttgggtgatggagcagccaaggtaggggtgggggattctagggacacagaggtggggattggggcttgcaatcccctaaaaattcatcccccaaactcttccaccccagagttgggaagtatttttagtgggaggcctgtgatcattggtgacttagagaagagttttgtttgccatggctgtggccaggggctgcttagagaccctccttcccagcacagtcaaaccagagagaacctgggtggagggagggcacttagctaaaggggtgtctttctgggagctgcataaagccccttctccagttgtacctggactcagtgttggggatgtatgggatattttgggtgtctgggtgaaactttcctttgggggtgtgggatgggctgcagaggatgattgactttgttttaggggctacttcccactgcctcatctctttcttgaaaatcccggtcattgctctatgccttaggaaccagagagaatcatctgtacactctgaaagggtctggggacccgaaggacagcaggctatatctaaggaagatggctctagaactccacgtcctttcttcctccatgtcccattcccccaacaaggctctgcctcaaccccaatctacctcgtcctgagaaactctgtagggctgagagaaggcctgggggtctccttgcagtgccctgttcatttctctccctcctgtgcagctccccaccccgggtgctccagagctgcaaacgtggaagcggggagtcccgcctcccccaaaccatccaagattccattgcctccccccgcccctctccacgccctcccccagctggttttgtgcaacgaaggcaaaggggaaaaaaaaggaacagaaggggagggagccacgtcggctggccggctggccgtgggcagccaggatgagcggtgcgggtggggcagcagagggagactgcaggggctataattaaagggaaaatatagagtttccagagaggcagggctggagacagcaatggagggatggaccttcatcaattatcccgaccatgtggcagcaacttgtggcccagggtctgcccccgcctagtgccagcgactgcagggcaggactagggggctgaggtgctgagatggcagttcttgaacccaccaaagtcctgccccctactgtgggtcagttccaagagaacccctccctaa

SEQ ID NO: 1243877 - DNA, 4001 bp, Homo sapiens
aattttaatcaacttcatctctttgttccttcagccataggttggtagctgttccctgcggttgccacccccaggtacacgttttaccttttcagttacttaacaactttatagctagtaaacaactctatcaaattctctgtttcctcaccaacacactgaggtgggggaagctttataattcctctgcaatgctgagcactgaaggcagtatttctaatctaactgaaaatcttcccgcacagccaaccaaatgcttctctgctcccatcactcagaagttcctgaaaccctatgacctccaagacctctttctaatgaatcacgaaatgttccctgcctgcataaaagacctgattttgatcccagctctgccatccattcagagtgtgaccttgaacacatcacttcaattactgtgcctgagttttcttctccagaaattaggggtgactgttctgaccctgcaggggacttatgattagacaccatttatgaaaacacctggcatgtggcaagaatgtaacatttcttgaatttaaattcatcttttctgctacatctaaactgtactcggcacctgctccaatcagcattcattatctagtcatgtctgggtttaataattcagttccactccctgtagttagtgacaacctctggtcactgccgcccaaggagaagtcagacctctcacctaaaccactgccacggcctcctaaccaccttcccatccagccatctggcccagccttacagaattaatcactactctgctcaaaaccttcaacagccctccactgagagagcacaaaattagccatggcattcgcacgtcccctcttctcccactcccatcaacctgttgagcatagttctctgcatgctctgagacccaactccaggccatgtgccctgcactttctcatctccacgcctctgcagacaccaccagcctctcaccttgatcctttcctgctatgccctgacaaaattagtcccattctattctgcactccaaagtaattttctttgtaagtgtcgctgcatttttcatatcttactttggctaagtaccatctttgaggcatcattcatccagtcggtatgtctatctcctgtgccaggcactatgctaggctgtgcaaacagccctaacagagggttcctaccttcaagccgctcagcacctagccggtacagactgtaaacaaggacaggtaagaactgtaataacggtctgtaacgttctcgggaaaaccaggagctgtctagcttacatgaaaacaagtttctggaaaccctgcgtcaaacagggcctttctggtttcagtaaggagaagggggagcgcgcatgtgacatctggggctcagggttagctggcatccccaccaacggacagaggtccacaggtctgtaaagtcaagtccctctcctcgccgccctcacctggccctcgcccaggctcctggcagcgggccccggctctcggtcaccagcgtcacctcccatttaccaaatccgcagcggcgcccagcgggcggacagccgtctctgctgacccagagcgcccacccacgccctcggctttccccgccccgcagccccgcggccccgcggcctggccgttttcagctcgagcgcgagcccaaacagcgctccgtgtcgcggggcggcccgaggccggccagaggcgcttccccggccccgcggcccccgcccagcccggccccgcgacttcccgccccaggctgcggctggctgttgctcctggcccccacgcggcgctcacctccgggctggggggcgccccccgcgcgctaggcagcggcgggccccgagacggctccgcggccccctgcgcctgggccccggcggcctgaaggtccatgccctgcggcccgcggctggtcgccctggacgccgtgggccacgtgacgcgccggcccggctgcccgcccgaggatccgccgcagaagcgccaatcagcctggggagggggtgggtaccggccaagagggcggggcgcgggggtgtcacgagcaagcgggggcggggcggcgcagggggcggggcgcgcggcctcgcggagcccgcccctccctcccagcgcgaaatctgaaacaatctcggagacggattttggaaactcctctcggtgcatatcctaaggctgcacgactagctgcgtgtgaaacgccaagcgtaccctactcggccactcggggtgtgctccagcttcaaaaccccgcgtgggtaagacacatgagcaacccagtgacctccaccttgagctaatgatcgtctttgaagttaatccattagaaaccaagatagatgattaagacacaaactgcaatatgcagtggacacagaatacaggccacgacgcttactcataataatcctgaacattcgggattcctgtatttccatgctcaacgcctgataccgacaacctaattatttcccattttgcctcgaaaggtggcttctggggataggcagggcctgagctgggaacagcccaactggaaagacagccttccctgccttccccacagtgcctaacctctaataacaaaccagctcaaggtgtgctaatcacgtcaacatcaggacatgagaccctcttccttcatccccctcaaagactgtgttgtttgtacaacacaaaaggcatttgaaaaaatttagcataaaactgacacacaatattcgatattatttttgttctatatgtagatgttcctacacaggagtcagtatccccaaggctaactgcctctaggtcagcaatgtccaatagaacgttctttaatggtggaagtggaaatgaaagttctactatctgtactgtccaatatagtaaccatatacctactgagcacttgaaatgtggccaatgtgaataaattgaataattctaataaatttaaattgctacatgtgccttggagctactgtttctaacagtgcaactctaggtgtactagctagatgtgttttcataacctgcaatattgagaatcagatacagggatgtgatgaccccaggtgaccacccttatagccttgtgttaaggagactaccactatcctctttgctccctaatctacatatctctttcgtaaaattaaagtgccaaataagattaagaatgttaaacatcccaggacttaagggacaggaaaaagaggaatttttttcttattttaaaacaaatgacaagaaaacaggggctggccgcggtggctcactcctgtaattccagcactttgggaggccgaggcaggcagatcacttgaggtcagttcaaggctatcctggccaacatggtgaaaccccatctctactaaaaatacaaaaattagccaggcgtggtggcacacacccataatcccagctactcgggaggctgaggcaggagaatcacttgagcccgggaggtggagggtgcagtgagcagagattgccccacagcactccagcctgggcgacagagtgagacttggtctaaaaaaaaaaaaaaccagaaagaaaaagaaaacagtacaaaagcttaaaataaaaatgttctaaagtagactctaatactcatagaaatttaatatataataaaggtaacatcacaaatcagcagagagaaacataactgcccaaatagtgttggcaaaattaactgcttggggaaaaagagttgttctcagcaccaggaagagcttccaaagcattttaaaaacagacatcacacatacacacacaaaatacctctgggcatcaaaaatcgccacaaaaggtgcctataatcccagctacttgggaggctttggcagggagaactgtttgaacctaggaggcagaggttgcagtaagaccacaccactgcactccagcctggaccacagagcaagactctgtctcaaaaaaaaaaaatcaccacaaacaaggctgggggtaaaattatttgcaacaaatgagaaacaagatattaatatt

SEQ ID NO: 1243878 - DNA, 4001 bp, Homo sapiens
tctactagttaacaatcagtgcccagttgagactgaaataaaagctgggtcactatgaaatcaccagataattaattagtgcagggccaagggcagagtaaaaaaaaaaagtttaagtgtcacagagtgcatttgaaatcagtgtaaccagagatgtggccaataaaattcttttttttcttttttttttttttgagacggagtcttgctctgtcacccagactggagggcagtggcgcgatcttggctcactgcaagctccacctcccaggttcatgccattctcctgcctcagcctcccgagtagctgagattacaggcgcccgccaccatgcctggctaattttgcatttttagtagagacagggtttcaccatgttggccagggtggtcttgaactcctgacctcagatgatccgcccgcctcggcctcccaaagtgctggaattacaggagtgagccactgcgcctggcctgaaactcaaagatttcctatccagtgagtgtgaggcacagtagccgacagcaatgaaagttaccatatttatctctgtctagcagactgttcctatagcatcctataacctgaagaccacaacagccctagttctgttttgtaattaagaaaattggcccagggaaattaagtggttcacccaagaagtgaccgcgacaggatttcaacctgaagcttctaactacactacaccccaggaaggagaacactaagtatttgtcgaataaattaacaaaccagtggttcctttattcatagaaaaggcaagcctgtgccttccctgtgaacctcatttctattaataaaaaggaaaaagaggaagaattcttattaagtgcagctccatatcagaccatttgtcttacaccagtgaggtaaaagcacccctccatttttacaatggagatgcaaaagactcagagattaaaggttatttgtccaaggtcaagcagctcctagaactttgcaattaatgacggtaacaataatttgcagctatatttattgcaccccttatgacaggcactgttccaactgcttttacatggtttctctcattgaatcttcacaactctacataaactagggacttattttgcagacgaagaaactgaagcacgggatagttaaaagggccttcacagccagcatctaatcattcgaatttcaggtccagaattcggtacattcatacgcaatgaatgaaccaaacaacctggaaagtgcgagtaaaatcatcacaattctacccctagaaatggagtcctggccgggcgcagtggctcacgcctgtaatcctagcactttgggaggccgaggtgggcggatcacttcaggtgaggagttcgaaaccagcttggccaacatggtaaaaaccccatctctattaaaaatacgaaaaaattagccgcgtgggctggccgcggtggctcatgcctgtaatcccagcactttgggaggccgaggccagtggatcacctgagatcaaggttcgagaccagccaggccaacatggtgaaaccctgtctctactaaaaatacaaaaattagccgggcaggcgcctgtaatcccagctactcgggaggctgagacaggagaatcgcttgaacctcgaaggcgaaggttgaggtgagccgagaccgcgccactgcactccagcctgggagacagtgagactccgtctcaaaaaaaaaaaaagccgtgtgagctggcgggcgcctgtaatctcagctactcgggaggctgagacaggagaatcgcttgaagccgggaggctgaggttgcagtgagccgagatcgcgccactgcactccagcctcggctaaaaaaaaacaaagaagaagaaatggagtcctacgagcgagagcttccgcagcattctgtaggaccaaaataggcgcacaggttcccgagcgtgcgccgcctggcagcggaggagctggcagaggcgagccatagagccaagacacccagaacggactcgcctcccgcccgctcccggcggcctagtcagcaagctgcggatcggcggcaaagatgacatggcggtgcgccaatcaccgaaggcaagagagacagaaggaaccaatagtcgcccgagatggctcctggcggaagtcacgcccccaaactgtcaagcaaagcgcccggtggaaggggcccaggccggggggagggggctcccggcggcccgagggaggggaggccggccggcgaggacagcggagcgcgagggggctgcctacactcggccgcgctcgatcctgccctgatctaaacgccgcaaccccaagcccggccccggagaagagtctcaggactaaaagggctgttccagccgtccgtgctggcgcctggggatccaggccagttcccggtacccgcccatgcccagcccggcggcctagggcgttaccttgagctgagagctgtcggacactgttcacgaactgctccagggcagacgccatgttttcccccgggcggcccgagcggcgaaggcagcacgcgcgggaaaaggctgccgctctgggaggaggggccgcggcgatccacctgaggtcctcgcgagcggcgacgtcacttccgctggttcaagcaccgcgagactatacctagctgcccacccgttactgtttccatggaaacagcctgaattcgccgtagccggaaattagtgttccatagtcccctgcatctttattcactgcacttctgaaatccctccgcaggttaaatggggatagtgggcaaaagaaggaaggaaactcataattaagcaagtattttctggttctggattttgctagagaggccctgcggttttccacctggacagatacttcaatgaagcacaacttcgttgccacgtctcccgtgaggttttccccgtgatattagactctggagccaagcagcctgggttcaactgccttttctaccacttagtagctgtgtgacgttgagcgggtcacttgactgtcgtgtgcattgttttccccatctgtaaaatcttagtgtccttaaccacgtaaaacacttaggacagtgcataggacgtagggagaactatagttattcattcaaggtgtacgttgaatgaatcgatcccttccctgcaaaaaataaataaataagtaacaccacacacagaaagtgaattgatttttcccatctgggattgatgtctccctcctccgcttgtcgcctaaagcactttgttcttctcatgttgcacttctactctgttacagaaatgtgtctctatagtccatgtgatatctgtaaaccaaaaataaaagtctaagccccccaactgactggtggaccctatctgaagccaaggacattccaatttatcctgaaaaactagttcaggccatgatgggaagtggtagtcagacatgcctcacaaacatcaacacagagaccttaagactggtagactcaagactgataagaaatatttacaatctattctgtctgaatagcaggctacctggaagcctcatctgcatgataaaaccttggtctccacaaccccttataatcataacccagatatttctttctatttacttccaggtctttagataataactctttcaaccaattaccaatcaaaaaatctttaagtctacctataaggtagaagccccccactgccccgagttagcccgtctttccgatcctaaccaacgtacatcttacatgtattgatcgatgactcatgtctccctaaaatgtataaaaccaaactgtacccgcaccttgggcacatgtcctgaggagctcctgaggccgtgttatcatcgcatccttcaccttggcaatataaactttctcgattgagactggtctcagatacttttggtttacggatccattgcttctaactggcatggagttccttaaggtcaagcatttctcttactaaccttggttcccctttagggcccagcataggatttgctgcatagtagg

SEQ ID NO: 1243879 - DNA, 4001 bp, Homo sapiens
agttctgttttgtaattaagaaaattggcccagggaaattaagtggttcacccaagaagtgaccgcgacaggatttcaacctgaagcttctaactacactacaccccaggaaggagaacactaagtatttgtcgaataaattaacaaaccagtggttcctttattcatagaaaaggcaagcctgtgccttccctgtgaacctcatttctattaataaaaaggaaaaagaggaagaattcttattaagtgcagctccatatcagaccatttgtcttacaccagtgaggtaaaagcacccctccatttttacaatggagatgcaaaagactcagagattaaaggttatttgtccaaggtcaagcagctcctagaactttgcaattaatgacggtaacaataatttgcagctatatttattgcaccccttatgacaggcactgttccaactgcttttacatggtttctctcattgaatcttcacaactctacataaactagggacttattttgcagacgaagaaactgaagcacgggatagttaaaagggccttcacagccagcatctaatcattcgaatttcaggtccagaattcggtacattcatacgcaatgaatgaaccaaacaacctggaaagtgcgagtaaaatcatcacaattctacccctagaaatggagtcctggccgggcgcagtggctcacgcctgtaatcctagcactttgggaggccgaggtgggcggatcacttcaggtgaggagttcgaaaccagcttggccaacatggtaaaaaccccatctctattaaaaatacgaaaaaattagccgcgtgggctggccgcggtggctcatgcctgtaatcccagcactttgggaggccgaggccagtggatcacctgagatcaaggttcgagaccagccaggccaacatggtgaaaccctgtctctactaaaaatacaaaaattagccgggcaggcgcctgtaatcccagctactcgggaggctgagacaggagaatcgcttgaacctcgaaggcgaaggttgaggtgagccgagaccgcgccactgcactccagcctgggagacagtgagactccgtctcaaaaaaaaaaaaagccgtgtgagctggcgggcgcctgtaatctcagctactcgggaggctgagacaggagaatcgcttgaagccgggaggctgaggttgcagtgagccgagatcgcgccactgcactccagcctcggctaaaaaaaaacaaagaagaagaaatggagtcctacgagcgagagcttccgcagcattctgtaggaccaaaataggcgcacaggttcccgagcgtgcgccgcctggcagcggaggagctggcagaggcgagccatagagccaagacacccagaacggactcgcctcccgcccgctcccggcggcctagtcagcaagctgcggatcggcggcaaagatgacatggcggtgcgccaatcaccgaaggcaagagagacagaaggaaccaatagtcgcccgagatggctcctggcggaagtcacgcccccaaactgtcaagcaaagcgcccggtggaaggggcccaggccggggggagggggctcccggcggcccgagggaggggaggccggccggcgaggacagcggagcgcgagggggctgcctacactcggccgcgctcgatcctgccctgatctaaacgccgcaaccccaagcccggccccggagaagagtctcaggactaaaagggctgttccagccgtccgtgctggcgcctggggatccaggccagttcccggtacccgcccatgcccagcccggcggcctagggcgttaccttgagctgagagctgtcggacactgttcacgaactgctccagggcagacgccatgttttcccccgggcggcccgagcggcgaaggcagcacgcgcgggaaaaggctgccgctctgggaggaggggccgcggcgatccacctgaggtcctcgcgagcggcgacgtcacttccgctggttcaagcaccgcgagactatacctagctgcccacccgttactgtttccatggaaacagcctgaattcgccgtagccggaaattagtgttccatagtcccctgcatctttattcactgcacttctgaaatccctccgcaggttaaatggggatagtgggcaaaagaaggaaggaaactcataattaagcaagtattttctggttctggattttgctagagaggccctgcggttttccacctggacagatacttcaatgaagcacaacttcgttgccacgtctcccgtgaggttttccccgtgatattagactctggagccaagcagcctgggttcaactgccttttctaccacttagtagctgtgtgacgttgagcgggtcacttgactgtcgtgtgcattgttttccccatctgtaaaatcttagtgtccttaaccacgtaaaacacttaggacagtgcataggacgtagggagaactatagttattcattcaaggtgtacgttgaatgaatcgatcccttccctgcaaaaaataaataaataagtaacaccacacacagaaagtgaattgatttttcccatctgggattgatgtctccctcctccgcttgtcgcctaaagcactttgttcttctcatgttgcacttctactctgttacagaaatgtgtctctatagtccatgtgatatctgtaaaccaaaaataaaagtctaagccccccaactgactggtggaccctatctgaagccaaggacattccaatttatcctgaaaaactagttcaggccatgatgggaagtggtagtcagacatgcctcacaaacatcaacacagagaccttaagactggtagactcaagactgataagaaatatttacaatctattctgtctgaatagcaggctacctggaagcctcatctgcatgataaaaccttggtctccacaaccccttataatcataacccagatatttctttctatttacttccaggtctttagataataactctttcaaccaattaccaatcaaaaaatctttaagtctacctataaggtagaagccccccactgccccgagttagcccgtctttccgatcctaaccaacgtacatcttacatgtattgatcgatgactcatgtctccctaaaatgtataaaaccaaactgtacccgcaccttgggcacatgtcctgaggagctcctgaggccgtgttatcatcgcatccttcaccttggcaatataaactttctcgattgagactggtctcagatacttttggtttacggatccattgcttctaactggcatggagttccttaaggtcaagcatttctcttactaaccttggttcccctttagggcccagcataggatttgctgcatagtagggactgagaaaataaacatgcattttaaaattttatccaacatatgtttactgacacttacaatgtgttgtaccaggcactagaaatacagtggtagtaaaaacagtcttggggcctggtgcagtctctcacgcttgtaatccagcactttgggagactgaagcaagtggatcacttgaggtcaggggttggacaccagcctggccaacatggtgaaaagccatctctactaaaaatactacaaaaattagctgggcttggtgatgggtacctgtagtcccaactactcgggaggctgagatgggaaaacctcttgaacccgggaagtggaggttgcagtgagccgagatggcaccactgcactccagcatgggcgacagagcaagaatctgactcaaacaaaacaaaacaaaacaaaacagtttcggtccttctctcctgcagacaacacatgaagaccctagataaaaggagttagtggtctgaaggaatggaacatggttctataaaatcatgtcacagaggagattgacctggcttgggagaaacagggaaggctttcttgaggaaatggcataaactgagcaacgaagaaagaggaagagt

SEQ ID NO: 1243880 - DNA, 4001 bp, Homo sapiens
gcaatggtgtgatctcggctcactgcaacctctgcctcccaggttcaagcaattctcctgcctcagcctctcgagtagctgggattacaggcgcccaccaccatgcctggctaattctttgtatttttagtagagacagggtttcaccatgttgtccaggctggtttcgaactcctgacctcaagtgatctgcccgccttggcctcccaaagtgctgggattacaggcatgagccatcacacctggccttataatgcatttcatagctaatgcagatgctatagctcccctacaattaattgtgttgacagcagaaatttatttttggattattttagtttggttcgctcaggccatgtttgctaggatagataacagctaattgaatgggggtacagtgaaaaccaccttgagcttcatgtcaaaaaacccgagtttgcctgtgaaacctgtgaaatgggagaagtgaaaaaattaaataagtaaataaataaaatttgagtttggatctgttaggatattaatacttgtgacctcaggcaactcacttagcttctctacccctcattttcttcatctacgaaattaaagagttggattatacagtttctaaaatcccatctggttctaaatccttagactccttagactaaatcgttagtgtttaccaagctgtagaacaaaagtggaggtttagagacaaaccccaaagaacaaaagaacttgtgtgggggtttggggactaagactcctgggtcccaggctcaacactccactgacccattaggcagaaccttcccatgcccaggtccaactggccagtagcaggatgataaggaaacatttcagggaacatgagtagaaatagaggagacccctcatttcagggagcagcaccttgacaaggcaggaggatgagaaggacctctggaggggtctaagctgagctgccctgagtcacagagatcacagtggagtttctcctgagacaggagtgtcagctgagtgggaactgtgtccctcatgggtggggtcagaggttaccttggccagcagccggcgcccgtcattatctaggatgaaaacagccttgatggtgtagagggaaggttcctgcaactgacaccggagaggagagttccgtttggcccctgactcgaggtggacaccctgtgtctatgggatctgctggccctaggatacatcctcaggccccagcaaccccagtcctcaaggtccacagctggttctgcccagccctgtgccacatgggccaacccaggtgcccactccactcccaggcagatgttccactgcaggccccgagtgggcgctgtgcccgttgggtgcagaaggtccttccgggcccaagttctgtcatgcactgactgctccagagcccgagtcggagtgtatcacagaacctgggccgggggggacagcgggccgagcctccttcttccagctgatccctggccgggctggacctgcgctatcagcgcgcccccaggccctggcccgggtagactccagaagcatgcccatcacccaccggtgatgggagccgagtctgggacggacaggccactccttaccctccccgcggaatcgcaactcacccgccacccccactccaaacggacccagaacttcagccccgcgccgacggactcaggacaggcctcctctccggtcggcgctgggacgaacttttcctcccgggtcctggggccagtcaggggtgacacaaagttcccagccgccgggcgcgcgagttctgagttggctgctccccctaaccctgctctgtccctgcccagctcccgccgcccgggatccccgcgcccgcccgctccgtacccgcagccccgagggctccccggctcgagcaggcggcgccgggcccccggcctgggccgccgcggccccctcccccgggtgcggacgtggccaggcctcgggccgctgcattccgctcgccgcctcgcactgacagcgccgcccgccgcctgcccgccgccgccgccccgcctccgcgccgccccgcggccccctctcgcgcgtggcctccctttcctcggggccccgtcctcttgctcgttctcccccatctcccctcccgccctcaccccacctctccttcccccacttctcctctccctctctcctccttggctccttcccgagtcccttacatccccgaactctgcatcctcagggtgccccaagaccagccctcgtcctgcttcctgcctgctctccggcctgtggctttggtgtgcgccagtgtctataggctgtcctggggccagcagcaaacacaagcaaagcccacttttgtctgttgacctctggtaggtaccatgaggacaaatacgtcaggtcaccctttagatctcagggacagggtctataagcaagagcaaatgaggacagttctggggacacccctctgtgaagaggctttctcattcctctctcactacttgcagaaggcaaccatgggcccggagacacctccccaggctctcctaagtcacagatatggcaccatcagaagcaagacagacgcccagcagcacaaatgctccaccaatgacatcgggctttgcagcatgttttggtttctttggtctaagtctaactaagacaagctctcatttcagggtacactggcaagtgggaaattcacatcccagtgatatgttagtgctacgtatgcatttaccggtaaaaacactgtgcgtgtattttacatttgacaccttcacatccattatctaatatagcccacacctgtaagataggcataatggaccctcattttaagcaaagagagactcagaggttgtgtgaccttttcaagactatacagctagttgactggggatagaacccagatttttgactcaaaatttcttccctattcttctcttcaagccctcttatgttgtggaccacagtcacttaccctagatggttacagaatggggttttcctcactgaatgcatcaagtcttcttatcttcaagcctctgctgaaatataattaccaaaaggtcctcctgacagccaccatatctgacttgataggtctctcctgtcacattctctcagttcctatttctttctttcattgcacttttttcaatctctaaatattatttttactaatattgcttgtttgagacacggtctcactctgttgcccaggctggagtgcagtgactcgatctgggctcactgcagcctcaacctcctgggctcaggcaatcctcccatctcagtctcccgagtagctgggaccactggtgcatgcaaccactcccaggtaattttttatttttttattttttttatttttgtagaaacaaggtctcaagtctgggctcaatggctcacatctgtaatcccagcactttgggaggctgaggtgggcagaaggcttgagcccaggagttccagaccagcctgggcaacatggtaagatctagtctctactaaaactacaaagaaattagccaggtagggtggtgtgacctgtagtcccagctactcagaaggctgaggtgggagaatcacccgagtctgggggttcaaggctgcagagccatgatcatgccactgtgctccagcctgggcaatgggagtgagaatctgtttcaaaaaaaaaaaaaagaagaagaagaagaagagaaaaagaaaggaagaggaggaggagggggaggagggtgatcatgatcaaggtctcactatgttgcccaggctggtcttgaacgcctaggctcaagtgatcctcccacctcagcctcccaaagtgttgggatacaggcgtgaaccaccattcccagcctttactagtttgtttataagtgttccttctccccgcccagactttgagccctgcaagaaccaatgaatgtgactttttgtttgtttgtttttttgttttgagacagggtcttgctctatcacccaggctggagtacagtggtgtgatc

SEQ ID NO: 1243881 - DNA, 4001 bp, Homo sapiens
ctgctgctctccaggcaccaagttggccatggctataattagtcctaagcagtgcatcctgggagggggtgggcatgtagctaaaaatagtccaggagctgggcagggcagggccctgggacccagcacctcccttattaccacccttagcaccttccccagcacaggtgaggcagccttccctgctcccctgctcaactgcccagcagtagccacctggctcctaccatgatggtggtgtcgtctgaggcactggcgataacgttgtcattgtgtggacaccagtcaatatccagcacaggggcagtgtgcccagtgaccagtgggtagttcttatccactcgccctgtctgaggggttggagaagaagatgtggggctactctcctgtgtgttttttggggagtgggtagcagatctgcttacatctcgattccttattacctattttctctttgcagatccctctctgcacttctaaccccatccagtccacttcctgcactttactgaaggcagagttgaaataatttaatattagggactgtgacacagagaggtaagatggcctcatcaaggacacacaacaagatacttgtagagctgagatttgaactttccagcccagtgctcttccaaagacacctacttggaggaggctgttcttcagcctgttctcctattgaagtgtctgtgggaatctcctggtggaagaggtcaaggtgagataatagtgtagtgctggacagccctttcctggcctcccttggcagatctcttccttgtgaaccacttttaccttggaaccacaagcagcaagcagtcctggtgcctactatccccaaatgggagctgggggcccatctattttttggtcttcacaggctgcttgtgggggttctgagacctctgcaggggcagacactggtccagaccaggcagcgggggagagggtggctatgtggtactgaaagagcagacatattgggggaggaggcagctccggctgaaatttgagccctggggctgtgtcccaggatgatgtctgcattgtctggggtgagtcactggctttttcaggcctcttcctgaccccgccacctgtggagcctaccctaacaaggtgtaggggccagaatccaggtcaaggtcataccttgggggttgggggagagtcatccttgggatgtggatggtcaaggggcttaaggttatgaagctaacgtggtagtcattgcctggtccccatcctgagggtagggagggctctggctttatgtgtcatgtcccccttcctttccgttccctttctttctacttcactgcaagtgtccttggaggtaaccagggactctttggatagagcctgaccctgtcctcagtttgctgctctgggatgtgacttaatcaaatggtcatcttgggctagggaggaggttctccacacccaaaacatgaggggatgcggcattaggagaggcagtgatggaatctggccaggcttggctgtgctgtgtcccaaccatctccatcacccggctcccctcctggtccctgctgggaatggggtggtgcatggagaggtgggagggctagggagtgggagtaagccaccctgatgttagggtggggtggggtggcctcccctctggtccttgagggcttggggaatagggaggagccaatccacacagatgcttctcctgactatggaatggaactaggtgagaacaaaggctcaggagttcccaggggccccagctagtgtcctcccacttgcttcctttccctgatccctcaccttggccagaggcaggacgatgaaggcacccccgcctccagcctccacaataatggccaggaatttggggttgacggcacagaaggagctgtcccatgtgaccttggacacacggatgtcctcgtaggcctggtcggcctttgctgcctgcccaaacacatggcggaacttgctttgccgaaccacacgtctgctcatagctgcaggcagagaggtaggatctcagtgcccagaaatgcctttggtccttagtcctgtgagctgcgggagggaggaggagtggaggggtggctgatgagaagggttatgtggtcaggagtcaggtataaatccatatagtgtctggtcctagaagcagggagctttcttcaaggtggtcaaagtatgggaaagttattttgctgtgtaaaatgctgtttaatgtaagtggctaggatttggggcctgaattctccacagagacccaggctgaggggattgtggagcctaacagactgaaagctttctggacgttggaatgtttttgggaggagcctcaatgccacactgcctgcaccccccgcccccaccaccgccagccttgatgagcatctcttcacggacgtggttgtagctcccagaggcaccctgtccagaagcagaagacttgaccattggatcttggcttaaagccaggtatggggccaagactgcagccaccacaggataccgaactcgcatctctggaatagttcaggcagatggggttttgccttttcctaaaattttgccaagggggaagttcctcctgtccaccaatctgagtcctttctgctactgttttcatcccatgccttgtggggggacgggtggcagcacagagtgaggtggatccctcttctcccactcctttctgcactggcttctccaggaagccctgatcatggtcttctggcttttgcctaccataggcttgtccggtttctcctctgggtcctctgccctggttgggccttcttcctagtgaactcttctaggggtggggtcttcaaccccatcctccacccctgcccccgccacggccaagccagatttgcaggggtggggagggtgaggtgccttttctccagctagggtctccctagaggacacactgagcactcccaaagccccagccagtggctcctgccccaccccagccccagcatccgtgtgcccttcaaggcgcgtctgcggccccgagcctgaggcccggcctccctgcacccttcttcagcctgctgccctgacactgcgttcttgcgagacgaggtgtctgcgccctccgggagcgctggctgctgtccggccaaatatagacaccacgtcctccccgcccgaaaccgaatttggcggcgcggggggaggaggcgcagacctctgcccctcagggaccccgcccgctccgctggctgcggtgacggccgggtgtggggggctgggtacctggtcctgagcgggctgcggggcgctcacgctgcgaatcctctgcggaaggggcccgagtgcgtagggggccgaggaaggcttcagggcgaaggagccacctctccgggtgtctgtagtatctgggacccgggtgtccagctccgcactctggccgatcctgcggctctctagagcccggcgccgctgcagccccagctgccgctgccatcaacctaagagggcggggctagcataggggcggggccagagcccaagttgccccgccccctccagcggcgggaaagtcgagcgaccccgactcccctcccagcttccgccggcctcggagaaccatcgaaaataaatgtgcagctgtgtgctaggtgcgcacgctgcttccctccctccatgactcccgggtaggctggggaggctcgggttcgcagacctagagcaggacgcttggagagggaacgggcgagggggcgtgcgcccctagagcgggcagccgagggagaccaggtgcctccacccgcattccagcctcaatcgcgctcccaatttagctgtcccgatcggccgggactgcgggactgcacttccaggcctccctgggggaaagaggccctagagaatgaggacccaggctgatcctgatgtagggcaagtgagagggcacccgacacagggttgtgaatgttagttattgttatgaatggcaatagcgatcatttgagaaacctaaaatgctggct

SEQ ID NO: 1243882 - DNA, 4001 bp, Homo sapiens
gtttttggcaattatgttcacagcttcagggagtaagctgtctattaattccttccataccaccactgcaaagactgatgcagcaacaaaccatatgggccacatgcagcccacctactggaactgggcaattcacagtagtcaagcagaattgtcctatagctgacaatatagaatggaaaggcagaaaaacagctaatctgaaggatgcatgctggaaaaacctccatacagagaagatatttgaagcaacataaaaggatgagttctctgagaatgagtgcccaggatcaggatcaaagaacattcacagtcaggtatggtagaatgtaacaaagaagtgattcaaaaaagaatcacaggactttaaaaaacaacaaacaacaacttttcattatggaaaatcacagccatgtgtaaaagcagaagagtaccatgagcccccattacttatccccaagcttcaacaattaccagaccctagccaatctattctacctctccactttacaaaccaaacaggacctttgagatcacctacttcaattacgtcattttatagatgagtaaactcaattccagaaaagtcaaatgaattgccctggaatcacacagaccagaagacagccataaaataacattatgaaaaagaacgaagaacgcaatttcatggagtcacagtgtcaacatcaccagatggtgcagagagcttgtgtgtggtaggtgacaagtgaaaaaagtttctgggatgtgatcaaaaggcagtccctggcttctcttatctggcctctaatatgcaccaccggcatcacattcctcacacaaccattagttaatcatctaacgtcctctttaagatctccatggggacaaattgcatccatccacaaataactattgggagcaaacaatgtacactaagtactgttctgggcactggaaacacagaggtaaaccagagatggacactgtccctgccatcacaaggtttatattctagttgggaaaaacaaataataaacgagtatataaataaacaagtatagactgtgctaaccataatgaaagaaataaatggaatgatgtgaaaagaaagaagtagggggccctagtttatatagggtggtctctataaaggcctctctgaaaaggtgacatttgagatgagccattaccaagagtcaaggaagaacattccagctccaatatacatttgtcactagtttcttcgagtgaaaggatattaaagaccactctggcggtacagagacaaaagtctgatggggactacactccgctgtctgcaactgtcattatcatcaacgttgtcatcatgaccctttatattggaacaaggcttctgagtggaagcaaagcaccttccttgtcattgcaagccagtggctagaagccgaggctctgataaggaggactgtggaaccccaaggttctgctctgccctctcctccagcttccactatctgaaaacctaaagaagcaggaagacaccgctcttccgcagaagccggatggaggaggctgtgtggaccactaaagccacagtgcaagactggaccctagctccgtgacctcttcactccaagctactccagaggtcatttcccccaccacaccggtggccggccaacctcgccaagggctccccaaggttgcagccagccggaaccacggcctcgcacgtggtaataagagaagaatttcccccaaggtcgtgcccaaggcgggtacagtacctgtcaggaggcgtgaggagagagtgtgcggagatgcggccataatttacgagtctggggccgctccccgggatccctgtgtcctctctcctcacgggacgctgggcgccgccatcttccttccccgcccccctgtgggagtagttccgggccgccacttccggcgggcgggctccgaaaggagagcgtggtgtctggaggtgatcggaagggactggctggagtgtggcgggctgacaggtctgaggcctgaaggacttccgggaaccgcaaagcacggtgtgcctccgctgtcctgaagaaaaagccgcgcgcggacgactggccggcccgcgcttgcagctcccagaagttgacaggcatcctccggtgaccgggtgaggtgggcagggttgggctgcagagtcctcccgggcaatttaaagttacagcggccgggcgctgtggctcacgcctgcaatcccagtgcttagggagaccgaggcgggaggatcgcttgatcctgggaactcgagaccagcctgggcaacaaagcgagaccccgcctctacaaaaaatgtaaaattagccaggtgtggtggcgcgtgcctgtggtctcagctactcaggaggctgaggcgggaggatcgcttgagcctgggaggtcgaggttgcggtgattgcgccactgcactgcagtctgggcgacacagtgagaccctgtctctaaaaataaattttaaaataaaaataaagttaaaattagaacacttcccggtgacaggagcatcatgaggaaatggttctcgtggggatgcttccacctccacgtctaatcaattacactttaccgtagtctctatcaaatgggagcccagaggaactccgggttacttgtttctgagccacactaaaggaactgaatcatccagatatctccagattgcatgtagaggttcagatttggtggtctggagtgaaatccgtattctagttctggccttttgaccttgttggagcaaattacctaagtcctctgaacctcagttatctagcaatacaatggagtagtaatggtacatcttttataagaggttgagagaattagataaatgtgtttcatgggtagccagacacctactaggtacaggcactaatagattattacctgtgttatcataagtgttgtgattaccagggtagatctcagcatcccccaacccctcgatcttcttttcagattggggttccacaagtaaaaagtagattgaagaaaagattccgcttttgaaaaagaagagaaaaaataggtaattgggttctaaaaaggccatttttttctgtgttttcaatgatgagaggatagccgttttggttcacctcaactaacattgctaggcacaggggacgctgaagagattaagacaccccccccacccgattctgtaggagcttaacactagaccaatgaggggacaagaggttgtcgattgtcactatcagtgtgataggggtagtatacaaagtgctgcagaaaccctgatgaggtaacatttctgtgcagttggtttaaggaaagcttcagagatctaaacttggtgctctggaaggaacagtaagatttttacagcatacacaatgagaacacttggacacaggaaggggaacatcacacacactggggcctgtcgtgggatggggggaggggggagggatagcattaggagatatacctaatgtaaatgacgagttaatgggtacagcacaccaacatggcacatgtatacatatgtaacaaacctgcacgttgtgcccatgtaccctagatctgaaagtaaaaaaaaaaaaaaaaaaaaaagatttttacagcataaaagaaagggaaaggacactccataaagaggaaaatagcattaagtactacgttaaaagtttttgaactctttataattttccatgtgcttttataaacacttgttgtttaaacctagagcaaaagttatcctctctaagtctggcacattaaggcccagagagttttaagtaatctgatcaaagttacctagctgttgagtgccagaaccaagacctgagtccctgaaacctgtgagggtgttattttcaccatgccataaggcattactcacctaagcatcttgaagagtcatagcttctgtgatttataaaacttagtgtttttcaccttggcagcctatcagaatcaaatgtaggactttaaaaaattatagatgtctaagccacctctag

SEQ ID NO: 1243883 - DNA, 4001 bp, Homo sapiens
taaccaactggtagttttagaattcatgcttgggcttggtctctgatgaaaagtaattcacattctatactcatcctcaaaatcaactattgcacattcccacataaatgctggcattaggagactatgccagaaaagaaaagtccttttgtcttctgcttcatcatctaaaagaaaggtaaattgatttccacgggcatggtggctcacgcctgtaatcccagcactttgggaggccaaggcaggagggtcacttgagcccaggagttgagaccagcctgagcaacatagggagacctcgtctctacaaatttaaataaataaacgtgcgcgcgcgcgcacacacacacacacacacacacacacacacggaaagagtgaactccagctaagaataccagtcatggtgttaaaaaaacaattcccaaactttcctgcacgctggaatcacctaaaacatacttgacaattactgatgcctggttcccactgtggccttgtgataaaatgggtaatgtgtgtggatttttagaagctgtccaggtgattcccaatgttgctgtacaatgaattttgggagccactatcttaaacacttactgaatcacttgtggcatgatttttaaaccgaaattcctgtccctaccctagacttcctaaccagaatctctggggtaggggatccctggaacgtgtatttaacgttaagctccataggtgatcctaatggccagccaaagctgcaaattattagctaagaacaaaggagaaatctctaaaatacgtgaaacttgtctttgcctgtggttctcaaaacttgccctcaaaatcaactacaggacttaactaaaatatagagtgctggtcccactccccttcttctccccgccccacccccccaccccgtgtttctgactcagtcctggagtcgggccctagaatttgcacttttaacaggttcccgggtgatgctgatgctgccggtcctgggcgccacactcccagaaccgttgcaatgtacttaacagtttccaggttaagtacattacagttatatattaacaggggtggggcgagagagcctcaaaggcctaattcatgcctctttgtacggaggaactgctaatcccagtttaagcccaagaaacacgagtagtccaatttccagagttacccttggcacataaaccacatgtggtttgcagagtgaatgtatgaataatacattttaaaagcgtgtgtgcgcaggagggtaaggcagactgctagatacccggttagaggctgcggacctttttttttttttttggcgaggtgcagttcatagatcaggggtttcactctgcagcatggtataagcacaatcactaagaactggatgctacttgcagttttgtcaccaatttctttggtgactttgggtgttaagtgactgttttgaacctctctcctcttaggtagataatatcggaaacctcttccacctacgacccgcagagcgagggcttgtcccgggatttgtcttgcacccccacctctcgcgtctgcgccaccctgcgggcggcgccggcccctacctggcaatagagccgataaaggggtacggcagcgtaggacgcccccagcatgcccacggcgacagcggccacgtaagtgagggtcgtcttgttctgccgccgccgctcctcctcctgcgcgcgtgtgaaagggttcgagctcttaggccgccgcggcggctgcaatgctggatgccgggctcgaaggctgcagcgcttccatgtcccaagccacctcagtcctctctcggcacctcctgtcccactccactctggcctaagaaacggctctaccctctctgcagccctggttggagacccagggtggatccagcgccagccacagaaaggaacgcacctccatccaggacgccagagccctcccataaccctctgaactaacacccacccgcctctcagggacgagaggtcaaatctcgcgaggcgtgctccgtctcgcgagatctgggttgagcctgccgctgccttggctaccaggctcctcaggtggcagcgcttgcagtcgggctacggaggccgggttgccagattacgggtaagtttgcgttttgctttgtgactgttactcccacttcgcttctcgccagaacgtctcttaacatttaggaaaatgcgtttcgcccgtccgcgtgcaagcttgccatcacttggggttgcgcctgtgatctttatttaaactccaccagcctttgtctcgacccggcagccccggcgacgctctcccgcggtcttttctcctggggtcccttggccgctggctcctgtgctcactgccctggacttagttcaagtatcacctctctcaggaagccttgctgtgttaaccgcagccctcatgggcacccacgacacctgcattttctcagcccgtgggcagtcggcttcccctgctctgatgccccttacaacttgcccagtggaaagcaccacagctggagcaggagggaggctgtcacgctgaagtttgttctggagagagtgaccaggataggagggccatttaaggagagactgaaagaaacgaaccccgtgggaggatgtaatagctttcttcagttgtcccacaggacgaactcgaggggggcagacagcatagcggattttactgtgttagaaggaagcatctttctagaaactataaaatagcagttaagagctcaggttctgaggttagggggttctggatttttacccgggtcctcaccatggccctgtgcccttaggtcagttacttgtcctctaagacctggtgtccttacttgtaaaatggaaatcagaacagtaaatgaataatattcatataacgtctttcatgatgactgaggcatagtaagaatgtagttaaaagttaggctgtatttctacttgctacgtggccatttctaatggccagagcaggtataattatccccactatgtggatgaggaacttggaggcctgagaaattttaactagtcattcgacattttatttatttattgccctctcaactgtgggcctgacaccaatcgacctgctggcactatagcacagaacaagtcgggagatcacttcagtgatggagtgtcctttctgctgagggactcagaaaataatcaagtaacagttaccgaaataagggaatttcagataacaatcagtgcagtgaagacaatgtaataacatagtatgattgacagtcatgagaagcggtagtaaagtaaggacgttttgaagaggtgacatttgagtttagatctgaacgatgataaggagctacctactcaataacaattccaggccaagcaaaggcccaggggaaggaaagagatagaatgattgaagaacagaaagaaggccactgtgttcccaacatagcagagtggaaagtggtaggaaatggggtcagaacaggtaacaaaggcctggtaataccagccttttaagccatgtccaagggtttggattttattctaaaagtaataggaagctattggaatgtttgacacatacaagtgatgtgatctgactcacatttttgaaaagatattgattactttgtggagaatggattaaaggtagggggaggaatggaagtagaacaattaggaagcaattgcagtagtccacatgagtgatgatggtcaccttgagtgagtaattgattaacttgtggtcacagggccagaaaattgcagaaccaataaaatataaataccttctgacttctttctatactctggcatactgtctcaaaaatttcaggtctccatgattctacaaatttattcatattgtgtgatgacagtgtttgaaaatctttttcatctgcatgcaccttggttcttgtaccagattctcagctcttctaggatgagatttctcaaagtttaattttcttacagcatagactgaaatccttgataccaacagtacatttccac

SEQ ID NO: 1243884 - DNA, 4001 bp, Homo sapiens
atcaactttgcaaatcaactccaatcttatttgacaggtactttatggtttccattcaaatcaattctctgaaatgtttctcatacttgacttcagtatcacatatcattccttgcataagatttaaagtagctggtaaatatattagagatattacaaatgagtttataaatattaaacagttaatctctaaattaactctattacgctatccaggtaaccctgtagataacttgaaaaaaattaagataacttgatatctgacaaactaaatttcaaagattcagacaatcatagatatgtatacataagcccccaaaaaaatcatctgcacccactctcaacactgtaataatgcttttcacaaacacattcaaatatcatttatatgctaattacctatgaaaatttaagcaggtatattcacttaaagaagcatagcggtcaactataaaaaaataggagtcaactataaaatcttcatttgaatgataaagttaatttttttatatattttcttaagtatttgtctcaacatccattggatgaagtataaagtgaaacaaagaaaataaacttcattttcccaagctggaggaaattaagccttaaaattttacatattcgaaataacaacaaaaatctaattcgaatatagctgggtgaataggatatcaagaaattactcaaatggtttacctcacaaaatacactgaaaaaggtagttttcccatacagactaatgtttgagtatttaaaaatatcccatccataaagttgacactatatttaggcatcaatatcaaattgtgtgtgtgcttgtgtttttaattttattcacatatcagtgtcctttgttattggttaatagcacagagtacgcattttgagtgaattcttgaagactgagttaggatggatgtactctttaccatatatgatcacctactttcccttttgattaatgagagttacatatttgaagaacagatatgattagggtagtccacagccacagaccaaaatgactctgtatagcctcaaggcgacttgcaccaagaaaaagcttattttcatatttggtcacagcacaactaatactgaaaagaaaaatccaggcacagaatttacatccctgcaaggatcacagcattttaaaggtgcaaggacagagcattttaaacatttaagcaatgcaaacggtgcatttgttgtatcatctccaaaaagccctggccatcacagctctgtcaataagtgtatgtcaaagtcatatttcttacgcagatgttcagaggtgatgacacgatcgtatttaaaagaaaaaaaaatcctcccagaaagtctatgtgaaattatatatctacaagagagcttatcaagaggagtaaagtaaaagatagaagacgaaaagactcaggaactgtcctaacactcaagaattttctagatcttctatatatgactgaaatcttgtagaagaaatgattccaagtcccgcagggaaacttctttatcttagcagtccctcagaaatcttcttttaatccagatggaatgatcagttattgcttcaaaagccttatgaagatacaaaaatggggaaaagctgatgctagaaaaggggaagagatgcctgctcacttcagacactatgccatctggagtgagttccctcttattttattcctctcctttttgctgaaaatcctgcccatctctggagatagctcaagctctacctcttccacagagatggtccgtgttattgcagcccacacacatcttgccagtgggaacaattcctgtaaagtttaactgggtacaccaacatacctcataaatatttataacattctcttgttttatactaatttcttgaggtcctccttcttctactttgtaattttttaaacctcatgcaatgcttaataacacttaaagtgtgtattagaagtgtgaccattagccattctgcccaggctaataaggtgcacaaatgacatcacaaacccttcagagtctaaaatgaagcggctcacagatctgtgcaagttctccagctaagtccatatcttcttaagctgagtcagaggtaaaaattggagaaaaatcagcttctgtcaaataggcaaggggaagatcctgggaatatcatctgccatttttgggctccagtgtccctccgtggctaagaggactatcgggaatcagattgcctaattctaagtcccagccacactcctatgtaaatcagttaaccaatctgaccctcaatttccccgtatgcaaaactgatggtgtctatgacatcaggttgtggccaaaataaagtgagatactgcagtcacagaaaaaattagcacagcgcctataacattaggcacttttgatataagataacaacattgacagcttatctataaaatgtgtgagctgacctaggttatccttaagatctcttctcgctcatattctatgcccctgtaagaatagggaccagaaatgtcagaaaggagtgtcccctccagccatcccttgaacaaatgacagcctctaggaggcaattctttgatgattagcaggacgggaggctacgcggcctgggccctgtccccgttacagggtgtctcccttcaccttcaccaccgccaccccttatgccagcattgtctgagcgcctactgggtgccggaaccagcctcggcccttggaggctcacacggacggggagggggcaggcaacactcacttgttcctgcggatccactcgatgagggcgcgcacctcgggcacctcgtccagggcggggggttcgccggtgctaaactggtcgggaaagcttcggttgaggtcgcggccgcgactattgtcgcggccgctggccccggacgggccgccgtcgccgaagccacagtcgccctcgcgggcacgctcgaagccatcggggttgaggctgggcagcaggtacacgtcggtggtgttgagcaggcggaccaggcgcgggtccccgcggcggtagccggccgccagctcgcgggccaagtagatcaacacctggcgcgacacggtctcgtcgccatgcatgttgcccaccagcttcacctggggccggccgggcagcagcggccccgcagcgtcgggcccggcagcgtcaggccccgcgtcgccctcagggattagcgaccccaggccggcggtgaggcgaagcacccacagcggccggccttccaccgagcggccgatgctaaagaggcgggccaggccggggaggcccgcggccgccgcctccctcagcgccgactccaactcctcttcgtggtagtagcggtcgaactggccctcggccgcctcggcgcccgcgctcgtagttgtggtagtcgcctccgccttcttgatgtgagccgcccgggccgagctccccagcagcagcaggcacatgagcaacaggagccgccctagccgccaaggcggccgctcgtcccggccgctcgccatcttccagcagcgccgctaaccccggctccgctcccgcggctcagcgctccgggcggcgggggcccgccggatcccctcctcgcctagcaaccccatcccgccctctggccgcagccaatcgcggacgggcctggtggagcgtcaccaccagggggcggggcttcccttaaagcagccgattccctctgggcgggcctgccctcctcccgtccgggacgagtttggtcactctcttccttcgccaaggttcttcttctcttctcctcctccttgtttcgtcttctgcgtgtgctccgcttctcgcttagtctcttctttatggcttctcccctaaattatcacccatttttctctgagaactcctgctagttctcttcccatctttgttgctgcctttctcagctgcgctttaatgcttagaaccgagaatggaaagaatcaaaaggttcgaaagaatcataagactagaaaaaatcaataggttcgaaagaatcttcgttcgg

SEQ ID NO: 1243885 - DNA, 4001 bp, Homo sapiens
ggaatgatcagttattgcttcaaaagccttatgaagatacaaaaatggggaaaagctgatgctagaaaaggggaagagatgcctgctcacttcagacactatgccatctggagtgagttccctcttattttattcctctcctttttgctgaaaatcctgcccatctctggagatagctcaagctctacctcttccacagagatggtccgtgttattgcagcccacacacatcttgccagtgggaacaattcctgtaaagtttaactgggtacaccaacatacctcataaatatttataacattctcttgttttatactaatttcttgaggtcctccttcttctactttgtaattttttaaacctcatgcaatgcttaataacacttaaagtgtgtattagaagtgtgaccattagccattctgcccaggctaataaggtgcacaaatgacatcacaaacccttcagagtctaaaatgaagcggctcacagatctgtgcaagttctccagctaagtccatatcttcttaagctgagtcagaggtaaaaattggagaaaaatcagcttctgtcaaataggcaaggggaagatcctgggaatatcatctgccatttttgggctccagtgtccctccgtggctaagaggactatcgggaatcagattgcctaattctaagtcccagccacactcctatgtaaatcagttaaccaatctgaccctcaatttccccgtatgcaaaactgatggtgtctatgacatcaggttgtggccaaaataaagtgagatactgcagtcacagaaaaaattagcacagcgcctataacattaggcacttttgatataagataacaacattgacagcttatctataaaatgtgtgagctgacctaggttatccttaagatctcttctcgctcatattctatgcccctgtaagaatagggaccagaaatgtcagaaaggagtgtcccctccagccatcccttgaacaaatgacagcctctaggaggcaattctttgatgattagcaggacgggaggctacgcggcctgggccctgtccccgttacagggtgtctcccttcaccttcaccaccgccaccccttatgccagcattgtctgagcgcctactgggtgccggaaccagcctcggcccttggaggctcacacggacggggagggggcaggcaacactcacttgttcctgcggatccactcgatgagggcgcgcacctcgggcacctcgtccagggcggggggttcgccggtgctaaactggtcgggaaagcttcggttgaggtcgcggccgcgactattgtcgcggccgctggccccggacgggccgccgtcgccgaagccacagtcgccctcgcgggcacgctcgaagccatcggggttgaggctgggcagcaggtacacgtcggtggtgttgagcaggcggaccaggcgcgggtccccgcggcggtagccggccgccagctcgcgggccaagtagatcaacacctggcgcgacacggtctcgtcgccatgcatgttgcccaccagcttcacctggggccggccgggcagcagcggccccgcagcgtcgggcccggcagcgtcaggccccgcgtcgccctcagggattagcgaccccaggccggcggtgaggcgaagcacccacagcggccggccttccaccgagcggccgatgctaaagaggcgggccaggccggggaggcccgcggccgccgcctccctcagcgccgactccaactcctcttcgtggtagtagcggtcgaactggccctcggccgcctcggcgcccgcgctcgtagttgtggtagtcgcctccgccttcttgatgtgagccgcccgggccgagctccccagcagcagcaggcacatgagcaacaggagccgccctagccgccaaggcggccgctcgtcccggccgctcgccatcttccagcagcgccgctaaccccggctccgctcccgcggctcagcgctccgggcggcgggggcccgccggatcccctcctcgcctagcaaccccatcccgccctctggccgcagccaatcgcggacgggcctggtggagcgtcaccaccagggggcggggcttcccttaaagcagccgattccctctgggcgggcctgccctcctcccgtccgggacgagtttggtcactctcttccttcgccaaggttcttcttctcttctcctcctccttgtttcgtcttctgcgtgtgctccgcttctcgcttagtctcttctttatggcttctcccctaaattatcacccatttttctctgagaactcctgctagttctcttcccatctttgttgctgcctttctcagctgcgctttaatgcttagaaccgagaatggaaagaatcaaaaggttcgaaagaatcataagactagaaaaaatcaataggttcgaaagaatcttcgttcggacactcaaagccttagcccagtctcctaggcgccttgtctccgcatccaccccgcctccgctggagccccgctgtccgcgtgcggttgcacgggacgcctcgtggggaggaaggctcgcacctcactaggcggtgcattcatttttagagttgctttctggaaaggtgtctcttttatgcctagcggaaatgtgctacgtagtaggctccctttgtgttaatgttgtctatttcttaggcgtcaccccacgttgttttactgcaaataggtccctgtgtgtgctggcctcgaccctcattaggcagatttcatttcacagctcaccggcccacttctcccacctcatcggagcaagttgtatatttaactgtgccctggaatgacatattttaaaacagcaggtttgacatttctggaaacacttgcttggcattcctgaactcctcagtgtcagccaaagatggcaattacagcgtttcatcaagtctagagaagaggtcttttaaatcaccttttataggctttagtttctttagcttgaagaaacccaaaactatcccttaatcgaatgcgaaattctacccatctaacaacataatcgcaataaccggcattaccttctttcagagccagctatttcagggccccttccctgaactatgactgaaccctactttaatagagttcattcattcgtcaagtatttattgagcaacttttatgtcaaagctagatgctgggaaacaattcattcttctgcccagtcaagagattcagtgtagtttgtgataaatgctacaacagagggggtacaggtgagggaaatatctgaacttgaggaggaggaaaggaggagagaaaccatggaggatgggaaggatcccaggcaggaggagaagcaagcaaagaaagccgcaggatttgagaacaaatgccttgtgttctgggaattgcatgcagggtcaggattactggtgtgaaggggctcacaggccagtcttcagggagcacatttgatctggaaggccatggagaaccacagacgggttttaagctagtttagaaaaattcctctgacagtaacacggaaaattgaatgggaggcctaagacttgaggctgagagacctggaaggaagctgcaatccaggaagacatgatgagactctgaatgagggcagtgccagtggaggtggaaagaaggaaatggatctgaaagaccttcggaaaggaaagtggacaggatctggagacaaagaggattgtaggctgacttcaagttacagcctaagcaacttgcaggtattcactgaggtacaggccaggagaaagcacaggtttaggtgaagatgattaatttagtattctgccatcagagcgagcaccgtcactccggtcctgtgaatggctcttctccatgccccatttgatctagtctacattatgcacagcagctgcaactcatcagaaacaaagccacaactctgtacagagagaccgcccaccacctcccgggagtgctcaactattacaccatgcacttttacagtaatc

SEQ ID NO: 1243886 - DNA, 4001 bp, Homo sapiens
ggcaagcgggaggaagacagggaaaccctaaaactggaagccagttttttttggcaattgtatatttctgttgaaagagcctctacatgagccatgagccagaagaaaagttgaaaactcttatatttgaatcaggccttcccagaatggctgcatttggggagaggggcctaggaagacagtattgacccaaagtcagggcaggagagaagtggaggatgctttttgatagcatttcaaagatggtggcaggtgctacctcagggcatagggaatggatgagacaattgaccagtttacaaactgagtcagagcaggggactgggggagaaggatgcctctcttctagctgggaggaaatcaagaaaaacattaagaagctggagcctcctgggaatgcacaggccaaagctcagacacacgcccatcccagcaaggcagaaagaaaaaaatacccctttccaggcagcctggttaccctgatgcgaactgcaaactatgaagactgctgctgaggcgggaaaatcttaggggaggggcaggctgctcggtggatccaaccacttatcctttgtctacctgtaagtctaaaattctgctccatggccgggcatggtggctcacgcctgtaatcccagcactttgggaggcccaggcaggtggatcacctgaggtgaggagtttgagacccgcctggccaacatgacaaaactccatctctactaaaaatgcaaaaattagccgggcttggtggcatgcacctgtagttccagttactcgggaggctgaggaaggagaatcgcttgaacccaggaggcagaggttgcagtgagttgagatcacgccagatcactctagcctgggcaacagagcgagattccatctaaaaataaataaataaaataaaaataaaattccgttccatcccaattttccctccccaggtgcaaattcgacaccctatcccaggccaggcagagcccctgctgggtgtagctcagacagaccctacactcacccagcttggggcccaggcctgtctgctaactcacctttctcacagagccctttagtgaagaagttgcacacagctgaggccgactctggaaggagaagagggaacggagaaggtagcttccccagaggctgcagctgttccggaagcctccacctccatcggcatgtcccacctagacctcccccaggctctggcctatgggatcccaaatctgggccctgtagaggttaacctgcagagccagccagcagacctcaacccttaaccccccaactctgaaacagaggagctcgaggggctcaagcctggcccaggagctcgggaggccagtgtggcttctctcaattcaccgtctctctgtgcctctctttctcagtctggaaaatgggttgccccgaagccacagaagagagagacagagaaggggcggtcgcatcagggagttgagcagagaggcctgtagagaaggaagggggagggaggctgggcgtggtggctcatgcctgtaatcccagcactttgggaggccaaggcgggcggatcacgaggtcaggagattgagaccatcctggctaacatggtgaaacccggtctctactaaaaatacaaaaaatcagctgggcgtggtggcgggcgcctgtagtcccagctcctcgggaggctgaggcaggagaatggcgtgaacccaggaggcagagcttgcaatgagccgagattgtgccactacactccagcctgggctacagagcgagactccgtctcaaagaaaaaaaaacagagaaggtaggggagggaaagtggccccaccctcactcactgtccatgccctggaaaggcaggagcccagtgcccttctgcatctcgacatccttctcgaaggcaaaggtgaaccgctctagccccgcaatgacctcttgcatcttccgtctcctgctggggctgcggaagctgctggaacccaggcaggtgggcccaatatagctcatcagaggcccttaaggggccagcgcccaatgcctcccccttcaccccagggtgccagtggccaggtgactgcaggggacgctccagcctgggctgtacaggagcagggcccagctgcctcacccggcccacccagtgcaggggcagacaccccagggcccctcacccccacactgtgtacacaaggctcactcggatagggagggattcgcagagccccacaaactgcttatctttgcatgttaccgaacacaaacgtggcgtgcacacagacattaccaaacctgggctcatactttgtccatgaagacacagccacaggttagcaaagagttgcacaaaccaaccgcagcaaggctgttattctgccagagctgggggtggtgggggtttgcagagggagggagccgtcccacctccccgcttcttcccatgagggaaggggtctccctctggggcccctgacaccccttttctggcctgagtgacaagccccgagtgagctcttcgtgggagacagggaaaaaggaatgaagaggagaggaactgaaacagttggatgaatggcgctttgtttacctcgcacacaatcgccagcttggcgggagggcggaaccgaccaaggccagggcggcctcccagccaggattccacagggccacccagtgccaccccacccctgagaaagtgctttataaatgaaatctctatgcaaatgttgttttattattattacaccacccctgcctgcagggctggggacatctgacaatgctttcaaaggagcatgttagggctctaattagaccaggttccccctccccctgctctggccccaaactggccttgcctctaactagagctgctgttctcagtcacattggcttttaatgcccatagaaccagaacccatacgccctcctttctgggtgcccaaacccagcagggagaggtgggcagccccgcaggctctcagctgggccaacatgaactagcctgctggctgttgttccccgtggctgttgctcctagatctgttcttttgaactccagatcagaaaagaaaatagctggagagatagacacctggagccgaggtgggactgggaggagcagggacgagatccaagagtttccagaagctcaggcctctgactgcatcctgggagaggcagagggacccagctccagggctagagggtggggccaagggggtccctggggtagaaaccctggcttctcttggccttagttgtatgcgttgattagtagtcccaagaatgcattcatctgtcaacacaggctcattaaaggctcacagaagcctggcagcgcaggcaggactgatgagggaatcaaagcccagggaggccaagaccacatggtttgggaggcgctatggatggggttcacatctaggtctcttgatgacttccttccctaaacatccctgagcatctctgcactagggccacgtccctatcctcagagatggccccatcaaggaggggacattagccattcacacaataatgcgatggaggcatgaggggcccagcagggcaggaaggggtagcaggcagagctctctcaatggagagtcatgatgatggggagagaatgttctggaagaaggccagcagtatgaaggttggggcatggagcaatgtgaaggctgaggaggcgctcaagggtttggtttggcagaagcgggggtaaagaggtggaatgggggcaatgaggcttaagagctgagaagggacccaactctggggggcctgctggggccagctttggggggaagtgatcgtgaaggcagcagagccaccacagggctctgagaactgtacatggctctctgagggatggtcgggggaagactggacaggggctgcttagaggatgaattttttttttttttttttttttgagactgagtcttgctctattgaccaggctggagtgcagtggcgcgatctcggctcactgcaacctctgc

SEQ ID NO: 1243887 - DNA, 4001 bp, Homo sapiens
gcaaacaccccaccatctagtaggaacaaaggaaataaaaagacttttttaaggaaaacatgatcattctaaacagagatttgcacacaattctatgaaaggccagaaaaagaacattgatctatttccgcgtaaacctgaaaaaaaaaaaaagaaaagaaaacacccgcagttcagttctttgaatccatttaaaagactgaatttggtctaactggtttgtgcatttagaccaggcttcggtacacgcgagccttttggaaactattcccattcagtgccaactactcgacctctctggatgtttttcttctaccttcctcacctgtctgtctcctcgaacgcccagaaaataatctgagttcatccctagccctcaggtaacggatgggggaggggatgtgggttcagtaagaccaacccttgatcattttaagaatcaatttataaatatttggggaggggcaggattagagaaaaatctcagtaacttgtaacgtctcaactaaggaagcagcagctgctgcatttaaaaatcttggtggtttaactcaaaccacttggtaagccggtatacgtacagttggtttaataactgatggaaaaatgaaattccgccaatccgcacccctcccccaaatccaccgaagtctcttgaatgtaatcgctctgaatgccctgagccgggtcaagctggtgtctatgtttgtggctggagcggaccctgcggagtcccgagccccgggtgaggcgatgcccagactggcgcgaagcggggtgtcccggcagcagcgcagaggcccacccgcctctccggccggctgcagcgggcgcgcctataccctgcaaaaccaaaacgctctggaaagcgcttggggctgcaagtgacgcctgacacgagcggcgggccggactgccggcctcccggcccttccctggctcacacaacccgcgggccgcccccaccgcccacgaacttcagcgggcagacgctggacgtgcggtctggctactttcctaaactccagcgcccgatccgcgtcgcagggtcggccgcgcagcgcggggatcgcgggtgcccaggctcggagaacgagcgtcgcgctcccagccgcggtcggggaacaggaactgccgccagaggcaccgtctcctcccccgagactgcgatattgatcaagggctcgcaggcgcgggcggcattcatctctccggactcgcagctcgccgcggaggggaaggggcaggacgcgctcccaagactagggcgggggcgtgcggagtcggggagctgtttgggggcgctggggcgaggtgggaaccccgcttcagagtctccagtcccggggccgaggtctgcaggaagggcgtgggaggtggaacctcccctcccctaggcgtctgcccgagagcctagagcgattcttggcgcggagccggctacccgggtgggcggaccccctcctccgccaacatcccggcggcttcgccacgatttcttttctcacctgagtctccccctgcctacccaaccctggctccaaaggtccagagagttaggctgccccggagcccagccttccccgacctaagcacggctctcccagcgcccccgcccccatcacacccacagcccagccccgtcccgcgtccgccaggggccgggggcgccagcgctcgagggatggccggcgggctgttaccttgacgagacggagctgcgggtgccctcccatcctcgggctcgctcggctaccgtcctgaatgcccgggtcctacggacatcccagagggaccggcgggcggctgcgggctcgggcggcacggggtgggcggccgggctcctcggtcgctgcctggtgaggagatgcccggctcggcgcttcccggccccgcggcccggcccggcccggcccggctctcgctcgccccttcccggggaagtctggccgccgtttcccgacgcagcccggcccgcggccgcctcttgccggcctcgcccccgccacctcccccacggtccgcgccgctcctcgcctcggctccccgccccctcgcccagctcgtcccctccccttcctccccctccctctcccctccgctccccttcggtccctcctccgcgcctcgcccctcggctccctcccagctcctcctcgcctcctccgttccctccccttcccccggcccgctctctgtgtcccgccgccaggatcccctttccctgcgcccggggtttgcggcagtcctcggggcgcgctggcagcagtggcggccgccgcagcccggggagaagccgggaatgggggaagggggccgcggtaaaggatcagcctcccgcccggccgaggtcggggcctgggaagtcccagggatctggggtgacttgggccagggtgctcaggtgaatttatgagggcgaggctattgggggctagggaacagggcggtccctactgagcggagccgccgcggaacccagtgaggctgcgacctgcgtttgggcagttcccgccctgcggctggctaggaggagctcctcgccgcccccattccagccgcgccgggcgctgggcccgacccccagcacctttggcactgatgtgcctggtgcgcgctgagacgcgaacgctctgcaagatgagcccttattcattcgttccttctttccttcatttgttcatcttacaaactgagtgcctggccactttggttcaggcaagaggctggatctgggaaccctttggacctgggagccccaggatgaaagggagacggcggtgccctgcaggacaagcgggcactgaacgctgcccaggggaaagccgggcgcgcattgcgttgcagcgcggcgaacgctgctaggagcccgcgggcagggcgtggggaggacacagcgccccctcccggccggccgagccctctgggcagcggtgggcctccccgccagaccccggggccgtcttctgaattggcttcggagctccccatcccaggaagcaactcccagcccttccagatgaacagaacttttgacttcctcttcactcttcctctctcctaccagagctgaaaagggagaaactgggaggtagagaaatcttcactccacccgcagagcctaggccgcctggccaatgcagcccctattgggtacaccagagcacctggggcggcgggcagtcggctttgaaatcaaactgaacccacctgccctgcaccctgtgccctgccgtgcccaccctactcctccctcctgccctcttctcagcacactgggcaagagccagcgtgttcatgggtccactggccttcatttggagctggagttattttagaagatcgtaagatccaacacacacagtttactggtgagaaaatggaggcacacagagggtaagcctagtcctccttcacctcattcccagctcacagtgcctggagggctgggccctaaaggggcctgggacactgaagtggggaggggcattgcccaggaagccagctgctcacatggcttatccacacacctggcactttccaggtgaagcacacagtcccgagtcttgcaaaacccccattaggttagtgctccggagctggctgtgccgagttgggccctgacttgccccagccaaccccagaagggatggacatgctaagcagatggacaactaactgttaccaacaacagttaagtgcggggcagtctgatgtgcaggttctggagtcagatggcctgagtttgaatcttggcttttccacttacaagctgtataaacttggagagttatttaacaatgcctcaattttctcatctataaaatcggggtagaaacgctacttctgagggtggttggggagtttgaaggagttggtatttgtaaagagcttggaacggagcctggcacatagtgagagcttaatgagggttagctgtagtcaccaatactatgatcatcatcatcatcacgatggagtggactggatgctcaagtgtg

SEQ ID NO: 1243888 - DNA, 4001 bp, Homo sapiens
cggtggctcttgcctgtaatcccagcactttgggaggccgaggctggtggatcacctgaggtcaggagttcgagaccagcctggccaacctggtgaaacttcgtctctacgaaaaatacaacattagctggttatggtggcgggtgcctgtaatcccagctacttgggagactgagacaggagaatcgccgtgagccgagattgcgccactgtgctccagcgtgggtgacagagcaagactccgtcttagaaaagagtaaaataaaaattggtgtgtgttaacaaagagactgcctatccaattctctatttctggccggagcgagtaaatctaaattagaactattctacaagggcaagtctacaaaggacggctcaagagcttcctgattcatatgagactagtctgaacccattctcagctggccaagaagaaactgcttcgacttggcaacagcgtgaaggcacgaggactcctgatgctgttacacaggtacacatacaatgagaaccccagaattactttgtacctcacaaatctccagtactaagggcatctatctattcccttaaaacagtcccaaatcaactccaacggcatcggtaagacagtcaatctcagggatccctccctggcaaggaaaacccagcgcaggtaatttatgttcttggcgtagagtctgttcccaatatccaggaagactcagcccgcagccccatcttactgagcaaggtgacgccctgaagtacacaccgacaatgtttaagtccaaggaaaatgaagttccagtcacttacagggaagggtctgtttccattgcctcacttctggtttattttgtggaataaaatgtctttcctccactaaacactttgaaaaccagaactctctaacggcggacagtcttctggacgcttagatctcttgcacatagccaggcatcgccttaaactgggttgggctggtcactgaaggctttctgctaccactatttcttctagcacttagttcaccaccttcgtcctccacgggggaagagaacggtacaaagattttggaaaaatgcccaagaaaggaaaaaattgaccggtttcctgagggtgtctccatccctcccggccagtatgtggtgacttcctaccaaaggccaccaggggagcacggccaaacccggctctccaacacggcaggaaacgtttccagcctaaaagccacttgtaggattatcggattcattctgggcgccgctgccaagtgatgcccccgcagtgccaacatctccctcagctctttgtccccacgttgccttgccctgccctacccttgcgcctggcccgggagccagccccaccctggggccgaagcagttccccttccccgcggctgccctccccaggcacaccccggggcctcggtccgcggctcctcctcccccacactcctgctccccgggtgagagcgagcccgagcagccggcgggcccctgccacggtcacccagccctctgcccacgacccccgagggtccgctctcgaggaccagccagccaggctgggagttccgcggccctcaccccgcccagggcccgccgtcccgtcagtccctcaccgggcggaggctgggcgggcgacggtggcaccggcgggcgcgggccgctgctgttgatgatgtagtgggagacgcgcgagttctctgagacgctgagcacatagtccccggggctggtgctcgagtcccgcaccaggaacaccccgtgccgctggccctgcagcagcgccaccgcctcctgccgactcaacctcccccagtaccagctactccgctcctccgagtcgaagttgcccgccatggctgcctccgcgcctaaacgctggggtgccgccgccgcgcgcgcccctccggcccccggcgcccgccgcccagcggaccggctccggtttcagcttcacagcagcgcccgaaatggcggcggcagccgcgggcctccccctccggaaatgacgcgctccctgcccgagggaggctgccgggaaggggcccgcggcccgccattgggagaagggcaaggcgccctcgcgcgcgcactgcgcatgcggattcatgggcggtgccgcccttcccgggcccgggctgcgggggatgggaggcggggtctagggcccgaggggcggggcctcgcagcctcccgcagagacgcgcgcctgcgctgcggacagagcggtgcttctcgtctgggccccggttcctggacgacctgggacttctaggcagcgactcccagacagaattggaggagaaaagatgcgtgtggccctggggcctgagttctcggccaggcttcctgcgatatcagtctgtttcttttttctttttctttttgagacggagtcttgttctgtcgcccacgctggagtgcaatggcgcgatctcggctcactgctcccgggttcaagcgattctcctgcgtcagcctcccgagtagctgagactacaggcgtgagccaccgcgcccggctgttttttgtatttttagtagagacgggggtttcaccatgtcggccaggatggtctcaatctcctgacctcaggtgatccgcccgcctcggcctcccaaagtgctgggattacaggcgagaaacatcgcgcccggccacgtcggtccgtttctgctcgttcctctagcttctccacagaccagctgacgttctcattttcattgattcacctaggacattgttgttgacactccacttgcactgcgggtgcaaaggttatcatggctgggccctgcactcctcgaactcacagaccagtgagaggaaccaggaaactggatgacaaaaggatgacaaatgctgacaaacgctatcatgggaaacggacatgaacacagagcagagcccccacagccagtctatggagtaatccaggagggcttcccagaggaggcagcatgtgttgactgctgaatgacaaatggggaaggacattctttcttttttttttttttttttttttgagatggagtctcgctctgtcgcccaggctggagtgcctgggcgtgatctcggctcactgcaagctccgcctcccgggttcacgccattctcctgcctcagcctcccgagttgctgggactgcaggcacccgccaccacgcccggctaactttttgtatttttagtagagatggggtttcaccgtgttagccaggctggtctcgatctcctgaccttgagatccgcccacctcggcctcccaaagtgctgggattacaggcgtgagccaccgcactcggcggggaaggacattcaaagcaaagggagcagagtgtaccaagccacgtgaagtacagagttctcttctcttttgaggctttggggtcacctgcccagataattctaaacactaaattgtagccaggggcatctcctactctcactgccctcatgattgcctctggactgtgttcctacgagtgtcgtgctcgctggtgctctttcgtctggctgcccctaatcgcactgcaaacaactcccactgagttttctaaaatacagatctggccgggcgccgtggctcatgcctgtaatcccaacactttgggaggctgtggctggcagatcacctgaggtcagaagttcgagaccgggctgaccaatatggtgaagcccggtctctactaaaaatacaaaaattagccaggtgtgttagcgggcgcctgtaatcccagctactcaggaggatgaggcaggagaatcgcttgaacccaggaggcggaggttgcagtgagccgaaatcatgccactgcactccagcctgggtgacagagggagatcctgtctcaaaaatatatatatatgtatacaaatctgaatgtgttgctaccttgtgtaaaacttttaacagtcttcaggtgttcaaactcccagtttagctcagagcataaaattgggccacagtctctctctctcttttttttttttttagatggattcctg

SEQ ID NO: 1243889 - DNA, 4001 bp, Homo sapiens
aactctgattcttaattgctaatacaaaaacaataatcatggtcatatagaatacatcttaactgactgaaatgttagatggtattttaatatctttcttttcatacaatgtcttacatctagagtccctatttcaaaatagcagaaggaataatgcagatattttcaaagagaaatagagatgagtgcattgaaaggccttgaaaagtattcaccaaatcagcataatcatatctagattctgcttccggtttcgccactaaaatgcaaatgatgtctggcctacactggctttacaaatatttttaaatatataaaacccggccgggcgcggtggctcacgtctgtatcccagcactttgggaggctgaggcaggtggatcacgaggtcaggagttcaagatcatcctggccaacctggtgaaacctcctctctactaaaaatacaaaaattagccgggtgtggtggcgcagacttgtaatcccagctactcaggaggctgaggcaggagaatcgcttgaacccgggaggcggaggttgttgcagtgagccgagatagtgccactgcactccaccctgagcgacacagccagactccgtctcaaaaaaaacagattatatatatacatacttatatatgtttgtatatgttttatatatatatataaaacccaaaacatgttgagtcgttaatgatgagaatatccaaagacactgttagcacagcacttttctaccattttcaggttatatgcagcaaggaagtgctaagacgaccaactagattaatatcaagtatgacccagagaaattcagatggaatcccactcactcaaaaagcacttattaagcagttgcgttaatagtactctgaagattatccgtcctatcgccaattggcagcgggttatatctttttctatatatattcgagggtatagagaaaccatatggctttcctgtatctttgataactcttgccctgtgaaacagataactgcaccacttgaaattatatttagcttttcctttcagcactcctctcttaaaatctatttttccatttctctatacctttgtattccctctctcaaggaaaaggaaatcattttccttctgctcttccaacatagcttcaccttcaccttaaattttaaaccttctagaacaggattactctaaatgattttttaaaaagcattcaagatcgtatgacatattattcaggcattaaccgcatttattgtcaaatgctactgcttctcaatccctacctctccctcactctcgccccttagtcctccccttccaatatccattttgtctccactttcagctctcccaggtcactgtcccacctcttcctcaggctctctaaaatcaatgcctccccgcctacccaccgcaggttttttaccagtctcctcctcccccgactcatcactacccgcatgaccccctcggattctgctctggtccctcactctcccaaacttcggaggccaccgctactcccatcgctgccccacagtttagtgaacgctcctcacaccctccctccacccccaaaacttccccttacgacctccccaactcccaccttccccgttcccagactccattaggtctcctttcaaatgaatgcctcttccctactccagagttttcggacagtcccacccctcaaagccctcccagccttcgcccggcatccgcgccacccccgggcccacagcgcccctgtgggtgtggccctccgacctgcctccgcgcctcacgcagcccctcaagccggtgacccagctcccgccggtagctctgcgctgcctccacgttctcgcgggcctcctgcaacagcagctcaggctccagctccatcgcccccctcatctggccgcgcggccggcgaaacctagcgcgggttcccgactgcaccgggcgcctccaagcggcccggcgcggcctcgcgcaggcggaagcaccgcccagccccgccgccccatgccccacgacgaccttgattgacgggcgcacggcggcgcctcgcgcgggtggcgtccgggtcccagcgccgcccgccccgcggctcaccccgcctcttccgtgctgcggcacagcgccgctggttgggcctccttgggaaacgtgctgaggcctggcaaggttgataacccgcaccttgccaagtgcttctcacagctcatcgcattcttgcctgaccttcagccctacctgtatctccattgctcagatgaggaaattgagggataaaggggggaatcggccgggcgcggtggctcacgcctgcagtcccagcactttgggaggccgaggcgggcggatcccttgagctctggagttcgagacccagcctgggcaacacggcgaaaccctctctcaccaaaaatactactactattactattactactactactactgctactactagcaacacgtagtggagcacgcctgtggtcccagtggatcgcttgagcccgggggccgaggctgcagtgagctgtaatggagccactgcactccagcctgggcgacagagcgagaccctgtctctaaataaaaaatacttttttttaaattaaaaattttaaaaaatagcgaatcgacttttccaagccgcagaatttgagcccagatctgatgacaaaagccctggtccttaagagcagagcaggccttaggggaatttactaagacccaggtgtcagcggggagcagtggctcacgcctgtaatcccagcactttgggaggccgagacgggtggatcactgaggtcagaagttcaagagcagccatggccaacctggtgaaacctcatctctactaaaaatacaaaaattagccgggtgtggtggtgggcgcctgtaatcccagctactcgagggctgaggcaggataattgcttgaaccgggaggcagaggttgcagtgagccaagattgtgccactgcactccaacctgggcaacaaagcgagactcggtctcaaaaaacaacaacaaaacccaggtgtcaccacccagaagctcgtggacgaatgggggatccaagagagaggcccaagagatgaccagcaggacagcaattctggcacaagtccaagaagggtgttggcaagtgttatctgtaaggaccgtagtgaataagctgggcttgggcttgccagaccggaaggtatctgtcacaataggtgtgactgtatgtaataaaaccttatgggcagggcatggtggctcacaccagtaatcttgggaagctaaggcaggaggattgcttgagcccaggagtttgagaccagcctttgcaacatgaggagacctcctctctacaaaaagatttaaaaaaaaaattagccgcgggtggtggcgccctcctgtggtcccagcaattcaggaggctgaggtgggaggattccttgagcctaggagttagagaccaacctgggtaacatagcaagaccctatgtctataaaaataaaaataaataaataaataagtaaaattacaaggaaaacttccataaaaccaggacatgaatcttggtctcattcaactttgttttcttagtctgatggaaggcaagaagtgtgtatctaacatatctacactatacccaaaaacaaaacaaataagaaaattgaaggaaatattctaaaactgcttacccctagacttgacatttttagatgcattgtttttaaatttagagcatgaattcctaaagagtaaatgttctcgaggaaactggtttagaagtagatgtcagctagccatcagacagagttttacagagatatctccatggcatcacattggtccagaactgacttttcaagtgtacccagaggattccagggaacagactcttgctaataagactcacaagaaacaaactaagcagcttgccaatttatttatttacaacaggaatataattgttgaaaaaaatcacaatagctggaaaatcaagttataaccag

SEQ ID NO: 1243890 - DNA, 4001 bp, Homo sapiens
tagctgggactacaggcatgcaccactatgtccagctagtttttgtatttttagtagagatgggggtttcaccatgttggccaggctggtcccaaactcctgacctcaagtgatccaccgcgcccagcctgagcctcagtttttccattggtaaagcttcgacatgcagttattgtaaggatcagaaataataggccgggcacggtggttcacgcctgtaatcccagcactttgggaggccaaagcgggcggatcacctgaggtcgggagtttgagaccagcctggccaacgtggtgaaaccccgtctctactaaaaatacaaaaattagccgggtatgatggcacacgcctgtagtcccagctactcgggaggctgaggcaggagaatcgcttgaacccgggaggcagaggttgcagtgagctgagatcgtgccactgcactccagcttgggcaacagagtgagactccatctcaaaaaaaaaaaaaagaaaaaaaacaaggatcagaaacaataatgcaggtaaagcactgagaccctgtcctctcacttgctttcaggtgacagcattacctctgtctgcaatataaactctttggcaaccacctaggccagacccctcatgtgactggccaaacagccagccatgccaggatcccaagccccagactccctcgtaacccttcacggtctcatccttatctggcctctttctgcttttctttttctttttttttttttgagatagagtttcactcttgttgcccaggctggagtgcaatggcgcaatctcggctcaccgcaacctccgcctcccaggttcaagcgattctcctgtctcagcctccctagtagctgggattacaggcatgtgccaccacgcccggctaattttgtatttttagtagagacggggtttctccctgttggtcaggctggtcttgaactcccgacctcaggtgatctgcccgccttggcctcccaaagtgctgcgattacaggcatgagccacggcgcctggccattcctttctgcttttctatctcctagatcctacccagccttgaccttgccttctcagaggctttcctgccttctccagcccacagccacttgcttgctttcttgatttatagcactcatcacagtaccaatctgtgttctggttggatgtcctggtgagcacctcaatggcaaggcctcggtcttctaggggattggtatagcatcgtgctgagcacatgtggagatgagggatcagggggacattgaaaaagacttattgaaggaaagtgaagaagaaaagagttataatacttacactcaaaaatggctatctacatgtccggccctgttttaaatgctttacatgcattcatgcatttaatcttcacatacagactatgaattaagaattatcattatccccattttacagatgaggatactgaggctcaaagaggttaggtagacagtgaagatggtaggacgagttttaaaaaaggaaggacagagcaagaaagaggaaggaaaagtgggggaggaagggaagaaggaagacaggcaggtgtgtattaggtttcttaggacagatattcatggccctcctcctggctggtattgggcccaggaatgatgcatgtcaactctgtaatatatttttccattctgaatctctgaataagcaacatttcccaggtcctgctcccataccttctccctgctcgtttcttgggggcccatgcccatcccccagccttagttgctagggcagtggttattgctatataagtgactcctcttggggtgacaagagaaggctgtcttccgccagagttccccactcttctccagccaccctagaaggctctacacactaggcaggagaactgggccctctcctgggcatgtctctgcagggcaaggagaggaagggcaagggcaccctgagggccttactcacccagctcctgctgctcagcctgggtctccatctggtaccacttgctctgtggccctcctctttatagccctgcggcctctggcctctggccctgtcagcactctgctctccctctgcctttgttcctcatgatccccagagctttggtggctcagcttgctggggcctttgtttaaaccagggatacagaaatccagagaggcccctctgttgtgggcatggctggctgctgcaggccttggctttcttaatctctcagagcagctagggggtgaggacagaagtctctgccatgagtacttgtctcttgtccttctccaggttcctcacaccaccttgggatcttcctaagaccttaagaccctgggagaccccatgtcatatcaaacacatcaaaatgcacctcacttccatacagatgtgcatttcttgttgtttaaaaatgtgaaagaattattgtaattctgaactcaatatgagaaaaaatggttcattgtattcttgggaatctttattatgctgtatttatatataactatgtaagggttgacttcaattatagttgactagcagacatgtgtctctctgtagctattttattaaatattccttttaattttgcaattttctttaaaaattttggagctataacttttgggttttttaaaaaagaattaaaccatttattgaataattcctatatattagacatgtgctaaatgctttacttaaaaagtttgaattaaatacttttccacaacaaaagaaagaaatactttttcacagccaccacaacagtgctattttcacctccattttccagattaagaaactaagagaacaatcaggtgacttgcctaaggtcacagtatttataatggcagagccaagactcgaatccagttctaaccaacaccaaagtcactgccctgcactggccctccctcaggagtaatgcataaatggcccaaaaaattccaggagaggaaagagacccccctggctagaactgcagttctgaatataaacactgagcatataatggatgtaacttatctgtttcaaaaggggaaggagcctagaaatgaagcaatttttcctcctcaaatgatcttggctgcctgtccctttgtcttccatgttaattcctttcaccattctgctcccaaacaggccaggtcccacatcagttccaggaggaaagggctctttcagcctgcgggtcatcgttgggcagcagtaggaaggggaagaaggcaaccttctgaatacctcctttggactcaccatctagatgtaaagggttcacctgctccatctcagattcccgggggccttcctgtgaagttgtctaggcaagcggtgatagggacctagatgtccttgcttctcccctctagctcacccaggccaggggcgagaattcctgccacccacaccttcaaaaccaattttttttttctttttgagacagagtgtcgctctgttgcttaggctggagtgcagtggtgcgatcttgcctcactgcaacctctgccccccaggttcaggtgattctcctgcctcagtctcctgagtagctgggattacagacacctgccaccatgcccggctaatttttttgtatttttagtagagatagggtttcaccatgttggccaggctggtcttgaactcctgacctcaagtgatctgcctgcctcggcctcccaaagtgctgagattacaggcgtgagccactgtgcccggccaattttgacgttttactgaattgttttaggtctttggaaatctcacaggcccaagttactatgcgtatagtaccttaaagtgtaaaatgacttctcccagaaacttcaggacacttgatgaaggtaaggtaggggaatcgtgggcctccgcaggggccctgaaggggaagatgtgttctgcaagcatcacagatattgtgagaagcaagaggctgcaatggatgtggaaggctttgagccaggcagatgtgggttcaaatcccagtttcctggctgggagatttgaa

SEQ ID NO: 1243891 - DNA, 4001 bp, Homo sapiens
agtgaggggtgcaaggacccagatggggaacactgctgtttaaatattaaacagggatttcttgtctcccacgtgggagacctgatactctcaagggtcccaggtggggaccctcaggaccaggggctcacagcggctcatcccagtgcccattgcagagccagggctggggagcagtcatagtaataaatacttggtatttacctatctacctcccagtccaggggatgggaggacaggagctttttctcactgctacaggcaggagaatgaaactcagaaatgcagggaaggacacagaggcctggggctccgttctgctcttccctgtctttaaatatgaggcttaaatagacataaatattaaatagagataaatacatgggatggggagggcttggctcagggctgggcaaggtggcgtagaacgcggtacgacacctccaggaagctctgcagatgggaggcaaccaggacccctcctgcccggcgctggaaagcagaggcgaaggccggcatggcaccctgggtgggctgcagggcaggggccattcccagttcttccatctgtgggggaaagctgtgatcagtggttgggcccttctgagtgggcgttattacaaatgaggaaatgctgggggtgacagcatggacagggcccatacacaggcctggctgtggtgcccagaatgccagcacgaccttggccaccctgcccaacaaggctcacctgctgccagatggtggtggcaaagtcggcgacgtccagctgcagtgtgtccaaggtgggacccaactcgggggagatcccttccagggcctgcaggagcccctggtagaggaaaaggccgctatggagttggctcaagcagcctgcctgtgagacagagcggaagagttagggggtgctgcctgagatacgtcaggcccccagcttggaacctggagacatgggggagcccatgggtgttcctcctctccttccccctcctcattagccttatcctttcctgacactcaccagctgcagggcctggctggggcagctgctcaggggagcccaggggatgcccagagagtgtccgagcagcaccagctcctcggggtggcacagcttgtaggtggcacactggggatggaaggatgctgagtgagactcgccatggccgggtcgccgctccttcccgggtcctccccgactctctggtctttcccctccctccatgtcctgccaggctgttcagttcctctctgccctgcacccccactctctgatctcacaggggcccttgccctttctcctgaatgtaatgcctccactcccatcccagccagccctcccgagcactgtccccaccaaggtcctcctccccaagtcccttcccagccttccccagctccactgctcctaatattctcccacgtcccttccagaggatgttggccctgcagttccatcccccttagctctccccaccgggcttccctccacagccctctcacccacctcactcaccagcttctcctggagcgctgcgccatcgccctggatcttcctcacttgctctaagcacttgagcaggaagctctggggcagggagctggcagggcccaggggggtggcttcctgcactgtccagagtgcactgtgccacagcagcagctgcagggctggggacagagcgggctcaggagacatgctgttccctaccacctgaggccctctcggggacactgggtgcctttaatccccattcccagaacggggatccccagcccctctgtcacaccagcctccctcccatgccagggcaggcggctctcccatcctgggccaagacactcacccatcagcttcatggggctctgggtggcaggtccagccatgggtctgggtggggctgggctgcaggctccgggctgttttggggcccagctctaggggggcctttatacataaccccatggaggcctgggaggaaattacctggggccacgactaaggcttagtaataacttcccaggatttatgcaaatttggtgtccaagacaatgcaggggggttggaacaaaaagctgtttgcgaaagttttgtgaaattgtggaatctctgatcctcctttgacgtcgccttgcccccctcaaactcccttcctcccgctgccccacccaggcctgaatggccccagagtgtttgaacagaacagctgaacaaaggctgagccgctgatagacgcctggaagcggcagcagcctgtggggaagtggcagctgagtcggggtctccctctctgctctggcagacttgcgggggcagtgtcctttgcccctctcctttgggattctcaagcctgtcccccaagcccccaaattctaagagagaaaaaaagaagctggttgctcccattcctacccccaaactctccggaggctgcctgtctgggagacctcctgagcccctacctgagataaggacattgggtcttggctgctgtgcccaccccacacttggataggcaccatcgaaagttccaggctgtcctgtcccaagttgattagctgggaactcccccagaaacccccccgccccccatgactcattcggctaaagcccctagaatcccggtagagccagaggaaaccggatgtctgtcccgaatgaggcaagacccttcgaggcgattggctcacctgaccttcacctcctcgtgcacgaccctgacagtagggtccccaagggctttggaactgcgggattgggacacgtgacttccctggtcattcaccttgaagtggacacgggctggggtgagagaggggaaactgccccatcttctcatcttagaaccatgcagcgttaatgctggaagggaccttggagtcgattccaaccccgtgaactgggccagggaaggaagtgccttgcccaaggtcatggtaagtgacagaattacagcctgggcctctggctcagacctgaacgttttctttttcttttccagatggagtcttgctctgtcgcccaggctggagtgcagtggcgcgatctcggctcactgcaaactctgcctctcgggttcacgccattctcctgcctcagcctcccgagtagctggaactacaggtgcccgccaccatgcccggccaattttttgtatttttagtagagacggggtttcaccgtgttagccaggatggtcacgatctcctgacctcgtgatccacccgcctcggcctcccaaagtgctgggattacaggcgtgagccaccgtgcccggcctaggcctgaacgttttctacaggccacaaggcctgcctggggcagtctgactgaccacacccaagactgtcaccttctgtcctaatttaccccagcgtgccaagaaacagacatctctggatgagaagtggatgtggtgactggatggggccatctctggtgcttgggggccccctggtggtcaccaatggcagggacgtctgatctcacacactgatctcacacactgttatctggtccgcggtcctgcagctccgccttagctctgtggctcagcaccttgcactgatgtggcccagctctgtacccagctccctgggagtagagggtgggtttttgttgttgtttttttgagatggagtttcgctcattgctcaggctggagtgcaatggcacgatctcggctcactacaacctccgcctccctggttctagtgattttcctgcctcagcctcccaagtaggtgggattacaggcatgcaccaccatgctcatctaattttgtatttttagtagaggtgggatttcaccatgttggtggtcaggctggtctcgaactcctgacctcaggtgatccacccgcctcggcctcccaaagtgctgggattataggcatgagccactgcacctggccttgagggtgggtttttaacaggaccatggaaggcaggagctccacattcttaaacatgttgcctggcaactattgcattgcacacc

SEQ ID NO: 1243892 - DNA, 4001 bp, Homo sapiens
tcatctctgagatgaccaatgggctgtgaccagcaagctgggaccactgagctggtggaatggccttagtgagtaatagacagcagtgatgtgtcagcttttttctggcccaggaacagccaaacctcttatatttcagtggcctagttcccaatagaccttgaaggccctccaggtcttctttccacctaccccttgctccataccaccaccttccaccccataatattatagaatgacacctagtcagatgaaatgatacaacttaattttattaggacaaggctggtgggcactggagtggcaccttcagggccaggagaggcactggggaggggtcacaggatgctactcgggcacctagaagccacagctgccctccacagagcggcactgcaccatgcgcaggaatgtctcgaccttgtccatgtccttcctgaagcagtagagcagcccgtagttcttgagcagtgcgtcatggttgtgcgagtttgtgtcaaacttgctgtaggtctgcttgaggatctgcccagtccggcggctgccgtcttccagcctctgcaaagtgaaggaagagaaggagaggccaagcgcttgggcactgttccctccctctctcatttatccattttcctccctccccttcagggtgtagagaaaggcctggaggattcaccaggcgaaatgaagaataaggtgagttctcttgggtcagcgccttactgctaaaaagagggcagcagtatttctctcccccagccctcgaagccagtggggttccaggattggtgacccctggcgccaccctcacccccatcagcgtttggatgccttcctctaggtcctttaggaggtgatagtcatcgctgtccgaggtgtcatacaccaggttgttggcgaacatactcctgaggaaccgcacgggctccagccacgactcgatgagcagcagggagatgcggagcagctctagattctgcaggggaaggaccggcagtggctgtgctgcccgggagccctgaccacaggtctcccccatccccgcctaggggagacggcatccactcacggatttctgttgcgtttcctccatgttggagggtgtcggaatagagtctgagaagcagaaggaggtctgggagtcatgcaggaatgaatacttctggtcctttgggatataggtttcttcctaggagaaggaccccccaccaagaaggactgctggtttctatgctggagaccagctcccattgttgcttttctgggaacctggctcagcctatgctcatctgcctgcattttcgcttcagaaaacaaccctgagctccttagtctcctcccattacttccccagtgggggaaagtcaccccttcttgccacccctgacccgcacccattccccaagaacttacaaactcctggtaggtgtcaatggccagctggtgcgcgcgatgggcttggagcatagcgtggtcaaaaagcctggataagggaacggtttggacggcaccagcctcttgaagccagggcaggcagagcagggcaaaagccaggagcagggacgtccgggagcctggggagaaaccggagggcaatggagggagccggagaggaagaggccagcgctctccctgctccaggagctgtttgttttttttctctctctccatccctccagagaccaggaacattcagagattggccaaatatctggccttagatggcgatactcacattcataagccccaaacctgagggttagtgcccccgtcccatctacagggcgctgcctctcccctcaggacacgttgtgcccaaagggattttaggggcgcttacctggagccattgccactaggtgagctgtccacaggaccctgagtggttcggggagttgggccttgggatcctagagccggtctcttgtgggccctttttataccctggccagttctctctccctgcttgaccccacctgtttctgtgtacatttatgcatggggccactgacgggcttgtgctagtggataatttagaagctcctcccacacatgctgggatcatgccccctggcttgtcgtctttcccttctcaccatcaccagtgttgtaaggattgtgcacagagtgtcagccacagactccacccaacttgtcctctctttaagggtcaggtgggtgccctctggctgcaggccatgttggtcaacctgaacgcggggaaggctgtcaggatagccagtccttgagacccctaccgaccccattccactctctatcctattcctttcctcctccccgcgtgtttaacttccacccaccagacagaatgtgtgtgttgggaaaaggggccaagcacagccaatagattgtgggggttctgagcaccattgagtcctgaattccacttttgctgatgactcctgggcccacctgagtcagctggatgcagtgctaacactgaccactagagagaaccaaccccacacattgctctcccctttccctgaaccttggggcggaggcggtggggctcccccaggtccctggggatgaataacccagactcaaggtattgccccagctccttggacctgaagcagagatacaaaccaagaaacagaaatcccgggaacagacacggaccacaagcgcttcctcccatagtcctgaaaccaacagagaatctcaaagttggaagagctcttgaagatttgagtctcttccccagctttaaaactcagaacacatcacgccgaaagaggccctatccagccatggaagcccgtcctcttttgtctcttcctcctttccagacctgtgtagagcttatccagttgtcaaaggcctgcctgtgcattctcacgtctgacctgcaacttgtcttgtgtaggaggtatgagtatcatcccatttcacagatcaggagactgaggctcagagagactgattgcatgagctacctcagccagggcagcagatctccacaacctggctcttcccacattgcgtcatttaaagtcctttctccaggccgggcatggtggctcatgcctgtaatcccagcactttggaagactgaggtgggtggatcacttgaggtcaggagttcaaggccagactagccaacatggcaaaactccatctcttaaaaatacaaaagtagctgtgtgtggtggcagaagcctgcaatcccagttactccggagggtgaggaggtagaatcgcttgaacccaggactcagaggttgccgtgagccaagattgggccatggcactccagcctgggcgccagagtgagactccatttcaacaaccacaacaacgacaacaacaacaacaacaacaacaaaagtcctttctccagagcaggtggtgtggtgctactcagttatttagttattttagtttcctttctttctttccttctttctttctttctttctttctttctttctttctttctttctttctttctttctttctctctctctctctctctctctctctctctttctttctttctttctttctttctctctttgtctttctttctttcttgtttttgatggagtctcattctgtctctgaggctggagtgcagtggcatgatgttgcctcacagcaacctccacctcctgggttccagtgattctcccgcctcagcctccctagtagctgggattacaggcgcccgccactatgccgggctaagttttgtactttttaaatagagacggggtttcactatgttggccaggctggtctcgagctcttgactttaggtgatccaccctccctggcctcccaaagtactgagattactggcatgagccaccgctcccaacccagttatttcagcttctatatccctctgagtgcagggatcctgcccccaacacaaggggccctttgcctgattttgtctttccataaggggcagattgttctttctcaattctcaggtgagaatggcccagtggcatggggtgccttgtgga

SEQ ID NO: 1243893 - DNA, 4001 bp, Homo sapiens
ctggtgatggtgggggaggaagaaatgccttcaagtcatctctgggatgaccaatgagctgtgaccagcaagctgggaccactgagctggtggaatggccttagtgagtaatagcggtgatgtgtcagcctttttctggcccaggaacagccaagcctcttatatttcagcggcctagttcccaatagaccttgaaggccctccaggtcttctttccacctaccccttgctccataccaccaccttccaccccataatattatagaatgacacctagtcagatgaaatgatacaacttaattttattaggacaaggctgatgggcactggagtggcaccttccagggccaggagaggcactggggaggggtcggtcacaggatgccacgcgggcacctagaagccacagctaccctctacagagcggcactgcaccatgcgcaggaatgtctcgaccttgtccatgtccttcctgaagcagtagagcagcccgtagttcttgagcagtgcgtcatggttgtgtgagtttgtgtcaaacttgctgtaggtctgcttgaggatctgcccagtccggcggctgccgtcttccagcctctgcaaagtgaaggaagagaaggagaggccaagcgcttgggcactgttccctccctctctcattcatccattttcctccctccccttcagggtgtagagaagggcctggaggattcaccaggcgaaatgaagaataaggtgagttctcttgggtcagcgcctgactgctacaaagagggcagcagtgtttctctcccccagccctctaagccagtggggttccaggattggcgacccctggcgccaccctcacccccatcagcgtttggatgccttcctctaggtcctttaggaggtgatagtcatcgctgtccgaggtgtcatacaccaggttgttggcgaacatactcctgaggaaccgcacgggctccagccacgactcgatgagcagcagggagatgcggagcagctctagattctgcaggggaaggaccggcagtggctgtgctgcccgggagccctgaccacaggtctcccccatccccgcctaggggagacggcatccactcacggatttctgttgcgtttcctccatgttggagggtgtcggaatagagtctgagaagcagaaggaggtctgggagtcatgcaggaatgaatacttctggtcctttgggatataggtttcttcctaggagaaggaccccccaccaagaaggactgctggtttctatgctggagaccagctcccattgttgcttttctgggaacctggctcagcctatgctcatctgcctgcattttcgcttcagaaaacaaccctgagctccttagtctcctcccattacttccccagtgggggaaagtcaccccttcttgccacccctgacccgcacccattccccaagaacttacaaactcctggtaggtgtcaatggccagctggtgcgcgcgatgggcttggagcatagcgtggtcaaaaagcctggataacggaacggtttggacggcaccagcctcttgaagccagggcaggcagagcagggcaaaagccaggagcagggacgtccgggagcctggggagaaaccggagggcaatggagggagccggagaggaagaggccagcgctctccctgctccaggagctgtttgtttttttctctctctccatccctccagagaccaggaacattcagagattggccaaatatctggccttagatggcgatactcacattcataagccccaaacctgagggttagtgcccccgtcccatctacagggcgctgcctctcccctcaggacacgttgtgcccaaagggattttaggggcgcttacctgcagccattgccgctaggtgagctgtccacaggaccctgagtggttcggggagttgggccttgggatcctagagccggtctcttgtgggccctttttataccctggccagttctctctccctgcttgaccccacctgtttctgtgtacatttatgcatggggccactgacgggcttgtgctaatggataatttggaagctcctcccacacatgctgggatcatgccccctggcttgtcgtctttcccttctcaccatcaccagtgttgtaaggattgtgcacagagtgtcagccacagactccacccaacttgtcctctctttaagggtcaggtgggtgccctctggccgcaggccatgttggtcaacctgaatgcggggaaggctgtcaggatagccagtccttgagacccctaccgaccccattccactctctatcctattcctttcctcctccccgcgtgtttaacttccacccaccagacagaatgtgtgtgttgggaaaaggggccaagcacagccaatagattgtgggggttctgagcaccattgagtcctgaattccacttttgctgatgactcctgggcccacctgagtcagctggatgcagtgctaacactgaccactagagagaaccaaccccacacattgctctcccctttccctgaaccttggggcggaggcggtggggctcccccaggtcactggggacgaagaacccagactcaaggtattgcctcagctccttggacctgcagcagagacacaaaccaagaaacagaaatcccgggaacagacacggaccacaagcgcttcctcccacagccctgaaaccatcagagaatctcaaggttggaagagctcttgaagatttgagtctcaggggaacatcacactctggggactgttgtggggtggggggaggggggagggatagctttaggagatatacctaatgctaaatgacaagttaatgggtgcagcacaccagcatggcacaggtatacacatgtaactaacctgcacattgtgcacatgtaccctaaaacttaaagtaaaagaataataataattaaaaaaaaagaaaaaaaagatttgagtctcttcccagctttggaactcagaacacatcacgccgaaagatgccctatccagccatggaagcccgtcctcttttgtctcttcctcctttccagacctgtgtagagcttatccagttgtcaaaggcctgcctgtgcattctcacgtctgatctgccacttgtcttgtgtaggaggtatgagtatcatcccatttcacagatcaggagactgaggctcagagagactgattacatgagctacctcagccagggcagcagatctccacaaccttgctcttcccacattgcatcatttaaagtcctttctccaggccgggcacggtggctcatgcctgtaatcccagcactttggaagactgaggtgggtggatcacttgaggtcagttcaaggccagactagccaacatggcaaaactccatctcttaaaagtacaaaagtagctgtgtgtggtggcagaagcctgcaatcccagttactccggagggtgaggaggtagaatcgcttgaacccaggacgcagaggttgccgtgagccaagattgggccatggcactccagcctgggcgccagagtgagactccatttcaacaaccacaacaacgacgacaacaacaacaacaacaacaaaagtcctttctccagagcaggtggtgtggtgctactcagttatttagttattttagtttcttttctttccttctttctttttctttctttctttctttcttttctttcttgctttcctttttctttctctttctttctttctttttctttctttctttctttccttccttcctttcttccttccttccttctttccttccttccttctttctttctttttctttctttctttctttctttctttctttctttctttctttctttctttctttctttccttccttcctttcttccttccttccttctttccttccttccttctttctttctttcttgtttttgatggagtctcattctgtctcccaggctggagtgcagtggcatgatcttgcctc

SEQ ID NO: 1243894 - DNA, 4001 bp, Homo sapiens
taatagcccatcttgttttcatttcttcccgctcctggggggctaggtttggtgttgctggtgatggtgggggaggaagaaatgccttcaagtcatctctgggatgaccaatgagctatgaccagcaagctgggaccactgagctggtggaatggccttagtgagtaatagacagcagtgatatgtcagcctttttctggcccaggaacagccaaacctcttatatttcagtggcctagttcccaatagaccctgaaggccctccaggtcgtcttcccacctaccccttgctccataccaccaccttccaccccataatattatagaaggacacctagtcagatgaaacaatacaacttaattttattaagacaaggctggtgggcactggagtggcaccttcagggccaggagaggcactggggaggggtcacaggatgccacgcgggcccctagaagccacagctgccctccacagagcggcactgcaccatgcgcaggaatgtctcgaccttgtccatgtccttcctgaagcagtggagcagcccgtagttcttgagcagtgcgtcatggttgtgcgagtttgtgtcaaacttgctgtaggtctgcttgagggtctgcccagtcaggtggctgccgtcttccagcctctgcaaagtgaagcaagagaaggagagaccaagcgcttgggcactgttccctccctctctcatttatccattttcctccttccccttcagggtgtagagaaaggcctggaggattcacgaggggaaatgaagaataaggtgagttctcttgggtcagcgcctgactgctgaaaagagggcagcagtgtttctctcccccagccctcgaagccagtgggcttccaggattggggacccctggtgccaccctcacccccatcagcatttggatgccttcctctaggtcctttaggaggtgatagtcatcgctgtccgaggtgtcatacaccaggttgttggtgaaggtactcctgaggaaccgcacgggctccagccgcgactcgatgagcagcagggagatgtggagcagctctaagttctgcaggggaaggaccggcagtggctgtgctgcccgggggctctgaccacaggtctcccccatccccgcctaggggagacagcatccactcacggatttctgctgcgtttcctccatgttggaggatgtcggaatagagtctgagaagcagaaggaggtctgggagtcatgcaggaatgaatacttctgttcctttgtgatataggcttcttcctaggggaaggaccccccaccaagaaggaccactgctttctatgctggagaccagctcccactgttactcttctgggaacctggctcagcctatgctcatctgcctgcattttcgcttcagaaaacaaccctgagctccttagtctcctcccattacttccccagtgggggaaagtcaccccttcttgccacccctgacccgcacccattccccaagagcttataaactcctggtaggtgtcaatggccagctggtgtgcgcgatgggcttggagcatagcctctttaaaaagcctggataagggaacggtttggacggcaccagcctcttgaagccagggcaggcagagcagggcaaaagccaggagcagggacgtccgggagcctggggagaaaccggagggcaagaagggagccgcagagcaagaggccagcactctccctgttccaggagctgttttctttttctctctctccatccctccagggaccaggaacattcagagattggccaaatatctggccttagatggcgatattcacattcagaagccccaaacctgaggttagtgcccccgtcccatctgcagggcgccgcctctcccctcaggacacgttgtgcccaaagggattttaggggcgcttacctgcagccattgccgctaggtgagctgtccacaggaccctgagtggtgcggggagtcgggccttgggatgctggagctggtctcttgtgggccctttttataccctggccccttctctctcgctgttgcccccacctgtttctgtgcacatttatgcatggggccactgacgggcttgtgctaatggataatttggaagctcctcccacacatgctggcatcatgtcccctggcttgtcatctttcccttcccaccgtcaccagcgttgtgagggttgtgcacagagtgtcaaccacagacaccacccaacttgtcctctctttaaggttcaggtgggtgccctctggcagcaggccatggtggccaacctgaatgcggagaaggatgtcaggatagccagtccttgagacccctatcgaccacatcccactctctatcctattcctttcctcctccccgcatgtttaacctccacccaccagacagaatgtgtgtgttgggaaaaggggccaagcacagccaatagattgtgggggttgtgagcatgattcagtcctgaattccacttctgctgacgactcctgggcccacctgagtcagctggatgcagtgctaacactgaccactagagggaaccaaccccacactttgatctcccctttccctgagccttggggcggggcggagggagggggttgggtggggggctcccccaggtcactggggacgaagaactcagactctcaaggtattgccccagctccctggacctgcagcagagacacaaaccaagaaaccgaaatcccgggaacagacacggaccacaagcgcttcctcccatagccctgaaaccatcagagaatctcaaagttggaagagctcttgaagatttgaatctcttccccagctttggaactcaaaacacatcacgccgaaagatgccctatccatccatggaagcccgtcctcttttttctcctcctcctttccacacctgtatagagcctatccagttgcgaagggcctgcctgtgcattctcacgtctgacctgccacttgtcttgtgtaggaggtatgattatcatcccatttcacatatcaggagactgaggctcagagagactgattgcatgagctacctcagccagggcagcagatctccacagccttgctcttcccactttgtgtcatttaaagtcctttctccaggccgggcacggtggctcatgcctgtaatcccagcactttgggaggctgaggtgggtggatcacttgaggtcaggagttcaaggccagactagccaacatggcaaaacaccaactctctagaaatacaaaagtagctgtgtgtggtggcgcaagcctgtaatcccagttactccggagggtgaggtggtagaatcacttgaatccaggaggcagaggttgctgtgagccaagatcgcgccactgcactccagcctgggcgacagagtgtgactccatttcaacaaccacaacaacaagaaaaaagtcctttctccagaacaggtagtgtggtgttactcagttatttagttattttagtttctttctttctttctttctttctttctttctttctttctttctttctttctttctttctttctttctttctttctctttctttctttttctttttctttccttcctcctttccttttctttctttctttctttctctttctttctttctttctttccttcctctttgtctctctctctctctttctttcttttttttcagttggagtctcattctgtcacccaggctggagtgcagtggcatgatgttgcctcacagcaacctccacctcctgggttcaagtgattctcctgcctcaccctgtttagtagctgggattacagtcgcccgccaccacgccaggctaaattttgtacttttttagtagagacggggtttcactatgttggccaggctggtctcgaactcttgactttaggggatccaccctccctggcctctctaagtacttagattactggcgtgagtcaccgcccccaacccagttatttcagcttctaaatcc

SEQ ID NO: 1243895 - DNA, 4001 bp, Homo sapiens
ctaacgctgtcagcccaccgggtcctgagtcctctctctggtgacaagtgggaagggtgtgagaactggagactgtccacatgtggcttcatctaaaaggtatgaccagaggcattactgacatcccaggggattcctgaccctagctgacaggtgccccagttaaaacacaccccaaagctagggctgctggaacagaaaacagctcccctcaaaggtctgcagcagcccctctgcaggcacaccgcctcaggctacatatcctcaaattcaggggatcttggaataactcgtgcattgcacaatcccactaacaagtgcggaaaattaagttactttaaaattacaaacttgggccaggcgcggtggcttcccagcacttcgggaggccgaactgggcggatcacttgaggtccggagttcgagaccagccttgaccaacatgaagaaaccccgtctctactaaaaatacgaaattagccaggcgtggtggcgcacgcctgtgatcccagcttttcgggaggctgaggcaggagaatcgcttgaacctgggaggcagaggttgcggtgagccgagatcacgccattgcactccaacctgggcaacaagagcgaaactccgtctcaggaaaaaaaaaaaaattacaaacttgaagatttaagccaacctttcatcacacttgtgttcacgtgcatatttttccattgtaaatatgacacaacccaaaaccttctaatcccattgtttttgaaatctaccttgagactgttacagtctaaaggacacctcatgagtacaactacctcatctgcctctcatcttgccagcatcttaatcctgtgtgactttctctacattcacctaaacttaacccttgctcatttgcactcagtcaccgctccaaggccaaggggaaccgttcagagagaacccccagcgggagggcaagccccactcctagccgggccactcccccgctccacacggcatttgggtctttctgacattttcccccacgaatgcaagacaccggggcagcctctgagggggcagccagacagccccggaccgggctgcggaagaaagagcgtggcctttgtttactgcggtgaccttaggcgtagaggaagccgacgcccgcttcgcggccccagccctaccccctcccctcccacggcccgctgcccccacccccgccctgcccctcccccaggcccgcctccccacgccccacccagcccttcccgagtccgctccccacgaccctgcccctacccaggtcggctccccagagaccatgccccaccccgggtcagctcccctatcccctccttccccaaccctcccctctccagaccctgctcccccgacctggtcctgcccctcccccacgtccgctccccactgccctccccacccctggccgcgctagcctagtggccgttgggttctggccacgatccggcggtgccgggacttgcgcggagaccccgcgggggccaccacttccttccgcgatcgcgcttggtcttggcagccgcagggcccgggtcttcgggcggcgggcgggggcggcggggcctcaccgagatagatgtctccgaaggagccgctgccgatcttccggcccagccggtacctgttcccgactctcagctccatggcggcggcggcccgattcgctcctgccctcccggccgcttcctgggtctgaactctgggaggcggcgccgctgctgccgctactgcgggtccggctcccggctccgcccccctcacggccccgctttcaccatcgctttcctgtcgccccgccgctcccagcgcctcaatacggggcggatgggacagtccgagcgccgccgccgctgctccggcccctaccggtcccgcttgccctctccccgccgcggatggactcggatcttccgggcctaaatcccctttcagctgcctaaaggagccgccgccatcgcgctgtgacgtcacttcccctagcaacccggcggggcggggccgcggcgctccaggggcggggccgggcggggcgagcgctccaggcctcctcccgaccctgcgccgtgcccagcccctctgccctcctgttaccccgggacctcgggccgccagccccttccacgtgcaggctcctgctgctctcgcgggggcttttcgtgtgtcccccgagatgtcgaggaagccaggtgagttcctcgcgacaggcggtgccctttgcaggaggggacaggtagctgaggcgtggacagagtgacaggccaggctcaggggacacaggtgagaccccctcactgggctgccagttcccgggcttggggcatcccagtacgtcagcgtctgcggccttacctcctgacacctaaggccagagacagagcaggcccgcgccctgggaggtcctgatgtccagcctgaagattgaggacaaagccaccacctttcacaaaatgaggccagaccacctgcctccctccagtccctgcggcctggagacggagtcaacattcttatctgtgttggatctgaatgttcctccttgcaaaggaaacaaggagtggacgttcaggctgatggccagcttcaaagatcggggcctttgattcccatcactgggaagaaagcccttcagacaagcccccccaggctgcaggtgcatggggaccttgaagaacccgtccccatggtcccacgtccatgtgtctcgagacctgtcgcatcctcgctgaaactcaagaatgtgaaacaggtgaaggtgtgttttgacgcattagcataccagggctgtggtgtgggcaccgccgtgtgagtgagacagcagcctcagcccgtccaggtcactgcagaagaggaaagcagcccccacaggccccacagtggtgctcgcctttctccaccccccagtctttcctctccacccctcagctccaaacagctggaggtcaggtcggggagacgggcgtccattcccgaaattacatagcagggcctggagacaggagatgccgccggccagaccaccatcagtcactaatgagggatgggcagtcggaactgcccagtttctgagttacagaagccgggggtggggggctgccagactagtaaaactgaccttgttggcggaatcgctcacggcttttctgttgatgaacagagtccagctctcccacgggtggctgtgatccttcttcctggggagtcctgctgtccctgactaggggcacctgcccacctgtcagctgctcctccctcggctggtcctcctgggctctgatggccccaacatttctagctcttctcacccatagtgccccaagcttcatgcagctgcggcaggtactgtgcccgtctgcctggcttttgtgtgtttgtgtcttgactctataacccgtgcacacggactgggctgtggtgtagtggggatggcaggagccctgggaacatgcgggctgggcaaggtgaggcaggctgattgctgtggctcccccaccaccagccccagccacaacaaactgacaaaggaagaggacagtggtaccctggagccctggggtcagagagaggaggacaaagcaggtgtgtagcccagggaatgacagcaccccttccgagaagacagggagggtgcagacatggccaggttctgagctagaaaactgtcagcagggggctgaagctgaggatagtcattgccaaggaacagcctccgtcacagaggagacgcacagatgcggtgacgagggagggatgcggggctggtgaccgctgggaacggatgtgtgaggcagagtctccaggcatggtctgtggggcggtttgatgatactagaacatctcagagtagaaggacgtcccgacctgcagactggaaagcccccagagctcccggcaggacgtatgagggccagcccacacccaggtctgtcctgatacaactgaacgccacagtgtcttagctcctttactgttgctatcaagaaac

SEQ ID NO: 1243896 - DNA, 4001 bp, Homo sapiens
cttgggaggctgaggtgggaggatcgcttgagcccagggaggttgaggctgcagtgagccatgatggtgccactgcactctagcctgggtgacagagtaagaccttgtttcaaaaaaaaaaaaaaaaaaaaaaaggagggaggaagaggaagatccagattaatacaggctgaagtttaagaacacaatatgctttcccacaattatctcaaccactgcatgggtttaacagccatggccagatgatgattgttcctgtatgtctactttagctgagatctcattcctgagctttagtcctatccatctgccagactctccatggccaatccacaggcagcacacatgcccaacactgaactttccacaaaaccctgtccttttctagaactcttctagtgttatgttcactaacttagcaaatagtacccttaaccaaacagttgttctatcctgaaacctagatgtcctccttagctccttcctttccctacataggtcccagtcctggctgggtgcagtggctcacgcctgtaatcccagcagtttcggaggccaaggcgggcagatcacgacgtcaggagatcgagaccatcctggctaacatggtgaaacaccgtctgtacttaaaaaaaagaaaaaaaatacaaaaatgagctgggcatggcggcgcgtgcctgtatgcctgtaattccagctactcgggaggctgaggcagaagaatcgcttgaacctgggaggcagaggttgcagtgagccgagatcgcgtcactgcactccagcctggtgacaaagctagactccgtctcaaaacacacacacacacacacgcacacaaaccaatcctttagattgtattttcttaacatcttatttatttatttatttatttatttatttatttatttatttatttgagatggagtctggctctgtcgtccaggctagagtgcagtggcgcgatctcggctcactgcaacctccacttccgtggttccctgctcagcttcctgagcagctgggattaccggcgtgtgccaccacacccaattaccctcatgttaaagtcgctgcttagcaagaggtacaaaactgtcagctctgacccctccaccaccacccaactgaacttttgagtttttcagacacctgctctatcctcctgcctttgaatatgtgtttgcttccgtcctgaaaccccttccggcgcttttttttttttttttttttttttgacagagtctcgctctgttgcccaggctggagtgctgtggcacaatctcagctcactgcagcctccgtctacccggttcaagcgattctcctgcctcaaccttctgagtagctggaattacaggtgcgcgccaccacgcccggctaatttttgtatttttagtagagatgaggtttcaccatgttggtcaggctggtctcgaactcctgacctcaagtaatccgcccgcctccgcctcccacagtgctggattacaagcgtgagccaccacacccagcccctttcggcgctttttgccttctacacgcacttcgggtctcagacgcttttacttattatggttgcccttttcccctacagctccgtcaagggtcttctccaggaacccacagccccatagttcccccattaacctgctcctggtttcccaccaggattaaaccctagagagtgaacggagaccagtttaaggctcacagcgggcgccgcgtgaatgagggaataaacattcgcagaaccagtaagaggtaggagcggaccgactcacaaccccctcacccatgggccggacgcggccagcgagcccagagagacaaggcagaggaaataggaagagaaagagtatctgtgacaaacaagaaaaaaggaacaagagacgtaatagcagcactcacggaggaagggacctgggcccggccagccgccatgatgcgccggagctccgcccccgggaggggcaggtgctcgcttgggggtggggatgggggtgggggggcgctcggtgacgtcaccggtgagcgggtttcctcgccacctccagctccttctcgctgctcaccccctcgcttcctagagactccgcgaggcgcctcggtgcaccatcccaactcccgacacccctgtctcttttctctgatttttttttttttaagacgaagcctggttctgtcgcccaggctggagtgcagtggcgcgatctcggctcactgcaacccccgcctcccaggttcaagggattttccggcctcagcctcctgagtagctaggattacaggcacctgccaccaccacgcccggctaatttttttttttttttttttttttgtatttttagtagagacggggtttcaccatgtggccaggctggtctcaaactcctgacctcaggtgatccacccgcctcagcctcccaaagtgctgggattacaggcgtgaaacacagcccctggccctctctgatttttttgagacgaggtctcgctctatcgcccaggctggagtgcagcggcgccatctcggttcactgcagcctcgacctcccgggctcaagcgatcctcccacctcagcccaccaagtagctgggatcgcaggcttgcaccgccacacccggctaatttttgtatttttctgtagcgacatggtttcgccatgttgcccagactggtctcgaactcctgggctcaagcgatctgcccgcctcgggctcccaaagtgctcggattacaggcgggagccaccgcgcccagcctccgtctccctcctaagtgacatcctgtccggcatcccgcaggccttcagatggatggggtagcagagctcaggaactcaaacacagcccgcctggtggatgacttctaagcatctttcagtctccctgatcttgccaagcagagaagggcttcctcgtaatgccaccaaagcacaactttcacatgcttgctttatggccttaactaactgatgtcattacttaactgtccccgcggggacggggaactgaatgtattttcacaaacgtcagttcaagacagatttgtgggagaaaccacctggggataaacctctccccaccaagaacctagaattcggccgggtggctggggaaaagtgggcggggcgtagtcgccccggcgctggcaggtccagtctctgcccgcggcgcacgcggatgacgtaacaaacgcgcgcgacgattcgaggtgctctgtggccgcgagtgcatcttccacgtgagtatagttaccgcgtgcggacctggatcctcctccaggtgcagcgtttcgtcatctagcccaagcttggtctggcggcttcagtatccccaccgggccgagctgtgtctacttggtgcccgcgtatttgctttagtggaggcgtccattcgtcctatcttgcgtgcgttccgcagaccccaggcatggccgacccccatgtaaatttagccccattgtcccattcatggattcagctaacagaaagactgccggccgcctactttatatcaggcaccatgctggtcatggaatacagccctcatgcacgcaaaccctgtctctgagctcttgaagcttatattttactgggaatgatagacggaaatcaagtggcttaataaacaaaatgccttcaggaagactgtcctgaaagttggggaggggctgaagagtggtgagaatcaagagttcattaagtcattccacaagttttagaatttttttgcgtttcaagccctggtattgttctaagccttggtaattcaatggaaacgaagcagcaacatcccatgcccacgtagagattttttttctagtggggaatatagagcgaaaaataaaaacatccaatagtgataagcgctttacaggaaattaaaatagggccggccatctgatagtaactacttgagtggctagtgaagccttttccacgaaggcgaatcaccagaaatctaaataacaagagctagccatgcatatgtcagggtga

SEQ ID NO: 1243897 - DNA, 4001 bp, Homo sapiens
aaggcgggcagatcacttgaggtcaggagtttgagaccatcctggccaacatggtgaaaacccgtttctactaaaattacaaaaattagccaggtgtggtggcaggtgcctgtaatcccagctattcgagaggctgaagcaggagaatcgcttgaacccaggaagtggaggttgcagtgagcggagatggcaccactgcactccagcctgggcgacaaagcgagactgtctcagaaaagaaaagaaaaccccaggagatagccccacacatatcccagcatctctgaccctaaatttttcttggctcctagctcttgtctcgggggaatagcgctgctgcctacagccacaaccatcctgtactgttcgcgccctaaatcaggaagtggaagcagactggtaaaggacagaatgaacccaaggccagacccattctcccaaatcagttaaatcaaccaccactaccactgagggctttctggaaattctctggaccccaggtcaccccaacctgggtttattctttcaaattgtattgaggtatgctaaggggtacagaccacagtacagacccagaacctgtgtctccgcttactaaattctccccagactccttccgaggattctccctggtggtggtgagaccacaagagcacattcatttaaagtgctgttagctgaaggacctctgaccttggagaaaagctaagggagaggggacccagagatgcttgggtccatccggacagtttccctcagaatgctaggctctcctggagaagcaaacgtcctcattttcaagccctacaactgcccagcgctgtcctctgacagggacacccaaacttcaatggtgggcacagcacccaccttgaactccctcccacaattaaagaggcccatcgtaaaagcatctgctttagtcttcaataaatccagatacctacactcacactatgaaataaattttcacagcctttttggaggaattctcttaatgggaaccgcaggcgtttctccttcacacccagggctttcccaagttcccgtccttgtttgtaacgtatgccctcccacccacctccacccttgacacacaagtctgtctcttccttgttataggaccaaacacacaccgaggttccaaatagggtctttcccaagcccacatccacagatccggctgtcatcaaacaggtgttccccgcctcttggtttctttagcaacaactccagctttcttaaagagcgccccacccaccaccttagcccccaagagttgccaaatcctgtcccatctagccccatcaaaacccccaagggcaaggttctattacaagggtctcccacctcgccccgcttagggtgcccaattctctggcgagaaaagccccagccaggattcccttcctaggcccaaacagaggcccgacactccgaaaacccctgagcaccacggacagatgtccccaacaccgccagacgtccccaacaccgccagcgcccaccctggctcaccgtgcggatctgcctccgcagaaggtaaatgaagaagctccagagcttggcggcgaaggccacgaacgtgcgcagccccagcagacactgcgtccgcatcatcccgatgaccccggcaccgccggccccggggcccccgcggcccagctccgccagccccccgggggcagccccccgccgccgggagggggaacgggggccccgagtggcaggagaggctgcagagaggggcacggagcgggcggctcagaaagccacccctggcgagggtaaagcccagcggaacggggagctgggggacaggcgtgggcagcccgcgggggcccacatgggctgggagtggcaccgacggcttcggggaggttgcgggccgagacaggtagggctaggatggggtcctccgagacctggagggaaggggaaggataattgggggagggggcagtgggggagggggctagggaaaagggaggaagggaaaagggaaggggagggggggaaagcagagagtggcccgctgcgcaggcgcgctagggggctgctcgcaggaacggggagggcgggggcagcggcgcgcaaagggccgcggcagcggagaacgggcctgcagagcgaaggagcagggaaggagggggagggggagccggagggcgcagagcgctgggccggagcggcctccccctccccgagctcgggggtcctttagccgctggggaccggggctgcagcctctgcagctgggtttcccactctgacaggcgccattttaccgtccaaaggactccctcttcctgtctttccccctcctcttcccctttgacactacttccggtggtgacgtgtattcgcttcaccgggactaagttcctcctgcgcggtctatggcgggtaggtataaggaaagccaaaagcactccaagcgaggctgcagtattgcgcacgcgcagaaggtggccgcggggcggggcctgaggcgaagcaggccccgcctcaaactgcgtgggcggggagagtgacgtcacttggcccgcgcttagggccctcgcggggggcttgtgggtcctcctccccctcccactgacaactgccccaactgctcttcccgccccggtcacagtgaaaatgtagacggggtcgttgtccgtacgactgtgcgccagggctcggggaggggcgccctccgcgtgagcgcccccctgggaatattgaacataatcacctctcattccagactatgttaggtcttaatggtgggaggacgcccgagtgctcggcccgtttcaccccgaggaggaaggacactgggtcatgacgccatcagagggcgccagagcagggaccggacgcgagttggagatgttggactcgctgttggccttgggcggcctggtgctgcttcggggtgagagccagaggcacggtggcggggcggggggtgcggttcgggcctggctgaggggacggaagtgggcaggaagggccaggggtcacaggctaggtgtggaaatcgcgacgggttcgcgaaggcggtaatcccagcgctctcataccctttatccgtccctcgctctgcagattccgtggagtgggaggggcgcagtctcttgaaggcgcttgtcaagaaatctgcactgtggtgagtatcccacagtgtctccccggcctaccctggatagggcacctgtgcccactctttgacaatcccttctcatctctgccttagtggggagcaagtgcatatcctgggctgtgaagtgagcgaggaagagtttcgtgaaggttttgactctgatatcaacaatcggtaagtaccagttggaagagatttgattaaatttgagacctataatgctaaggaaatttctttacaacaagcgcagaacctggtatgtagtagcagttccttaaatattcattgaagaattggatatggatctttcaggaggcaagaattaataagaggagtgatgagtatttggggagtccaaagcaaagatcatagaagtcgagagagaaatagcctggaaatagggagaacatgtgggaagggtattgcagtaatccgttaatccggcttcactctttaaggtacatatgtaccgagcaccaactatcaaccaggtgctgtgcaagatactggagacggcagtgagtgagacctgttcctgacctaatgaattttagggaataatggtaggaagtgatagaggcctggtttaaggcagtggcagtagagatggaaagtttagaacacatgtaaaggactttagtgggtagaatttccaggatttattgactaatatgggggagaagaaagtattgagataaggaagttcctaaacccagcggcatgcctgatcaggagacattaagaaccattagtaggatgctttctacttcctagtcccggcaactcagtggatgataatagtagtttacatcttatctgttgagcctccaattttgcatcagccattgttgtg

SEQ ID NO: 1243898 - DNA, 4001 bp, Homo sapiens
cacacatatcccagcatctctgaccctaaatttttcttggctcctagctcttgtctcgggggaatagcgctgctgcctacagccacaaccatcctgtactgttcgcgccctaaatcaggaagtggaagcagactggtaaaggacagaatgaacccaaggccagacccattctcccaaatcagttaaatcaaccaccactaccactgagggctttctggaaattctctggaccccaggtcaccccaacctgggtttattctttcaaattgtattgaggtatgctaaggggtacagaccacagtacagacccagaacctgtgtctccgcttactaaattctccccagactccttccgaggattctccctggtggtggtgagaccacaagagcacattcatttaaagtgctgttagctgaaggacctctgaccttggagaaaagctaagggagaggggacccagagatgcttgggtccatccggacagtttccctcagaatgctaggctctcctggagaagcaaacgtcctcattttcaagccctacaactgcccagcgctgtcctctgacagggacacccaaacttcaatggtgggcacagcacccaccttgaactccctcccacaattaaagaggcccatcgtaaaagcatctgctttagtcttcaataaatccagatacctacactcacactatgaaataaattttcacagcctttttggaggaattctcttaatgggaaccgcaggcgtttctccttcacacccagggctttcccaagttcccgtccttgtttgtaacgtatgccctcccacccacctccacccttgacacacaagtctgtctcttccttgttataggaccaaacacacaccgaggttccaaatagggtctttcccaagcccacatccacagatccggctgtcatcaaacaggtgttccccgcctcttggtttctttagcaacaactccagctttcttaaagagcgccccacccaccaccttagcccccaagagttgccaaatcctgtcccatctagccccatcaaaacccccaagggcaaggttctattacaagggtctcccacctcgccccgcttagggtgcccaattctctggcgagaaaagccccagccaggattcccttcctaggcccaaacagaggcccgacactccgaaaacccctgagcaccacggacagatgtccccaacaccgccagacgtccccaacaccgccagcgcccaccctggctcaccgtgcggatctgcctccgcagaaggtaaatgaagaagctccagagcttggcggcgaaggccacgaacgtgcgcagccccagcagacactgcgtccgcatcatcccgatgaccccggcaccgccggccccggggcccccgcggcccagctccgccagccccccgggggcagccccccgccgccgggagggggaacgggggccccgagtggcaggagaggctgcagagaggggcacggagcgggcggctcagaaagccacccctggcgagggtaaagcccagcggaacggggagctgggggacaggcgtgggcagcccgcgggggcccacatgggctgggagtggcaccgacggcttcggggaggttgcgggccgagacaggtagggctaggatggggtcctccgagacctggagggaaggggaaggataattgggggagggggcagtgggggagggggctagggaaaagggaggaagggaaaagggaaggggagggggggaaagcagagagtggcccgctgcgcaggcgcgctagggggctgctcgcaggaacggggagggcgggggcagcggcgcgcaaagggccgcggcagcggagaacgggcctgcagagcgaaggagcagggaaggagggggagggggagccggagggcgcagagcgctgggccggagcggcctccccctccccgagctcgggggtcctttagccgctggggaccggggctgcagcctctgcagctgggtttcccactctgacaggcgccattttaccgtccaaaggactccctcttcctgtctttccccctcctcttcccctttgacactacttccggtggtgacgtgtattcgcttcaccgggactaagttcctcctgcgcggtctatggcgggtaggtataaggaaagccaaaagcactccaagcgaggctgcagtattgcgcacgcgcagaaggtggccgcggggcggggcctgaggcgaagcaggccccgcctcaaactgcgtgggcggggagagtgacgtcacttggcccgcgcttagggccctcgcggggggcttgtgggtcctcctccccctcccactgacaactgccccaactgctcttcccgccccggtcacagtgaaaatgtagacggggtcgttgtccgtacgactgtgcgccagggctcggggaggggcgccctccgcgtgagcgcccccctgggaatattgaacataatcacctctcattccagactatgttaggtcttaatggtgggaggacgcccgagtgctcggcccgtttcaccccgaggaggaaggacactgggtcatgacgccatcagagggcgccagagcagggaccggacgcgagttggagatgttggactcgctgttggccttgggcggcctggtgctgcttcggggtgagagccagaggcacggtggcggggcggggggtgcggttcgggcctggctgaggggacggaagtgggcaggaagggccaggggtcacaggctaggtgtggaaatcgcgacgggttcgcgaaggcggtaatcccagcgctctcataccctttatccgtccctcgctctgcagattccgtggagtgggaggggcgcagtctcttgaaggcgcttgtcaagaaatctgcactgtggtgagtatcccacagtgtctccccggcctaccctggatagggcacctgtgcccactctttgacaatcccttctcatctctgccttagtggggagcaagtgcatatcctgggctgtgaagtgagcgaggaagagtttcgtgaaggttttgactctgatatcaacaatcggtaagtaccagttggaagagatttgattaaatttgagacctataatgctaaggaaatttctttacaacaagcgcagaacctggtatgtagtagcagttccttaaatattcattgaagaattggatatggatctttcaggaggcaagaattaataagaggagtgatgagtatttggggagtccaaagcaaagatcatagaagtcgagagagaaatagcctggaaatagggagaacatgtgggaagggtattgcagtaatccgttaatccggcttcactctttaaggtacatatgtaccgagcaccaactatcaaccaggtgctgtgcaagatactggagacggcagtgagtgagacctgttcctgacctaatgaattttagggaataatggtaggaagtgatagaggcctggtttaaggcagtggcagtagagatggaaagtttagaacacatgtaaaggactttagtgggtagaatttccaggatttattgactaatatgggggagaagaaagtattgagataaggaagttcctaaacccagcggcatgcctgatcaggagacattaagaaccattagtaggatgctttctacttcctagtcccggcaactcagtggatgataatagtagtttacatcttatctgttgagcctccaattttgcatcagccattgttgtgatagaggcggtggtgtatgttcagatggcattccatggctgggcgcggtggctcacgcctgtaatcccagcactttgggaggctgaggcgggtggatcacctgaggtctggagttcgagaccagcctgaccaacatggagaaaccccatctctactaaaaatacaaaaaattacctgggcatggtggcacatgcctgtaattccagctactcaggaggctgaggcaggagaatcgcttgaacccaggaggcagaggttgcagtg

SEQ ID NO: 1243899 - DNA, 4001 bp, Homo sapiens
gtcaggagttcgagaccagcctggccaacatggtgaatccccgtctctactaaaaatacaaaaattagccaggcgtggtggcatgtgcctgtagtcccagctactcaggaggctgaggcaggagaatcgcttgaacccgggaggtggaggttgcagtgagccgagattgcaccattgcactccagcctgagtgataagagtgaaactccgtctcaaattaaaaaaaaaaaacaaaaaaaaaaccagattgataattacatacaactagtggcttgtgaaagctacaagatagaaatgaagtatctcctgacaatgggctctgtctggcgtgcccttcctatgtaagttctaactattgtccaggcctcattcagatgtcacatgtttcaagaaggctcctcacccattcagtcccttcccaggagcaacctggggctaggggtctagtgtggcagctcctgtctgccaggtatgagttggtcctgtcctctgttctacgacctggaactccctgggtctcctgcttttggagagggtacacaaatagtggcaagggctgtgtgcactggagacaggcttgacctatttattacttatgcgaccttgtggtgccaaacaaggaggtggtaactacctcacaggacttaaatgaggagatgtaaagcacgcattgtcaagtgggactaaaattggctgggggtaggctgggcgcggtggctcacgcctgtcatcccagcactttgggaggccgaggtgagcgcatcacctgaggtcaggagttcgagaccagcctggccaacatggtgaatccccatctctactaaaaatacaaaaattagctgggcatggtggctcaggcctgtagtcccagctactcggaaggctgaggtaggagaatcgcttgaaccccggaggcggaggttgcagtgagccgagatcgcgccactgcactccagcctgggtgacagaggctgcagactccatctcaaaaaaaaaaaaaaaattggcttggggtggtagtgaagaaatctagctattacaatggtttgtggccacagaaacaaatacacagcgtactagtggtattaaattttatgggaagggggtaggtaggaataacgaggttgagaaacaaggatataaagtggttacctctgttgcttagggcgcctagcgagctctcacaaaacacagtaatcctcaatgttactggaagaggcagagctcaggagtcctcccttcgcccagtgtgaaaacccggaggggaggatggggtctcgtgctgctcagtcccccggagccccgcactccgcacgtcaaccggcgctctcgcaaaggttctctcagcgtctccaaagcaatctgcaaattccccaaccgagacccaggcggcaactgagcagaaggtaaggggctgggaacggcacccaccccggcagcccgctgcccctgcctcggctgaccaccgctcgggcccttccacccgggggttgtcccgtgtcgcgaggccagcactggtggcggggaaaggagcccgccgcggctgagggcgctggacccccggcaggctgccccgctgacctgctgtgcctcaaggggtccgcctgggaaacaggggaggccgcgtccgctctcacctgagcgcccccaggctcgaggaaccgccctcacgggacgcatgagcctcgccaggtgccggtcaggaatgcaccgcgttcccctgcccggctagactttgggagaggcgggtccgctgtcacctgacctccgccacctgactcgtggggccggatctcggcgagatgagctctgggagttgtagtttccgcgcgtcttagacggacagagcgcagctgggtcgggccggggcgcagagatcggggctccggcgtgagggaagatgaggtccgctgccagggacacagagactcttggagccgccagcgcctcccggctcctttcgtgagcgaagctcagaccgccctccattgggcggaaatcagagcccgtggggcggggccccctttaggtcccgccttccgccgcctctccgcctatagccggggcccgccgagaggttgcgtggaagctcgccttccccggccagtgggaagacgagaagcctccatgttgggtgtggctgaaagattggcaggcgactccccgcccctgccccgcccccctgggcgaagagcgcggacttgtggggccgctggctgcagactggagctgcgcgggtcagggagataatggctgcgcggccgatcaccctcggcattgacctgggcaccacatctgtgaaggcagctctgctgagggccgcgcccgacgacccatccgggttcgcagtgctggcgagctgtgcccgtgctgcgcgggcagaggcggcggtcgagagcgcggtggccgggccccaggtgagttggacccccggggccgcgccgcctccaggagcctcctgaccacccttttccaccccaggaggcctccctgacagcccttcccgcaatgaagtctctattccagcttgtccccagcttctccaggggcccgtctgcctgcagcagctgtgctcatgatcccttaggtctggtcccagaatccttcccacctgctgggaccgattcccccccgccccctccccgactctctggcttcttctgggggccttgcgcttggcgctggatccctgtgctctctgtcccctgaccttggaggaactgatctcttgtgtgtatggaatgaccacaggcctccctttcactcttgctgctctccgctcctcacacctgccctgtgacctcaagttcaggattcagtttgttgcccagggcagagtctgggttttcctccggaaatcagatgtcaaatcaggcctaactggctcctggctcattccacagaagcagaatgcggaccaagaaacctttggtcagccgggcgcggtggctcacgcctgtaatcccagcgctttgggaggccgaggcgggcggatcacgaggtcaggagatcgagaccatcctggctaacacggtgaaaccccgtctgtactaaaaatacaaaaaattagcggggcgtggtggcgggcgcctgtagtcccagctactcgggaggctgaggcaggagaatggcgcgaacccgggaggcggagcttgcagtgagtcgagatcgctccgttgcactccagcctgggtgacagagcgagactccttcccttccttcccttccttccttccttccttccttccttccttccttccttccttccttccttcattctttcctttctttctctttcttaccaagtctcgctctgttgcccaggctggagtacagtggcgtgatctgggctcactgcaacctccgccaactggattcaagtgattctcctgcttcagcctcccgagtagctgggactacaggtgtgagccaccgcgcccggctactttttgtatttttagtagagacagggtttcgccatgttcgccagactggtcttgaactcctgacctcaagtgatctgcccacttcagcctcccaaagtgctaggattacagttgtgagtcactgcgcctggcccagctttgtttttcacaagctcttgccacatacatggacacggttgtttagggttcagagcccatttggctcagaagcatttctgaggatagggatttcaggagcactttgtatctacatagaagctttcaagattagtttggttgggacattagggcatattaaaaggattcttacttaaaggactatgaattggaggcaaagttggctctgaccctggtggggtgagcaggagagctggcattaggggagagtaggctcagaaagtgccagtttctcctgaaatagagcacttcttttttttttttttttttttttgagacagggtctcgctctgtcacccaggctggagtgcagtggtgcaatctctgctcactgaaacctctgcctcccgggttcaagtgattttcgtgcctcagttt

SEQ ID NO: 1243900 - DNA, 4001 bp, Homo sapiens
aaaagggccacctcatctgcccccatcctctagctagctgtagggagctgggatctgtccagacactccaggtctccatggccacaagcccaaagttgcatagggaggtcatgagaaaagaccttagaagcagtctgctctttgaaccctgggattattcactgaccagccaaaaaggtgacaactgttctgatggcccaggtcagaccagtaactctagggcagaggtctcaatggaggtcctggttccaagggggtatattaaccgtctggtgttgaatacaggtgtctccctacacacatgcattttggaaggagaggagttagagctttcaccagattctcaaaggggcccatgactccaacctctggccctagttggcctggcccaggagctggggatacagccctagtcatatcaacatccctgggccatcctcgctgtccagggtctctcttctattcaaggatgtgcccaggtcggtagcagtatcctgtttcccttgtcctggcccttccagctgcagaaagtggacagcgggtttcacacccagccctgctgcacacgctccagcttcctggagacccgagccaggtttctcccagcagcacctctccatcccagagatggcaccatattcaaactgaggtaccagtggcactgacccccaacaacagagaggacccagcttcacacttgatccagcaggggcccaaccacatggtgagatgacttcctccgtgagagaattcctggggtccctcacctccttcaggcacagctggctataaagaaaaggggtgaaaggcccagtacatctccctgagtcctttctcctgggccaggtggctcaggtgctgcgggatcacccagggaaggctcattcctctcgctacaagacgctgactgcggatcaggtggggagcacggtggatggtcttcttgtatcctctatcgcctccagggcatcttgtttctaaactcccagggagtcccctcatcttctactccactactccaccaaaaaaaggaaaatctaaaccctccctccccttaaaacacattccgtctcaggaatttaatttcagtgtacgtttcttagagctaaaactttttttaaggggaaaagaaatgggcagggcagtgctgggtgtaaggcgaccacgcgaccgagaaaaggaagagggaggaatgaataaacgctgacaccagccccccttggagctcagagcctggggcacaggagccggcggggcgggcgagcaggggcggggacagcgcattcccaactttccctggccgagctgacgggagatacagctcccaggggaccgggagggaccaaaaaaggctgagccgacctgtgacatcggcggggggcaggaagcgaagctcccctccccctgaaaggcgctcggctcccagcaggcgcccccgcctgccgtcgccgcccagcctgcgcccccaggcccgggcactgcggggaggggcgcccacacaaaagggggagcggcgggagaggggactcgggcgaagccggctccgggaggcctcgtctcccttccctgcggcgctggcccgcgccccccggtctaatcgcgcgccccgctcccggccccccagatgcccgcacgccccccgcgcccggggcccgggatgaggtgggggctcgggaaggaagggcgggcggggacctgccgcacgcggagctcccggggagccgcgccgacagccccgggaatcaaactcgcgacggcccggccctcccggcggcgcctgggcaacgggtcccgagaaggtggggccgctgggccggggccgcggccgggattgcgcgcggggcgccggcgaggaccgcgcccggggccgggcgggagccgcgggagcgcgggggtcttaccgggcagcgccacgcgcgtccgctccgcgcgggccgcaggggccgggccgcgggccgggcgggggaggggctgcaatccgcagcggtggcggcggggccaggctcggcggcggcggcgcggctggggcgcggggaggcggagaaagtgaggcgaggccggcttcctagcggcgggcggcgagaaatgcagctgtccctgcgcggctgccggcagggccacaagtggggccgcgcggggaggagcggggctgcgggcggggcggggcgggggcccggctgcggcgcccccgggccctttccctatggccgacccctttccagagaggagggaagcggacctgggggtccggaaacctacatggttgccgggggtggagaggggagcacccagtgaaggctggaaaaatgccctccgtgtacctccctccccggccgcagtgactccctagcttgcgggcaggagggcgtgagcggggtgcctcgacctcccgcgcagagcggggtgcggggcatcctgcccctcccagctgcggagagggtgggcggaggagacctgagacctccgagactccgcggggagctaagagcagggctgcccgacaggttccaggtcagtgccaggaacccagggtgaggacgcacagctggggcttgggacacaggtgtggaggaggggcacctccctggaattagggccccggaaaggaaaccaaatcaaatgctgaggacacaggagatggtgggaagggggagcaaatcaaagctatcactcgtccacaccgacagataccacctgccatctcccattttctcctcccccaacctccccagcatccctgatcacttcaagggctgctgagccctgggaagattttccacggaagaacttgtttaataaatgggaaactgacctttgctatacttttcccacgtgctttcatttcagactccaatttgggagtaggtagcctaggtcaggtggtgaccaccaagcaccctgctacctaggggatctgaggagggtgaagaaggccagatgcaaactaagctctgtccccaaacaacttgcaaagggtctgcaccctcctcctggaaaagtctgccttacagacccatttgcccatctgggcccagaaccccaggaatagcccccctctcccctcctctgagcgcttgcaatttgctagccttgctgagacagatcgacacgctcagcctcagagacagctgatggtaaaaaccacaaaccaaagtgccccagacaccaatgtgtttccatcatttgcatgtcaagggcaagtttcttcagcaaggtgggaaactgggagggggagaaacctcagaaccacaccctcctcggggaggcccaacgttaggttagcatgttgaacggaactccaggactgggtttccaaacccctctgaggatctcctctctcctgctcctctctccccacacttcactccctggtgcattcaatttccgggggaggcagggtgcttgaaatcccagaagatggtcttcaggccccaggttaaagattcttaatccgaagggacagacccatgcctctatactgactcctggctcctttcccaggttgtaactgagagctcaggatttgtccgcctggccaatatagtctagattatgttatcaagtgtattaccttacacttacccatagtgcagttcatttgtcactttcctgcttacttgcaagatccctctgcagttcattcctgtcaccttggcatttcaggagcagaaaaatgcatctgcaaacctggagatttccatttgcactcgcctatggattgctcataatttttttttttttgagacggagtttcgctctgtcacccaggctggagtgcagtggcacgatctcaactcactgcaacctccgcctcccaggttcaagcaattctcctgcctacgcctcctgagtagctggggttacaggtgggtgccaccacgcccggctagtaaaatttttaaatacattattattatagtcattaataaaaccagttgctctaatggacactcttccttgaagcacacttttcttgggctttgctaacatactcctccttt

SEQ ID NO: 1243901 - DNA, 4001 bp, Homo sapiens
atttaaggaaacctgaaaaaataccttacctctggctctaggccctaaacagatggcttttggatcatccatgccacctacccctcccctgaatatttattttcttcattccagccccagccgtgagccaaccaggactctgtaaacactgagtctgcacacctgggcttagtcaacagtcatcaaacaaaggcactgccaaatcacctcacaagcccaaacttgcacctactctgtctgtcacagggaagcagccacctgggaggtgtgaatggtgtgctccccttctcccaacacagaatgggcatgagggattgggctgtatagaggatgtagccggaacggccccagcctacaaatgggttgcaagtttaattagacttaagggatatgagaaaacagcatgagaagcagccagcagttgcaagaatcttccagaagcagctagacatttctcagtcccttggcttcttcgataatcatcattaaaatatgatgcactggccgggcatggtggctcacacctgtaatcccagcactttgggaggccgaggcaggctaatcacctgaggtcaggagttcaagatcggcctggacaacatggtgaaaccccatctctactaaaaatacaaaaattagccaggcgtggtggcaggtgcctgtaatcccagctactcaggaggctgaggcaggagaattgcttgagcccaggaggcagaggttgcagggaggcagaggttgcagggagccaagatcacgccattgcactccagcctggaagacaagagcgagactccacctcagaaaaaaaaaaacaaaaaacaaaaaacaaaaaaaaccatgatgcattcagtgcttgaacctgggaggcggaggttgcagtgacctgagatcacaccactcactccagcctgggcaacagagcgagacctccatctcaaaaagagaaacgatgatacattcaggtagtgcttgaacactgcttgctggtggcaaacatatgactgactcgtcctgcaaggtctgtgtatccctaacagcagagttgtggggattagcagacccacagcccggacacgggttgaattgagattcatgctacctttgtgtatggtgaacctgtgtgcatgtgcaaaataactaaagaggaaggatgaacaggaaaggcaaggatgaaaacccagcttccacaggggaaacatctgtgaattgtagccaggatctgctgatactagtcatttgagaatcccaagatagattatcctctcactctgaccacactgactgtccacaatgattgtgctttacgtgtgcacagcactcaacagcttaagacgttgcgggaaagtccccgaacgctttgcattcagccaggctccaggttgggcacaaaccctatagcagagagctggcccaggtgccatgccatcctcacaacaatcctatgaagtagggactgttattttgcagaggaggggattgaagtacagaggagttaaataccttgccccaagtctcgcagccaggagtaaccaggtcaggattctaccccagagcccacactccaacccctcaccatgttgtcaccccacttacaataatgaatctctgcacctctgcatgggacaaagagggaaactgagtcttccaggagggctgggcacttgaggccatcctggcaatggtcccacctccagccatcctggaggaggagcgaagccactgcgttgagtgcgtgggtgcagtgggccagccagggaacagggaggtaaaaaaccaagggggcacctcagctctgagctgggcaggccaggccccacctcatgcttcctctgccacagcagtcccaggccaggagggcaccttgccaggctccactgccacccagaacatggcctccctgtcctggtctgggttctcctcgagttgtatttccatggcagccacaatgggcagcagccagggtgagtcaggccaggcaagaggaagtggccacacttgaaaattattaacatgcagggctgagcttgagtcctttgttcttgagcaaagactgtagcatttcactttcaggaaggagctaggagggtggggcaggctcagaattgcacaaccaaagcacaggctcaaacacacacaggtcccaggtggaagtcagcttagacaggccacctgcagaaaagtgcaggccaacccacagccccatacagcaggtccacagagaaaatacaggccaactcatctccactgttttttaaatcagaggctgggcacagtatatgaaaacctatataatcccagtgctttgggtggctgagatgagaggaccacttgaggccaggagcttgagaccagcttgagcaacatagagaccctttctctacacaaaaggaaaaattagctaggcatggtggtgcacacctgtagtcccggctattcaggagggtgagatgggaggattacttgagcccaagcgttcaaggctgcagtgagctatgatggctccactgcactccagcctgggtgacagagagagagaccgtgtttcaaaaaaaaaaaaaatcagagagggtttccaacagggataaaatcagggtttttgtggtcaaaagtgttccaagtcagggagaccaagcaaaggaggcacaaggccggccacagagggaaggatgggactctgggcagccagaccccagtgggagccctgcgtctgggagagatgaaagacaccccctcaccccagctggcagggggcagccccagctctaggaagactgccttcctgcacccccttgccaaaagatggcatctctcctccaaccatgcagctgtcctggcccccctaccccaccgcgtctcctaggtgagaaaaacacccataaccatcctcacgggcacccagcaaccctgaaacactgtgtctcgggcaacttttcgagctgcagctgttccctgaaaaagtcacacatcagccaccaggagtggtgggaaaggctgaattctggagaagagggatgaaggttggggaggtgggagggagggaagggaatatggtcaccagaggaaaaaagtcaatcaacgaggaaaaatctgtttctaaaaatgtaatgcaaacaacaaaaaaacaggctttgagcaagccttataagccctggggcccaggcctgtccttagttccccgggaatggcccctgctccccgtcccatttcacaggggtcatcaagaggctaagatttcactctgctcccctcctgcacttcaggagagcttaaccttgaggccttcaaggaaattgggagaaatgggacccctgtcctttggcaattacaaagtaaatggccctaggggctaggcgtggggggatcgccctaccgtaggggagtgggggggcctcattcccacccttcctcggctctgcaggggtggctgcagcagaggtggcttgttcagggaagctacctgctccatccgtgctgggaccacaggggcaggccacccaccgggtccaactcatccccctaccaaagcagctctttttgtaaagggctttcggggacaggaagcaataaacagagtcaagcggccaagatgcaggggctgattatacagtttacggattttccaggcctttttgtactctcccaccagctgcccggggctctgcagaaaaaggtgctggagaaagaccggctggtccctggctttacaggtggccttttgccaggcctaactgggccttcctgagcgaatgagggggctgcatgcctcgagggtcctgcaagtcaccatgaagaacactgccacccggtaccactagagaccagcaggctaatggctacagcttctctctctctctctgacacacacacacacacacacacacacacacacacacacacactccagcctgctgctcaactctccacccagctctaagtcactctggtattccagaggggaggggatgcctggctgcgcgctgcctgcgtgctgaggccag

SEQ ID NO: 1243902 - DNA, 4001 bp, Homo sapiens
ggtttcaccatcttggccaagctggtctcaaatcctgacctcgtgacccacccgcctctgcctcccaaagtgctgggattacaggcatgagccactgcacctggctgagactccatcttaaaaaaaaaaaaagaaaagagaatggactggagaggaccaggagaccaattaagaaaataagatcatgtccacaaggtacttggcatgtggaaaatgttcggtcaatgagagctcccttttcttccttttctcttcccctccttgtcctgcctctccccttcgtcaggtcattcagttggttggttgtgggtcagtccgtcagttggtctgaccatccgtccatccttccgtccttcctccctcactccctccctctttctccctctaacccttcccatcttgtcctccctgcctcaagcatagattattttgctccccagggagaaaatcttctggagtcatttttggctgtcacaactggtggagacgggtgttagtggatagctccagtctagtggctagaggccagtgatgctgctaaacattctacaatgcacaggacagcccaactaccaccactaccacacacccccaaagaattatctaggccaaactgtcaagagcgctaatgttgagaaaccctggattagagctttcctgtccttaaatgcagttatgtgaagaatacactaaattggatgaaactagatggagtcctggcactcactgtgattgagaacacatgacaaactaataggtttactgggcaggcggctaagctgatctacttgctggttcaattagctccactttccggaggctagcattttcccaaccttgccccatgctcttgtgggtacatttaccctatttggggccttagcgctttacaaatgaacgtttcagtttaagagacattgccacataacttatattaagtggtatgaattcaaaagcaagctctgccactacagatcagaatccagcactgaaggaggtgtggaagtcagaaagatggacaggaagatcccttcaggcttaaaaaggaccccagggccgggcgctgtggctaacccttgtaatcctagcactctgggaggccgaggcgggcggatcacttgaggtcggcagatcgagaccagcctgaccaacatggagaaaccctgtctctactaaaaatacaaaattagccgggtgtggtggcgcatgcctgtaatcccagctactcgggaggctgaggcaggagaatcgcttgaacccaggagggaaaggttgcggtcagccgagatcgcgccatggcactccagcctgggcaacaagaaactccgtctcaaaaaaataaaaaataaaaaacgaccccagggcatggcttagggtagggagaatggggcacaaaccacccctacttcagtccaggacatgactctgaactctcacccaaggaagagaggtgtgtggcaagacaagatatacaaaacaaagtgtggtgacacgtcctccatatctacctcctttcctagccatggctccatccgccccctccccggtcttcccagaatttacagccggtagagccgcagtcaacaaacacgcaaacaccacctgtcactgttcgcgacacacctcggactttcccaaatctcagtcccacccctccattgccctaaggatccatcccctcttcagggcaacggcctcctcccggcgaaagcaaagctgcgttgccatggttatccactccttcctctacccccaccccctgccaatttccgtcccggcctcagtcctcccccgcccaggcctccctccactcaccaggtctccgccccccatgacggtggagacgattcctcactacgcggatctggaagatttcgggaggatcaagagaaaacgtagagaaatagttcgggggctacctcgcgggatctagtcccaggagccgtcaactgccagtttcaccaccgctctagaggtcacttccgggagggcgtcatctcaccgcgtcggcgtcgcggaacgatgacgtacagggctcggtcgcgctttgtgacgttggcgttacttgcagattttgcaaaggtccgggctccgctgtcgaggcctttgctgtcgaggtctcattttggctgcttcgggtcgccacgttgcctgatgtcccagactctctgttgaaacgccacaactctgttcagtgatgggttgccgtgggcctgtgcccacggctgtgttgccatggcagctcaccagggcattcggctcaaagctccacgtagtctctgctagacctaaggtggaccagactaggcctcctcccctcaccctgcacacacccccacgctccagttttccaaaacggctttgcaaactggcgctttcctcagaccttgactcacagcaaatccccttatgccaggcctattttacgaagctaaatagaaaccatcaaatcgaaattccatcagcttccgtttgccaaacttttaaaatctgccagcttccacagtggcagattttcccatagtgggaagctggcagattcctttcccttcagttactatgtgtttttggcatgtttttcttttttctttttctttttcttcttctccctttgtttttgttttttgagaaggagttttgctctcccaggctgcggtcgaagctgactgcaacctccgcctcccggacagcaattctcctgcctcagcctcccaagtcgctgggattacaggcgcccgccacccgcccggctaatttttgtattttttgtagagacagggtttcaccatgttgctcaggcttgtctcgaatttcgacctcaagtgatctccccgcctcagcctcccaaagtgttgggattacagacataagccaccgcgcctggctatttttatttttgtagcaacagggttttgccatcttacccaggcttgtctcaaactcctggactcaagcaatcctcctacctcggcctcctaaagtgctgggattacaggtgtgagccactgcgcccgacctgttttgtaattttcagaatagaagttttgcacatcttttgttaaatttattctaaatgttgtattttttgtgatgctattttatttatttatttatttatttatttatttatttatttatttatttatttatttatttcgagacggaatctcactctgttgcccaggctggagtacagtggcgcaataccagctcactgcaacctccgcctcctgggttcaagcgattctcctgcctcagcctcccgagtagctgggattacaggcatacgccaccacgacctactgatttttgtgtttgtagtaaagatgggatttcaccgtgttggccaggctggtctggaacccctgacctcaggtgatccgcctaccttggcctcccaaaatgcaaggattacaggcacccggcctgtgatgctattttaaataaaatttaaaaattttaattttccaattgtttgctactaatagataagaacgtgcttttgtatagtaaccttctattttacaggcttgctaaattcacttattagttcttatggctttttaaaaatacttattgcccgggcgcggtggctcactcctgtaatcccagcactttgggaggccgaggcaggtgggtggatcacctgatgttgggagtttgagaccagcctggccaacatggaaaaaccccatcctactaaaaatacaaaaattagccgggcgtggtggcgggtgcctgtaatcccagctacttgggaggctgacacaagagaatcacttgaccctaggaggtggaggttgctgtgagccaagatggcaccactgcactatagcctgggcgacaagagtgagactttgtctcaaaaaaaacagaaagaaagaaagaaacaggctgggctcggtggctcacgcgtgtaatcccagcacttttgggaggctgaggcgggcagatcatctgaggttgggagtttgagaccagcctgaccaacatagagaaac

SEQ ID NO: 1243903 - DNA, 4001 bp, Homo sapiens
agaccagcctggccaacatggtgaaaccctgtctctactaaaaatacaaaaattagccaggcttggtggtgcgcgcctgtaatcccagctactcaggaggctgaggcaggagaatctcttgaacctgggaggcagaggttgcagtgagccaagatcgtgccactgcactccagcctgggtgacagagtgagactccatctcaaaaaaataaaataaaatagtactttgatttcaagaaaaatattaataagtagacaatagcacacgtggtagaatgaattggcaaaactcatgaaggtgatggtgaatgatcaccccgtttggcaaacagggactcgagtctaagtactttggacaggatcagaagaaggttctaggaatgtgcggccccaggggaaaaggctcaggtaaagaaaactgtcaggtggaagctgctaagccctggaggcagagcctgaagagcagtggaaaagtctcacctttgagatcaagacagctcatcaattcctgaacccatgggtccttgttgcccccacacacgctccaggaaaggagctggaacctgcggaggagagacctgggcttagctgcggcgccttctttccttccccggctccttcctcattccagaggcgtgaagttgccaccaagaaagagccctttctcctgggactgggaaactccccagtaggtgagacggagtcatgaagtttcggggaatgagagcaaacggaacccggagatggggctcggtgagccgggaaggagttcaggctggaccagagagggtcctggaggcacctgcaaggaggggccgcccaggcgctgccctcgcagaggcaggtaaaattacctcgtgtagtatagacaccgatggtaagctctcaggtgtttccggagacgattcatgaactgaaccgatggcggggagtcggaagaaattcttttaccacaataacaacttccagtgacgctgccctcgttgccattgcctgcgcgggacggaggtggtcggcacccattcccaggcccagggtccccactccgctgttccctggcatccaatccacagccccatgacagcctctcggtggacccagggtcagagcgccaggctcaacccacacatcatcacgcccccgacaacatccataatcccgcccggagccaggcgtccccgggcctctgtccccaaccccaggcggctggctggctttcctcttgtccccgctgccttcatccactcaactccgtgggcctcgtgtcccctccccaactcacccccttcccgtgacaggggaatctgggtcccctgccccgcccccggctaacctggctgagtcaggtacaccagcaggagcagaagcaggagcaggagcacgcgggacccgggccgcaagtcccgtcccatctcggggctccgcggactctgcggggatggagccacctcgctctgactcccagacatgctccggcgcgtgacgtccagctggtgtctcaatggctttcgccggggaccggaggagacggcggccggagaggaggcgcgagccagctgcaccccccggccctgctgtgccccgaccgtgcgctcagtactcggcccgcgccatgccagcctctggacgcagggaaagccgaggaggtggagctcccgcgccctgcgcccccgcactgggcccggctccgtcgagggaaggccaggaatcttggaagaaaccgaaagaaaactccggcggcgggcgaggaggggcgggaggacgacggcccgaggagccgattcggttcggttcaggaggccgcccgcctggcccgtccgccgacctgtgaggcggctgcactgccggaccggccctcctcctccgaggcactttcacttccccgatccgggcgccgcgggacccagccgcgctgcatgagcctcccgggcggcccggtggagagagtcgccgccagccccggccgcgcgcacctgcggggcagccacccgcggacgcaccgagcccggggggcgtggccgcccgctgagccggcgagggctcgggcagccctgacgtcacaaccgcacccgcgcaccctccaccgcgaggtatttaccttcgaaaagtggtggcggctgcaggtaccggaggagtggggcggccgggaggggctaggtctaccggggctgcccgccacgcagatccgagcccagggaaccccctcgctcccactcccataccccacagacgcatccaaaatgcttccctccccaccaaaccgttcccgataggattagccctctctcctctctagccttaatttaaactctgcttttgagggtgtgaactctccaattttaagccccaaataccatctcatccctgagtagtcttctccaaccctggtcacccactttcaagtccagcccccattttcctccctaaactcccatcctcagccctgaaaaatcctcttctccgctcctagcatatccacggatccaaccctaagtgactctcaaacctaccctctccctcaatttgtgacccagccccaaactccatcattgctctcctgtccctcaccatatatcccttcttttgctcagtctgggccggggccctgtgccgctgaagacatggagtttgtgtctggataccgggatgagttccttgatttcactgcccttctcttcggctggttccgaaagtttgtggcagagcgtggagctgtagggactagccttgagggccgctgccggcagctggaggcccagatcagaaggctaccccaggaccctgccctttgggtgctccatgtcctgcccaaccatagtgtgggcatcagcctggggcaaggggcagaaccaggtcctggaccaggcctggggactgcctggctcctgggagacaaccctccactccacctgcgagacctgagcccctacatcagctttgtcagcctagaggatggggaggaaggggaggaggaagaggaggaagatgaagaagaagagaagagagaggacgggggtgcaggcagcacagagaaggtggaaccagaggaggaccgggagctagcccctaccagcagggagtccccccaggaaacaaaccctccaggagagtcagaggaggctgcccgggaggcaggaggtggcaaggatggctgccgagaggacagggtggagaacgaaacaagaccccagaagaggaagggacagaggagtggtaagaacccagggctggccctgccctaccccttgcccagccatcctcccttcggaagccctcccctgccactagttctgagtgctggccttcaggccaatctggcctgaaaaggtgtttttattgacccacagtggggtttttttttttaatttaatgtttaaacattgcaagaaaaaaagtatccagaagtctggatttacacattcccaagaaaaatctcaagctctgacagtgggcctacatttctgcatggcagcgcattctggtcctctgtagcagctgtcccctttagaaggagcgtgccctctctacccagagccctttactcagtgaggttacttgcctagccccgtaggtatttgagtttggtactcctgaccctgaccacatttgtctctcgctgccccctaccacctcaacttttccctctttccccagaggctgcccccctgcacgtttcctgtctcttacttgtgacggatgagcatggcaccatcttgggcattgatctgctagtggatggagcccagggaaccgcaagctggggctcagggaccaaggacctggctccttgggcctatgctctcctctgtcacagcatggcctgtcccatgggctctggggatccccgaaagccccgacagcttactgtgggagatgcccggctgcatcggtatagaaatctggtatctgaggctggggaggactcgggccctggattcccaagcacctcctccagcctgatgccatctcccccccaactgcatttagagagctggagagctt

SEQ ID NO: 1243904 - DNA, 4001 bp, Homo sapiens
ctgcgccgggccaattgttattattttttttatggaagacggggcccgtgaaggccagagggccaacggcccatgaaaggcccagcgcagcccaggttagagagatgtgatttcaaaacagactcattatttataaccatcagctcctggacaagccaagtcccttctccaagcctgcttcctaatctataaagtggaggatatctggagctaccttattgaacacagaaggagtaagtggataaaggtgtgccagcgcccagcacagtgcctgccacaaagtaggcattccatcaaagaccaatcttacaaaaacgaaatctggtcctaagagcaccttagaaagagtcacactgctgacacatgaggtttggggccacagagagccagatggcagccgtctctaataaatctacactccattgctgtccaccattagcccctgcacaccaagcagaagctcctggggctggaagaacacaggatggtctgcttttaatctgtgacattgtatattcccaaaattcatttatgaattgttcagacagtagagtgctttttcccagtgaagctacgctttcagagggggttaatttctcattcccctccaccaatgccatctaatgccactgaaccatcccagtattagcaggagcccaagctctgcctgccaaggaaaagtggtgagggcagaaaagtagtaggacaaggctgggcacggtggctcacgtctgtaatcctagcactttgggatgccaaggcgggcagatcacttgaggttaggagttcgagaccagcctggccaacatggtgaaaccccgtctctcctaaaaatgcaaaaattagctgcgtgttgtggcacacacctgtaatcccagctactagggaggctggaacaggagaatcgcttgaacccggaagatggaggttgcagtgagctgatattgccctctgcactccagcctcctggcaacagagcaagactccatctcaaaaaaaaaagaaggaaggaaagtaaggaaagcaagaaagcaataaagcaagaaagaaaaggagtgggacaagcagggtggttccacctccagctctaggaggctccctcatgcaaggaggtggggctgccaccgcctcgtattttcctgcctccatcaaatttcaccgggagaaatccaggcacctagaggaggtggcaaagctttttttttttttttttcattagctattaaaccaaaggggcagaatctaggcgccctagatgtaacttcatttacggagtcagaaaatccacaaaggctgccaaggtggaatgaatgagaggaggacgaccagaaaggagaagtctgggaaggggaccccagatccacacggatgatcctcgctccgtgatacagtcggggacagggcagggagggagggagggagggtggccctgccatctcccaggtgtcaaggtggcggcagctccgccctcagcgcagttggcaccggcctgacccaccacagggccaccgaggccaccgaagccatggggctttcccactcgggaaactcccaccctcgcgctcagaagctgggggcgtcgggagacacaggcggggacctgcggctccacgttgcagcccgggccctgctcggggcaagaggcggtggctccggtttcagatttcaagagggcagccgtggcaaaggctggttggtccatttgcaccctaccttgctctagaacgcggcgcaggagcaaagatccaaactcggggtcaccagcaagcgggggtctcggttctaacttcagcagagacccggcacccgggcaggccagggcaggggccgcctggaccgggagaggctcggctccgagagggcgggcgagccctgcagccctcgggcccagggtgcgggtcggcgccgcagtccagtgcgcggccgcaaggggcaggtgcgaggccggctgctactcgggagccccgcgctgtccctccctgcgcagtcagggctcacctgggccgcccccgccccgcacccctgcgcgctccgctcccacccccagcccggcctcctaccttgcctacccgagcgtcccttcagcctccccgcgccgcgcccgggtcgcttggccggttctgcgggccgtggcgcgacggcgtcgccatggcaaccgggcggcgggctgggcggtgtctccgggaccggaagtggcgtacgcggcccccggggctgccccgcacgtgccaggtccccgcggttgcggccacgctcgggaccgggccctgccagctccgggcccgcacgtgggcgaaccgcggccaccgtgagcccggcctcgcgacctccctccggggcccccatgatcgggggtgcgtgggatctgcggcctgcgggggtggagggccgggagctcccccgggcctgcctcgagggccgcgggattcgtccttgcgagccccgactgcgcacggaaggacctggggtcggccaggcctgggggatgggacgggccccgaggagagcgggtgccaggggcgagacccgccgcccttccccggcttggtcccgcgcttcctgattttctcgctccacgcctcccattctgccctccaccttcttccctgccccgccctcgccctgcccgggcccaggaggccactagatgtcagacccggttcgggccttggccacgccgccgctccgggagccctgggggcacctccccagcccccacgggggagacgatactgccgggaaggcccggactagcccccgcccccgcagagtagccttcggggaacaccgattccaccaggctctcacgaaagccgagagcttgccgtccgcagcttcccctgcccaaagcgcagagaaacgagggcgccgaggccaagaccaagaccgggagccagccccttcggagcccggtccaggcccccggtccaggaagtgctgtgggtagataaggggcccagctcagacttcctacaagctgggaagaaagggttctttcctgtctgatgccgggccagatgtagcaagcgcctaggggtaggagggaaatggggtttcctccccgcagagggaaaccggcctccattcaggaacgccctcccccacctgccctccaggcaccgaggttctgggaggccggggggcagggagacctgcttacttgaatgcgctttgtgtattgcctgtgtattgccacaggcagtgggcaagataggccctggggatccagtactcgcttagtacacagagagcagtctccagcgccaggcgagacgcacaggcgtgtcagctgcatatggcacacggtggcacatggcacaccttccacgagcagacacaaggggccgacacagcagggcccaccccctcagagggaccaagcttaaaccctccaacaacagaaaatttgtagagtatctttcagttggaggaaattaatggataatttaaagtaagaaacagtttccttagcgtgctaacaggcagaatccctgtggattgaaggtggaactgagccatgtcctttgtttggtctgtggatttagacgtggaggaggagtcctgaccggctgagcagggctgagttccctcgtgagagccccgggccttcagccccttccaaagccaggagagactcctgctgaggggtgataggggccctttggcttccccctcaccccacggcccagcagcacggggctgcaggcttttcccttaggaggaagagcagccgcctccctgccagcagtgttctcaagggcctgcttcaagtggggaggggtgggtgagggtgttctgactgagggagaggcctgcacacccgctgcatgggggggctcatggctacacctaacccattttaaagaacaggcaacgccaccaaactgctctctggcactagggcccagaggccttgccccagctcccagatgtcccaacccaggacgacagacacccagactaactaccttgcaaccctgttcctgctgccgaagctcctg

SEQ ID NO: 1243905 - DNA, 4001 bp, Homo sapiens
gaggcggcaggaggagaacaagcggggctctcccctcacccggcagcggcctgtgcgccacggaaaagtgctgccatggcccacagttgccactgcaactgccaccaccatggccaccacaagcagaccccagagcactgctgctgccccccatcccgccccggttccccactggccccttgccacggtccagcctctcctggcagcaactgtatcagaactagggggacagtggccagcacaggggcactgacccccttcacacccggcacacgctctgccctgcagtgcccaggagctggttttcagtccctcccagtgatgggctccttctctgctccccagttctctctgccacatcggacaactgttggcaactccaccattaaagggggggtgtgtgtgtgggccgggtgcgatggctcacacctataatcccagcacctggggaggccaaggcgagtggatcacctgaggccaggagttcaagaccagccacaacatggtgaaaccctatctctactaaaaatataaaaattagccgggcatggtggctcacacctgtaatcccagctacttgggaggctgaggcactagaatcccttgagctcaggaggcagagtttgcagtgggccaagatcgcaccactgcattccagcctgggtgacagaatgagactctgtctcaaaaaaaattttttttaattaaaaaaaaaagggtgtgtgtgtgtgctaataatccacacgcactgcagtagaatatggatcagcaaaaaaggtaaaatgacaggccatcagaatttgatctatatcctcacacaccttcttcctaaaacacatatgcatccttttatagaagcaggatcatttattccattttctaacctgctttttaactgagggcgtagcacacatggatgtttgtgtcaatggatacgcgcccacatcatcattttcgtaacctcacactcttgcattgcacggccattttttagccaactagttcccattgttcagcatttagctagctttcgatttcagttttccaccaaataaacaacaggatgtggtcatctgcaaacttctctgcagggaatcctgaaacaagggctaggttctgttttagacttctgacacattccatcaaatcatctcccagaaacatagctccaatccacattcccagggtggacgggaatacgggattccagaagccccagccaacaataaatcctatttttggaactcctgcctctgtccttatctgtcacctacacgggtatcagttctgtccccgccaccccaaattcaagccccatttctgacggttcactactcatctctacctggacatcccacagacgcttcaaacccagctcgtcccaagtcaccttctctcccatcgtcgccaagttctctcatgccctccccactagctagcagggctgcccttcttccgggcccaggtgacacctcagctcctccacagaaggctgcccaggccgccgcatgctggcacccctcccctcacttccctcctgagcatcctcactgccccacccaagtcagggcctgcagcttctccctcttcaacgtgacagacatgccagggacaaagccagctcccaacatcatgctgtcccctgcgtaagtgcccccgagtgccagtgaaatgccaactgcatggcatgatcctgcccgtttccatctgcagcccccactgttcctgctaggccctctagaggagacgcctgggctcacagaatccaaggacatggcccagcctggctccctgctgtgggcccacacccctgcctccactcctcaggcaccgcggtgcgcagatcactctgtccccaggctctcccggagcctccttaccctcgcggtgccctgtctgctcctcgaaggcagggacgctctcactcctccttgggtatctttgggtctctaataccccgagtctaacaggaaaatgtactgaaagaagtgctgtcccccctggtcacttgttgtctgtcctcctctccaggtcgccgcctcctttattagattcatccccagagagcctggctgcaggcagaatctgattagctacaaattaggaagaacagaggggacatcacctctccctctgctgggtgacccggcaacttcctcacacctcgtggagtacaaagggcaggagaggcccgcagagcgaggggccgctgcccactccttccttcccaccaggctccctggaagacagtggacatcagagccaggctctcttctcgcagcgacgactgcctgcggcttcaacatcctacagtgaaatgcccggcctggcctcccggggagtcggaaccataacattgtttgctccccaccatggcagggcagacgtgtgcttggtgtgtcagtagggtggggacccaacagcctgtgagcacctgctctgtgctgggcacttcatgccatctctaatgtcacccttaaatgacactgtgtggataacaggagcattgccccaatttgacaggccaggaaatggaggctcaaagaggacaagcgacaggcccccaaattcccatcagcaaatagcagctcaactcaacccgcagccacctgcacttggccaggtgctagggccacacagagggggcctggtccctgccctaaaggggcgtgcagatgagctttggtacagacccaattttcaggtaagggtggtacaagttcaagccaggagctaatctgggcctccaagacccgtcccagcatgcacacggaagacggcacccctgctttgatgtctgtgggcaatagcatctctagctctcctgccgaacagtggctgcctgctcgtggctttggcctttccaaggcccaggaactagggtggtgctgtcagtctttccagagactgaggccagcaagggtctgtgttggagctcactgaggaagctgctttgacgcaggggaagctcccgggcggtgccccccctcctgtgccagtcctcctgcgtcctccccgcctcggttccaccatggcactaagcactggtgcgtgcaagacagcaggccctgaccgaaggcaagagggaaggggttacaggagggcaaacaagccgaggaagatgcatttccatttgctcctaaggcgggtgccctggcctaggcagcccaggcacccggggcacctgggcatctgggaggaagccagagatgaacagcggcctctggaatgacagcagcctgcttctgattcaaaggcgaggcttcaaaatctaagtgtaaggatgaaaggaaagcccatggctggcctgcaggcgaccacagtccgtaggttctgagcgtggctctgtgctttacaggagataagcggaagatcccttccgcaacaggactctcgtgaggccattcattggacataattgataacccatttgtgtgcagggaagggctgtcccatgccagaggtgggggtgtacagggatagacattctggtatctctggacagaatctgacccacccacaaatgtgtctgctgcatttgcaaacctggacattgggtgagatttctccctaggaagcaaggctttgaatcgtggccctcatttcccagtcttgacagcaagaatactctctcgctcttccctcctcactgggcagccctgggacaccggctgttcttgggccctctgtgttctcagagcagaactgtgggcagcagcttcaaggcctggaagctgccactccccacccccaagggctccactgccctgcagaccagaaccttgcaaccagagggagctcacgtagcccctcacacagtcacttgccttcctctgtgacagctcaggatgagggtgacagatctctggcagtttctggatcttagagctgtgagagtcaccctcgtccccacccactcaccctacctgcagccagaatccacttaatgcaatcagcgcattagggacagcatgacccgcagatcttcactgagccaagca

SEQ ID NO: 1243906 - DNA, 4001 bp, Homo sapiens
cttcctaatctataaagtggaggatatctggagctaccttattgaacacagaaggagtaagtggataaaggtgtgccagcgcccagcacagtgcctgccacaaagtaggcattccatcaaagaccaatcttacaaaaacgaaatctggtcctaagagcaccttagaaagagtcacactgctgacacatgaggtttggggccacagagagccagatggcagccgtctctaataaatctacactccattgctgtccaccattagcccctgcacaccaagcagaagctcctggggctggaagaacacaggatggtctgcttttaatctgtgacattgtatattcccaaaattcatttatgaattgttcagacagtagagtgctttttcccagtgaagctacgctttcagagggggttaatttctcattcccctccaccaatgccatctaatgccactgaaccatcccagtattagcaggagcccaagctctgcctgccaaggaaaagtggtgagggcagaaaagtagtaggacaaggctgggcacggtggctcacgtctgtaatcctagcactttgggatgccaaggcgggcagatcacttgaggttaggagttcgagaccagcctggccaacatggtgaaaccccgtctctcctaaaaatgcaaaaattagctgcgtgttgtggcacacacctgtaatcccagctactagggaggctggaacaggagaatcgcttgaacccggaagatggaggttgcagtgagctgatattgccctctgcactccagcctcctggcaacagagcaagactccatctcaaaaaaaaaagaaggaaggaaagtaaggaaagcaagaaagcaataaagcaagaaagaaaaggagtgggacaagcagggtggttccacctccagctctaggaggctccctcatgcaaggaggtggggctgccaccgcctcgtattttcctgcctccatcaaatttcaccgggagaaatccaggcacctagaggaggtggcaaagctttttttttttttttttcattagctattaaaccaaaggggcagaatctaggcgccctagatgtaacttcatttacggagtcagaaaatccacaaaggctgccaaggtggaatgaatgagaggaggacgaccagaaaggagaagtctgggaaggggaccccagatccacacggatgatcctcgctccgtgatacagtcggggacagggcagggagggagggagggagggtggccctgccatctcccaggtgtcaaggtggcggcagctccgccctcagcgcagttggcaccggcctgacccaccacagggccaccgaggccaccgaagccatggggctttcccactcgggaaactcccaccctcgcgctcagaagctgggggcgtcgggagacacaggcggggacctgcggctccacgttgcagcccgggccctgctcggggcaagaggcggtggctccggtttcagatttcaagagggcagccgtggcaaaggctggttggtccatttgcaccctaccttgctctagaacgcggcgcaggagcaaagatccaaactcggggtcaccagcaagcgggggtctcggttctaacttcagcagagacccggcacccgggcaggccagggcaggggccgcctggaccgggagaggctcggctccgagagggcgggcgagccctgcagccctcgggcccagggtgcgggtcggcgccgcagtccagtgcgcggccgcaaggggcaggtgcgaggccggctgctactcgggagccccgcgctgtccctccctgcgcagtcagggctcacctgggccgcccccgccccgcacccctgcgcgctccgctcccacccccagcccggcctcctaccttgcctacccgagcgtcccttcagcctccccgcgccgcgcccgggtcgcttggccggttctgcgggccgtggcgcgacggcgtcgccatggcaaccgggcggcgggctgggcggtgtctccgggaccggaagtggcgtacgcggcccccggggctgccccgcacgtgccaggtccccgcggttgcggccacgctcgggaccgggccctgccagctccgggcccgcacgtgggcgaaccgcggccaccgtgagcccggcctcgcgacctccctccggggcccccatgatcgggggtgcgtgggatctgcggcctgcgggggtggagggccgggagctcccccgggcctgcctcgagggccgcgggattcgtccttgcgagccccgactgcgcacggaaggacctggggtcggccaggcctgggggatgggacgggccccgaggagagcgggtgccaggggcgagacccgccgcccttccccggcttggtcccgcgcttcctgattttctcgctccacgcctcccattctgccctccaccttcttccctgccccgccctcgccctgcccgggcccaggaggccactagatgtcagacccggttcgggccttggccacgccgccgctccgggagccctgggggcacctccccagcccccacgggggagacgatactgccgggaaggcccggactagcccccgcccccgcagagtagccttcggggaacaccgattccaccaggctctcacgaaagccgagagcttgccgtccgcagcttcccctgcccaaagcgcagagaaacgagggcgccgaggccaagaccaagaccgggagccagccccttcggagcccggtccaggcccccggtccaggaagtgctgtgggtagataaggggcccagctcagacttcctacaagctgggaagaaagggttctttcctgtctgatgccgggccagatgtagcaagcgcctaggggtaggagggaaatggggtttcctccccgcagagggaaaccggcctccattcaggaacgccctcccccacctgccctccaggcaccgaggttctgggaggccggggggcagggagacctgcttacttgaatgcgctttgtgtattgcctgtgtattgccacaggcagtgggcaagataggccctggggatccagtactcgcttagtacacagagagcagtctccagcgccaggcgagacgcacaggcgtgtcagctgcatatggcacacggtggcacatggcacaccttccacgagcagacacaaggggccgacacagcagggcccaccccctcagagggaccaagcttaaaccctccaacaacagaaaatttgtagagtatctttcagttggaggaaattaatggataatttaaagtaagaaacagtttccttagcgtgctaacaggcagaatccctgtggattgaaggtggaactgagccatgtcctttgtttggtctgtggatttagacgtggaggaggagtcctgaccggctgagcagggctgagttccctcgtgagagccccgggccttcagccccttccaaagccaggagagactcctgctgaggggtgataggggccctttggcttccccctcaccccacggcccagcagcacggggctgcaggcttttcccttaggaggaagagcagccgcctccctgccagcagtgttctcaagggcctgcttcaagtggggaggggtgggtgagggtgttctgactgagggagaggcctgcacacccgctgcatgggggggctcatggctacacctaacccattttaaagaacaggcaacgccaccaaactgctctctggcactagggcccagaggccttgccccagctcccagatgtcccaacccaggacgacagacacccagactaactaccttgcaaccctgttcctgctgccgaagctcctgccttggaagcctgagaagtgtgcagtccttcagcttgggaaaggtgggaaaggagaggacccctcctgccctttcttgagtggcacaagatgagttccagggcctcctgagttgtgctaacgcctgtaatcccagcactttgggaggccgaggcgggcggatcacctgagatcggga

SEQ ID NO: 1243907 - DNA, 4001 bp, Homo sapiens
ggcacaggctagctcctggagaggagtggagatctgggtccaggcacccctcggccccaccacttttcctcaaggcacagaaaaagccaaactcgaaatacgtcttgagtctacacgagtgtacatctccttgcctacaactccgtgagatcatcattgaagtacagaagtattgcaggtgtgtgaagtgtaccgtccatactgagatagtcaaattcttcctcctcatcccggatcccattctcttccagggtaaaatccatgttcaggttcttcccttcatatttccacgtgtagctggcagcatgtgagttataggggagatagcggtgtaggatttcccatatggactccagaacccccacctggagaacacagaagcaccccacccccagaattctggatggagtatacatatacacacgctgggatcaaagtgcctcccttggcagatagcagcttcaggtactctacggccccgggaaaaaaaagctgaaactccagcatgcaatgagcagaccctaaagtcctacagatcttaatggcagccacttctaactaccggatggccataaagggtcaactgtcccctcactatatccatgcaacagagtagattaaaaagaaagtccaattgctgtccaaaacggcgtgtaagagcttcgaaggaccaccatcactaagatacatgaactgctgttcccaggcttataaaggagtctcttgtccccctgtgacccagacactcctagaattcccaaccctggggacctaggtgctgtgctttcctcagttgcctcaatgtaaaggacagaaaatacactcccaccggttatggaaaaaatgttgccctgaagatcggcctggagatttgctgggattccccattccttctaacctgctccttgtcaccagttctcacctccagtgtgtgctcctgcgacgtgagcgtgttaatgatgcggatgctccgggtcttggcagacagccgccccacctcataatacgacccctgccaccagggcttcccaaaatcgttggcccagtccgaacagggcagctgaggcggaacgtgcacaaagcggccccgcggggtgcagtacctcaggcagccggtcagcggatctatgtgcttgcggatctttaaaggagggtttggggcgagggtgtcagagcagccattaggctctggctagcctccgcctttccttcccatccccgctctccatttcctctacccacaatcccaggttccagcataactcacgtctctggtctttggatcaaaccagtggctgatatcctggcctgcaacttccacgatgggtttcagcagcaggttcccttgaaaagagcagcacagccactgtcaatgccagcccttcgagaaccaggcaaacgcgcgcgtgcacacacacacactccggccccggcccaacgtgtggcccttacccttgtattcctgtgccaatgacgttaggtcgtacacgcgtcccaggtaagatacccagaggtcttcgggcctgttatgttgggccacctccgccggcgtgaaatagcgacgctgaaaatactccaagtctggcccagccaccaggccccggcgcggcatggctcttgctctgtcggtcactggatctcttggttactcctttgctcctcagcacgtactcactactactacgacctccgtcgcgtccgggagccgaggggagagcgtttatccgctgacatggaaaccattgtccttttccggccaccgtccactgagataaatatcaggggcggggtttggactgcacgtgttcacgggaaacgtagtatgagtcccgcgtggggcatataaggatcaagtaattgagttgcgccgctttcaggagttgcggggtggggcagagaacgaatacgctccgttttaattcagtggcctgggctacatgggatatttaggacagactatctctctgagacagaaaaacaagggaggaggcagtatgaaagaatgtattctcgctaaattccagtttctaaaggatgtgtaagaaaccagaggtaaaggtctcgcgatatcttaagacatccggcgtagtacgcttcagtgagccacagcgctagagaagtaggagaagctcgcgagatctgtgccgttgccgaggagactaggagggggaggagaggggatctcgcgaaaggaaagaggtcgggagcgctcgcgagatctcggaccacccaacctgaaaggtgcttaggaagttgaaaggcccagaggaggcctccgggcaaatggccggagctggaccgaccatgctgctacgagaagagaatggctgttgcagtcggcgtcagagcagctccagtgctggggttagcacgggctctggttctgggactgaggggcagtcaagcagcaagatggagggggtggggaactgcagctcccggcagcctctgggctttgtgtgagtgccccgcgggctgccgggagctgtggttccgcgggcgggcagcctgggctgcgcggtctgagcgcttgttacaccccgcgcaggattcggacggagagcgcgaggactcggcggctgagcgcgcccgacagcagctagaggcgctgctcaacaagactatgcgcattcgcatgacagatggacggacactggtcggctgcttcctctgcactgaccgtgactgcaatgtcatcctgggctcggcgcaggagttcctcaagccgtcgggtcagtgcccggggaatgcacacccgcctggtaatgtggcggaaccttacgcaaggcatttccccttaagggcctggctgcaacccttgttttctggggctcgttttcgtggctcagaggggcgggactgattctggcctactttcctgatgctctgatccttctttccagattccttctctgccggggagccccgtgtgctgggcctggccatggtacccggacaccacatcgtttccattgaggtgcagagggagagtctgaccgggcctccgtatctctgaccacgatggcgcttacctttcagacttcattaaacttatgaccgaatgggcctgtgtctgtgtgtagctgggatgccggtgcaggatagcacaccccatccctagaggaaagggctcatctgaagtcgggagcaccctcaaccctcctctcccaaccaagatgtccaggggtgccaaaggttctctcaagttcaggggtagagatggggggcagggctgaatgacggaccaacaggccccagggtgggcccctgcatcttccctcccacggctgctgctccagaattgtggcgggagggggtgtcatcctgctccggaaggcccattgtttcccaccccggcctggcaacaccgagttcctctaagctggggtcagagaacgggctcaggtccccaaggggagcagcggcaggcggccgaggctgggcccctccactctattgagggggaggtgcctggggtcaggaacagatctctgaggtctggccaggaagaacggacaaaagcgataaggccagggggctcaaggatgctcctctctgctcatttgtagccctggcacatgtttcctgttcctcggcacagggcaggggtgatagtacttgtgccacgcctctgttcgcagagcgcgttcagttcgttaaatctttattgatgcgtggacactccttcccctccagccccgccccccagccccagaaatactagagaagctgcaccataaaacgagggcacgagattgttgtcccattcacgacggagctgagggggaggtgtgcaggttccagcctagatgttcaggattgagatgtgggtcgtgaaaggaaagtgggttttccgggatgtgggggcttttctcagcactgggtccactgacgctgctgctcccaaggggatgctaggactccgctcaggcaggggtgggggcagggcaggtcggaagatgccgggcttcaagtccttgggccgaataagagggagggca

SEQ ID NO: 1243908 - DNA, 4001 bp, Homo sapiens
gtaaataaagatggtcaatgaataccagaacacgggagctcagtaaacagcagagcacactgaaaaataaaaagcactccagacatcgaaggttttatgcccacacttgtgcaaacatccaacgacagctcccacagcacgcagcagggcagcgcaacgaaaactgccttcaactagcagcgacaaaacaccttgattccagtcccagctctgcttctaactcactgtgtacccctgagtaagtcccttcccctgctggactatctcaggggatttgcgagaccaactggacttcattccttttctgtcaacttttgtatttctttagtacttcctagacagagggaagtggcttgtattttaagtgctagaggcagcttcccaattcccctaagataatgacaagtggaaaatgcttatttaatgtcagcctagtagctgatcttaggcttgccctgcactttttttttctttttaaattttggaggtcagtcccgctggctggcaaggcaacatctgtaaaaaagcactaggctggccgggtgtggtggctcacgcctgtaatcccagcactttgggaggccaaggtgggcggatcataaggtcaggagatcgagaccatcctggctaacatggtgaaaccccgtctctactaaaaattcaacaaattagccgggcgtggtggtgggcgcctgtagtcccagctattcgggaggctgagacaggagaatggcgtgaacccgggaggcagagcttgcagtgagccgagatcaggccactgcactccagcctgggcgacacagcgagattccatctttaaaaaaaaagcactagactggtggtccgagtccatattctgtcagtattcaggtgtgagggtttcaggcaaatcgcatcctttaaccccctcagctgtaacacagggacaccagcataaacttaatttgacaaatgtttcttgaggcctaacatatgcacaactttggtctacgtatcaaggactgtaaaggtgactggacccctttcctctgccctaaccttctaaggaaggcaaacaggtgcatcttgtactagaagcaggaatgactcagaccaaatgtactatatgacgggccataaaggaataaagtattgatgcatgctcataaaccatggatgaaccttgaaaacactatgcttaggggtggggggaagaaagattatttgggaccagggcataatgaagagatggttggaattattaaggaaactgtgagggtaggggcggggcgggatctcgtttatctgtgccctaagagcccccacaaaagtccggcacacagcccgtatcctagggcttccgacgctgggtaatgggtaacaagagacagaagacatgtttctccaatgtaagtcacgcagggcggtggtggatgacagagctggcccacagtcccgccagagccagagagcctagaaggatagtgcatgcagctcgtcccgcccaccgcacgggtttgatggatgtggggtggggatggggggggaaatagatgaataatgaaccaacgaacgacgcgcaggtggctactggctcgcgccagcggagagaaaggcgtgagcagcctcgctgatacctgcgaagccgctatagtgggacccaggctcgtagtgcctccggccggaggacacatcgtagacacggccgagcaacgccaagtacaggcccgggtcccctgggccgccgcggtagcgagacagctcctccggtatgaaaaggcgaaagccagcgcggggaccccaccagcccataagccgtgctgccattaccgctgctgcggctacagccaggcccaacaaaagcccacggcctccgcacctcaacatctatataggcccacccgctccgcacttccgaggttgccgcctctatctacagctaagatggccgagacgccgagcgtgacgtcatcggcgcgcgcgctctcgctctctctctcgcgcgctagtgctcgcgctccctcccttagtctctctcgttttatctgtattcctggcactggcgaaaagctcgctgtctgcgactttttccaggtactttttttttttttttctgagacagagttttagctcttgttgtccaggctggagtgcactggcggaatctcggctcactgcaacctccgcctcccgggttcaagcgattctcctgcctcagcctcccaagtagctgggattacaggcacgcgcccccacgtccggctaatattttgtatttagtagagacagggtttcaccacgttggtcaggctggtctcgaactcctgacctcaggtgatccacccgtctcggcctcccaaagtgctgggattacaggcgtgagccaccgcgcctggcccttctcgtacttcttggcttgcaggttgtcagccccaacaaagatggcggcagcggaggctacggaatgacgtagatactgagacagactcgtcctctgggaaatcaaggttgcaccctttgaggcggcgctccccgcctagctgtcgtgagttggtagaggccgcctatctacgtgacggcgcctttgcgacagcggtcgtcgcttgacggccaggaagccggaagccgcaggggccgccgtcgtctcctccgcgtccccgcccgccagctgctgtcggaggttgacaggtcgaggcggggaggcggcggcggcggctgcagagccaggcgcccaagacggagaccccatggggaacgctccgagtcacagcagtgaagacgaagcggcagctgccggtggcgagggctggggcccacaccaggactgggccgcggtctcgggcacgacccccggcccgggcgtcgcggctccagcgctaccacccgccgcggcgctgctggagccggccaggctgcgagaggctgctgcagcgttgctgcccacacccccctgcgagtcgctggtgtcgaggcatcgcggcgcgttgtttcgctggctggaagagcggctgggccgcggcgaagagtctgtcactctggagcagttccgggagctgctggaggctcgcggcgccggctgctctagcgagcagttcgaggaggtcagggccggcaggcgactgcggggatggggcagggcggtcgcccccaggggactgaaggaagaggtgggcatttgctttggagaggccaggcggggacccatatgaggtgtttccagcttttcaccaggcgtttgcttcgtttctctttaacctatgttagaggtctggaaagtctgcatcaggccgtccttgctctgaagagctggacaagcccatatgtctctctctgtatgttgtaatgcagacctttgtgcagttgattgacgctactctggagatcttctatcagattctcgaacagtttggagagaaaagagatgtaaggataggaggagtggcgctgagaaccattttttgtattgtcctgtccaggtttttacacagcaccttcccaattcagtgtgggcgccgaataagtgtggaaagacagtagtaacatgctggaaaggctcacattctaaaacctatcctcctcatgcaaaaactagcttttctaaaatacatactggtttgtagatccttaaagaaccatatattagactcatttaaaccttcataggatccgaaactgataggcaaataccaggtttcctgtgaatacttgtaattatgcagttcttcatataatcaccaagatcatgtctgctaagtcattaagagagcaaattgatttggcaacaaaatattttccttggaaggcattttgggagtttatttactgggcgcttcacttcgagttaagaagactgatccagggttacccagtgaatcattagtaaaacagactatcaactagatctcttgctttttttttttttctttctttcaacttttattttaaattcaggcgtacatgtgcaggatttggatttgcagatgtattacataggtaaacgtgtgccatggtggtttactcca

SEQ ID NO: 1243909 - DNA, 4001 bp, Homo sapiens
ccctgcactttttttttctttttaaattttggaggtcagtcccgctggctggcaaggcaacatctgtaaaaaagcactaggctggccgggtgtggtggctcacgcctgtaatcccagcactttgggaggccaaggtgggcggatcataaggtcaggagatcgagaccatcctggctaacatggtgaaaccccgtctctactaaaaattcaacaaattagccgggcgtggtggtgggcgcctgtagtcccagctattcgggaggctgagacaggagaatggcgtgaacccgggaggcagagcttgcagtgagccgagatcaggccactgcactccagcctgggcgacacagcgagattccatctttaaaaaaaaagcactagactggtggtccgagtccatattctgtcagtattcaggtgtgagggtttcaggcaaatcgcatcctttaaccccctcagctgtaacacagggacaccagcataaacttaatttgacaaatgtttcttgaggcctaacatatgcacaactttggtctacgtatcaaggactgtaaaggtgactggacccctttcctctgccctaaccttctaaggaaggcaaacaggtgcatcttgtactagaagcaggaatgactcagaccaaatgtactatatgacgggccataaaggaataaagtattgatgcatgctcataaaccatggatgaaccttgaaaacactatgcttaggggtggggggaagaaagattatttgggaccagggcataatgaagagatggttggaattattaaggaaactgtgagggtaggggcggggcgggatctcgtttatctgtgccctaagagcccccacaaaagtccggcacacagcccgtatcctagggcttccgacgctgggtaatgggtaacaagagacagaagacatgtttctccaatgtaagtcacgcagggcggtggtggatgacagagctggcccacagtcccgccagagccagagagcctagaaggatagtgcatgcagctcgtcccgcccaccgcacgggtttgatggatgtggggtggggatggggggggaaatagatgaataatgaaccaacgaacgacgcgcaggtggctactggctcgcgccagcggagagaaaggcgtgagcagcctcgctgatacctgcgaagccgctatagtgggacccaggctcgtagtgcctccggccggaggacacatcgtagacacggccgagcaacgccaagtacaggcccgggtcccctgggccgccgcggtagcgagacagctcctccggtatgaaaaggcgaaagccagcgcggggaccccaccagcccataagccgtgctgccattaccgctgctgcggctacagccaggcccaacaaaagcccacggcctccgcacctcaacatctatataggcccacccgctccgcacttccgaggttgccgcctctatctacagctaagatggccgagacgccgagcgtgacgtcatcggcgcgcgcgctctcgctctctctctcgcgcgctagtgctcgcgctccctcccttagtctctctcgttttatctgtattcctggcactggcgaaaagctcgctgtctgcgactttttccaggtactttttttttttttttctgagacagagttttagctcttgttgtccaggctggagtgcactggcggaatctcggctcactgcaacctccgcctcccgggttcaagcgattctcctgcctcagcctcccaagtagctgggattacaggcacgcgcccccacgtccggctaatattttgtatttagtagagacagggtttcaccacgttggtcaggctggtctcgaactcctgacctcaggtgatccacccgtctcggcctcccaaagtgctgggattacaggcgtgagccaccgcgcctggcccttctcgtacttcttggcttgcaggttgtcagccccaacaaagatggcggcagcggaggctacggaatgacgtagatactgagacagactcgtcctctgggaaatcaaggttgcaccctttgaggcggcgctccccgcctagctgtcgtgagttggtagaggccgcctatctacgtgacggcgcctttgcgacagcggtcgtcgcttgacggccaggaagccggaagccgcaggggccgccgtcgtctcctccgcgtccccgcccgccagctgctgtcggaggttgacaggtcgaggcggggaggcggcggcggcggctgcagagccaggcgcccaagacggagaccccatggggaacgctccgagtcacagcagtgaagacgaagcggcagctgccggtggcgagggctggggcccacaccaggactgggccgcggtctcgggcacgacccccggcccgggcgtcgcggctccagcgctaccacccgccgcggcgctgctggagccggccaggctgcgagaggctgctgcagcgttgctgcccacacccccctgcgagtcgctggtgtcgaggcatcgcggcgcgttgtttcgctggctggaagagcggctgggccgcggcgaagagtctgtcactctggagcagttccgggagctgctggaggctcgcggcgccggctgctctagcgagcagttcgaggaggtcagggccggcaggcgactgcggggatggggcagggcggtcgcccccaggggactgaaggaagaggtgggcatttgctttggagaggccaggcggggacccatatgaggtgtttccagcttttcaccaggcgtttgcttcgtttctctttaacctatgttagaggtctggaaagtctgcatcaggccgtccttgctctgaagagctggacaagcccatatgtctctctctgtatgttgtaatgcagacctttgtgcagttgattgacgctactctggagatcttctatcagattctcgaacagtttggagagaaaagagatgtaaggataggaggagtggcgctgagaaccattttttgtattgtcctgtccaggtttttacacagcaccttcccaattcagtgtgggcgccgaataagtgtggaaagacagtagtaacatgctggaaaggctcacattctaaaacctatcctcctcatgcaaaaactagcttttctaaaatacatactggtttgtagatccttaaagaaccatatattagactcatttaaaccttcataggatccgaaactgataggcaaataccaggtttcctgtgaatacttgtaattatgcagttcttcatataatcaccaagatcatgtctgctaagtcattaagagagcaaattgatttggcaacaaaatattttccttggaaggcattttgggagtttatttactgggcgcttcacttcgagttaagaagactgatccagggttacccagtgaatcattagtaaaacagactatcaactagatctcttgctttttttttttttctttctttcaacttttattttaaattcaggcgtacatgtgcaggatttggatttgcagatgtattacataggtaaacgtgtgccatggtggtttactccacacagcatcccatcacccaggtattaagcccagcatccattaggtattcttcctgatgctctctctccctccacccgcaccctattttttgtttttaatgtctcactacctccttcctgggatcctatttcttttaacaccacggtatgaccaaaaaggtacttattttgtgaaaatgagttagccagtcatgtagaatcttcagtggccacgaagggtgtgtacataaagcagtaaaccagcgggtacttgcagtgcctttaaaaggttctgttcaccttaaaatcagaggcttttaaaatattttaagaatgtcttcctgtacatggccagaattcagataatgtagtttgtgtgtttcttatgaaaaaagtacctttaaggcatcccaacccttaaaaataatagtcatggctgggcgcagtggctcacgcctgtaatcccagcactttg

SEQ ID NO: 1243910 - DNA, 4001 bp, Homo sapiens
tcgcttcttcatggtgacccatgagtgtgccagacgcatgcaaggccggtgggctgcaggtgctgacacacggctgacggcaccctccgaggacgcagtctggcacatctgcggctctgctacccacaatgtgcttgtgtgggtgccagcacctgtggggattggtggttccgagcgtctgaggccctagtatcccaatgtccctcttagcttcctgccactcccgactgtgtttctgggcttgggggctgctgagatagctgccccatcctcaggagcgctcctctaactccttagaagtgcttcctgctctttttcctccaaaatctgcttctgagttggaatcagggcatatcatggtggagctgggtcggtcccaggcttgggagaggccacagggagaagaagctggagatggagcaggcctggtagtcaaggatgcactaaagctgcccttccagagcgaggcttcaccccatctgcacatgacaaggctgccctgctctgtcctagatttgaccgctttcctctgccaagaagaggggcttgagggtgagcatggtctggggctcctctgcctgcacccccagggaccagcacgtgtggaaagagagcatggatttgtagctagagtcagtgactagctttcgagacttggacacatcacctctataaggatggtgtgtgtgctctaagcctaggtgtgtgaagaacggggcgctctgtgtttgtgggtctcttgggggcatgtagtgcctgaatgacccctaagcccaagccactgcatttcctccctaggtgggaggttttagggttaggccctgtctcctgaagcttctctcttcttcccctcaccctccaaactcagcagggattgtatcctaggggactgtttgcttctccactcacctgtgcctgccctgggcgctcctgctggcccgtgccctccagcgggaagggggcagctgggaacactggaccccccgggctctcctctttctcaacctctgctctttgctctctgttcttccaagaggctttgaatcccgcaagccgctgagctggagacagggttctgctcctctttgtcccgcttcttggctgagcctcggttttcccatctctaaaatggggagcccctgctatactacctttgaaaggccagaaaaatgtgtgtgtctgacagtttggctgggtgtctggggtggctggccgagcaaggagttctgaggccggggagaggagggggaccgaggtgctctcctgcatctggttcctagatcctggtgaacaccgcgccggagccagggaaggctcaacccaggcttcgttcaccccaaggcgccccacgccgcctgctccgccgacctcggaccggccccattcgcggctggggaggtggcgctggagctcggacccgggcccagccctcctctgcccggagccgctgccgccctccctgcccagggcccggccgggccgggcgacacctacctcaccaggatggccacccccacgtcctcgcagttggcatagagccgggcccacatagcctgcaccgccttcctctccgcctcggacagctcctcgctccgctccctgcgctcgatctccatctcgcctggcactttctccatgagcagctccaagcccagcccggctttgctcggcggcggcggtggcggggcgcggggcgcggggcgcggggcgccgggagccggggccggctgcgtgcgcggcgggcgggcgaggggtagagcgcggagggagggagcgtgtgtctgtgcgcgccgggtgtgtgtgtgtgtgtgcgtgcgtgtgtgcagggtatatgtgcggggggcgggggacagccagcggtggggcggggatgtggtctgctggaaaatgtttaaaaaaacaaatccgctccaaacccccagccccgtgtgggtaagagccaatgccggcaaggtgaaggctgcgcggggtgggggcgacgcgactgccgcccgcccacccgcaggccacggcggagttgcaccgcggggcggggctcgggtaggtgtggccggggcgctgggggtcccgggaggaatgggcggtcacgcggcgctgggcggcgcgggccgcacaggagtgcgctggggcgggcgcgggccgggagcgctgggttccgggtcccagtgcttgcggcgtcgcgagtgtgcgcgtgcggacccttcccgcggcggggaactgactcaaagtccaacactcccgagctttcgcggcgaggccgaccgccagcccgcccgtgggggcgaacaggagcccctccggcggccgccgtggacctagctgggctcccctcgcccgggcctctccccgcgcccccgagccagccgctgggggccgcggcgccactcccacggctctggacgcccaggctctggggggttagcacgggggtcgtccccctgcccgcccaccgccccggctgtcggaacttgagcgcacctccgacctcgggcgccagaggcctgcgccccctctccttccgcccagcacctccatgccctcggtgcacgaacgcggcggcggcggccagaagtcccccgtggcttatgaatgacacggacaggcaagaaccagccgctgccctgaattctagcccagctggtggcggaggaagtccagagaggcaccggatagggcagacaggacctggcagacaaaaagtcttgaggaaggcgcaggctgctggggacatctcagccgccaccaagggcccgattccgggcctgggggaggcaaatccttcctcctggtgggccctatccagggcagtgtgagattgggccagaggtggggggagaatcccatggtgcctgccctgcagcggctgctcagtcctggggacagcctgaggccagacagggcctggcagtgttgggaagagatgtcactcaggctcccggcgacccctgtcctcgctcaagacttgatgtcccattgcccaagcattgctaagggttggctctgcgctttcactatggttcatgtatttattcttaaaatccgactttaaggtccgggggaggcgaggagaactcaccctggccagcctcagctgcagcctgggcccctcctgggagctcagggttcaggtgcctgggggaccctgaggcagtgcctctgacactgtctcccccttgttgagggaatgaaaatctaatgcctcctgggggtcttggaggggctggaggggagcgggtgggttcaggttctcacaccactcccagacccatgtctcagcgtggccatggctggctccatgctccacacacacactgaacagcttctcaaagttggtgtgaccaagtggctgcccaacaggtccccttgggatgtggaaagaaaataggagaaatcgtgtaactatttcttttcatctcatcctttgcaaatgtaatatagtcgtatggtgtaggaatgaatctgtacagtagtctagcatataatttgtaagtggctgcacctgtctattttgtgagtgcacacttgaattctgccttttactgaagagggcgtgtaatcagaaaagtttggagaggattgtccagagggtaaaactgccagcccttcactgttgagtctcccgtctctctggcttcattatccaatattcctcccctttcttcctcctctcctgatgcttccacggtgacatcattgcttcacctccattcaccttgcagttactggcagatgctccatgctttcatgtcagtagcttcggcagcgtcttctgtctgagggctcatcctgccttgtgcactgcaaattcagaggcccttgctcctctttaaacgttgccctgatgcctgcaactctgaaagtgccctgtaggcgccttgaataactcctgggtcactctactgcagtcattgtacttgacagcacatttgtttagagtggcagctccttgcaagcaaggcccagtctcatcagatcgagactccgaatacgtgctcaatgcc

SEQ ID NO: 1243911 - DNA, 4001 bp, Homo sapiens
aggaaggtattggctgggcgcagtggctcacgcctgtaatcccagcactttggaaggccgaggctcgtggatcacttgaggtaaggagttcgagaccagcctgaccaacacggtgaaaaaccccatctctaccaaaaatatacaaaattagccaggcatgatagcaggtatctgtaatcccagctacttgggaggctgaggcaggagaatcgcttgaacctgggaggcggagggtgcagcgagccgagatcgcgccattgcactccagcctgggcaacaagagcaaaactccatctcacaaaacaaaaaagtaaggtatcaaaaaatttaatttaataaatcctagaactcaaagacttagcttgcatttcaaggtagtaacagaacctaagtgacaaaattttatcctgcgaatttggtttagaaaaataaagttaacatccgctttcaataaaagctaaaaactagaaaacaaccattttaagaaccttaactttttctaaaagctcacagtgacaacacctgatatagctgacatagctggggtttcccagcagcttctttctagcactccactgctgtttcgaaaggatcccagggactgggcgcagagctccacagggaagaaccattttctagccctagcctccttgagccaagtggcctgctccttcactcccagggaaagcctggagttccctcttcctccaaacaagccaaaacagcttgctcgcccctcctcccaagggggcaggctcctgtcccctgggtgaagctgccactccccgtgcctgccagctgcaaccactgtcagcttgcacagctgggccacgacaccccttccgtgtccaaaagagaggcttggtggcttggaagtcaattctctctcactttaccctcagtggctcagatctgtttgtttgctagccctttgtaatgctctgaatttttctgtacattgaaatattctccctcagtctgacagctggaaaggacccctagcattaaacgcgacgtacaattccaactccttttctatgtgtattgatggaaagaggactactcgtgcccaggaaaggttcccaagtccttaccgagtaaaacagaaactccacgggtggcaggcctagaggggagatcaccctgaatctgtcccgctgttttctgcccccctatttcaaacctcacggaagctggaccaaggaaattgactactggcatgttcctaagtctcaggcttagaagaaacgacactgaatgcctggatacctatccaaaagtgtagtggaaaaaccttcagaggagagcatagaatgcagacccaaaggacagacatgcagagagacagccacgcacacatcagctcctactgctggctgctgggtgggagaggcaggcaggcagcaacgcataatgggaaatctgctgacagggctccacacgccatccaccagcctcttacccacggtgagtcccctctcctgcggccccagtgtcctggccagccctgggcagcaacatcaaagcctcggcaggtcacagctctccacgtcagaggccatggtggctccgtgcagcgaccccacagtaccaggctgccgggagctcccacagctgtaggtgcagggagagccggagcaaggacagcatgtgtgcgccagcacagcaggggtagagaagaaggtgtccagagaaaacaaaagctgagagcaccggccctgcaggtggaaactcgctgggcccggtggggaaggctggcgcagagcgcagagatggacgcgcagagctgcagccctagcagacgctccgagtgtgtgctgctccgctcctccaggctcatttccatgaatgcagtcacagccagcccctcctactatcccccattcccggcctcccgggggggaggggaggcaccaccagcatttgcgcacaggctgcacttgctttcctctctccctcagaagcaaaagcctaatgcctgctttcactgcaagaatgccaaccttactccagatgccctctcctttctgcatggataaacaagagactggatctagggggtggatgttctgtcaccccaaaggcacaagcctagtcctttccactgccccgcatcaggtcagcaggcaaagtggcactgaccagactgctccaacaccgtcctggaggggcttcaggaggagtatcctttgctcccttcctccagggatcccatgccctccacttccacgagggacactccagccttttcaccaagaaggactcgcctcctactcagtacactcgcagccaccaatggttatttcttcaccagaggctgtggcatcgcctttgaggacacctgcctattatcaggttggaatgttaggcaagcgaaccttggggatgataatacaagatggctggtgacaagaaatatggctacagcctgaggatagcagctctcaaacctcagagggcacgagaatcaccaagggcgcctgttaaacacgcagatttgggaccccagtcccaaaagcatgaactccagagacccaggcccctaagtgacacagaatacagggttactgcagaccacacacagcttttgactaagaagggaggagatattttttaaacaattctaaaataaccaaggagagaaagtaaaagggaaatcaccgtgctagagcagggttcttcagtctgggcattactggcacagggagcaggtcactctttgtggtgggggcttccctgtgccttgcagggtgcttagctgcgtccctggcctctacccactaggtgccagcagcatccccatcccaattccccacaaccaggtttgacaaccaaaaatgtctccaggcattgctgaatgtcccctgcgggacaaaactgtcctggttaagaaccattgctctagataaacaatggaagagggggtggaaatcctaaaaacactcccataccctccctcctttccagtctcctgccgttaggaaatcagtcatggaaggcacccgcccctctgcaagccctgcctccactgccatgccatgggggttgggctggctggggaatgcaaacagacgtcctcatcaccaggcagtgccaccaggcctgacccaaataccctggctctgcgttgtatcttgtctttcaagaaacagccatagtgtgaacaattttcttttagtgtcaagagagtagtacttatttaaaagaatcatactaagtccatgaaaaacaaattctaaaattctacattctacaaaatgtatattgagagtcccagtgcaacacgtccctgggcccctgtcttcctccttctcactgtctagtaagccatcccacctctcctcccagtccaaggaagattccactttcccgggatccaccagagtactcagttacatctctttgcttctttcttcttgttcagaagctcatcctcaccatccgccatccgtcgagtcttacctcctacagggagaactcagattcctccagccatgctccctgctcagtttacccatattaaccatcacctgatgaccttctttatcacttggtaaataaccaggtgataaattacgtgatacaaacaaactcagtgaagacagcctggactatccacgctggttatctaccaccatgtttcccagggatttcatgtgagattaagctcttgcttttcagtaatatcttgtactgtaaatattctcatagcacttttcatagtcctaagggctgtcttattttgaggtgacatcactggtttttacacaaatacacatatacacatacacactctcttcagggattgaaagagcccagcaggtgagttctgacccgtgactctctacagaagactcagtcatcatgtgcaaggctcactatgactctctctttaacatggccagcttccactacgccgacagagtggatcacagccggggtttacctgtggtgtgtgaacctaggcaaaggctttagcttgacccaggccagagactgca

SEQ ID NO: 1243912 - DNA, 4001 bp, Homo sapiens
tgaaaatataagcaaacctggaaatataagcaaaaaaataaactcggttgaataaaaatatttttaaatcccacagagaaattctcataggaaaaattcagaagttccaggaataaagacgatcctaaaacctccacagaggttaaggagagtgattaatcagaccacccacgagggaagatctcgctggtgtcagtataagagcccgcacactaaagatagcgcagtggaactttcaaaattctaaatgaaaattatctgaaccccaaattctcagtcaagtaggagggtaaaacagactcatttcagatacataaggatcagaaagtttgtcttctgtgcaccccttctgaagaagctacttcaggagcaagatgtggatcaaggaacgggactgactcaggagcctgaggacagcaagcgccatcaactgtgatggccaacagccaccagaccgggtcagagcaggaagccaaagggctgccagaggaatgccatcagaaagaatgaaatcagactcgaaaccagagaatgaaggagaaagcagctgagaaaactgtgtgataccaacaggcatcattcggtttcctctcaagagaataaaaaggactgggcaacaggaaaaactcaactacaggaaatcacagaagaaatgaaacatgccccccgagtggtgtcctctgggccatcagggacgccaggaacagctccctttgagtgggcacctggctctacggtgagtggtatctacattcctgtcatggtgctggtcgctggtagttaacttacagaatcaccctgtagacaaagcatgaaagaccaacccaggctggagaagcaaagctatctgttaccaaggtgaaggaagagctgaccaaagtttgagggaagcaaagtggagagggcagcagggtcccaaatggtccccacagcttcctcctacaacactagagaccagaggcatggataaggatcatgaacaagaaacccacgctgtaaatatgccaaaggtaaaaatccaggaactgaaaattgtgatcaactaccaaaaatggacagtgagagaaggaaggaagagaatggtgtgagctgcatcctcatccatcataggcagaaggcaggagataacctttgatcttgacaaaataatcaccaatttaagaacttggcagcacccactagaagacctaaaagcagaaaaaagtgaattaatagtggctgctttggggagtgggtctgggaatagagagacaggacatataagcccctgaatacttgctttaaaatacatatatatatgtactatgacaatttgaaaacaaaagactaaaaatgtacaactatggtcactagaaaagatagcccttctgtgtccttggagtcagacagaaaacgcttctggccaatttgtagctagaataaataagacatttatctacatttattttgatccaatctcctgacatttgccacatgactgctaaattacttctccattccatacttactaactttaaatcataatgctgctccccttctggctcaaccaatcattcaagaactttattttaaaaagctgaactacacctcatttttctagtggaattttattctgagatgaggcaaaatctaatattttaataagtattttcctctgcataaacttaacaatgcaacatcaaatctttaattcaagccttcattctcatgctgccccggacagaaaaaacatccaaaaacaaaatgcttaatttcatttagcagcatgaagaatcaacactattgctggagagctgaggtgtgattgattcctacagtcttggctagtgtcttcaggacactgcgaaggccacagctggaacaagaaaggtggtggtcagaaatacccatgtctacctcacagcccgggagtttctgggaaagcaccgtccgcaccctgggaaacccgtctattcatgccgcttctctcctgtgtagccattagggttaaactgcaaaagaacggctcagatgggccagatggcagcacaacaaacagctcctccctcccccactgccacgtgctgcagccatgcttatgtgccagggaggcggtgtgccagggaggcggctgaaccccttgctctttaaaagaatggccactggggagggcagcaggttgtccctgccggcagcctgagcacaatggagacaaaccagagggggagccgccctgacacaccacccggtcgctcgccctcctcgcccattgccagaggggcacccggaatccatgcccacaaaggttaatctgcaaggtgtccggctggcagtcagggggacggtccagcatcagccccatcaccattcctttccagggttccaatttaatgaagaggattaaagtgacaaaaacaacaaggcgctattgtgcttggctgtgaataggaaagccacacaagggaagctttcatttatttatttatttaaatgttgctttgcagattttaacagtcggcagaaacccagagctgaaatgggttccagccagtggcatacaaaggaggactgtcttaaagggacagagccctctttccaagccagaggacgatacatgagcacacggcgggctctagtctaaaatcctgcaacccgcgctccaccggccacaggcagatgcccggggatatgccataaagttccacggaaaacgcagctctctgacagcaggttctgcttggcagacacatagcagctgccaggaccacactgtcctaaatccccgtgggtaccgtcaaatgaacgtgtccaaggcatgctttaggaccaggatgtctctttgaggtcatccagctggcaccagacccctctgcctagctttcaaatacatcacttgccttatttttttccactataatgattaaccagcatccttcttacagcctctgcctttcaatggataaaaaggtccatatttaaaccaacaatgcggggaaacattttataaagtaattaaggagtgagccctcatttgcggagaaggtaaatatacaaaaggtaactaccttagtcagagttgctcccaggccaaggaggtcattgccatttccttttcatcccctccagctggcctgctgccaacgggtgccctcctgctaatcacggccacacccctttacagacctggaagtttcataaacactgaatacacacacacacacacacacacacacacacacacacacacacacacacacgctccttctctcttaaccttaagctctgcctaaaacagcagtggcagtaatgaaataaagcacccagcttttctacagcctctacagaaactaccacctgctcagaggagaacaactggctatttacaaaccaggctttgggctcaaaagcgcgcatctgggaaaccatcttgttcctccaacctccaaagatacagtgatcatggcgtgagggctaagaaactccaaatatcctgagcactggttccagtattcagcacttactcgccacatacctgtgtcaatcctactagtcagaccttaaacaaaccagcgtgttcacctccctctgcactaccctatgggtgtaagtcactttgtctcccagaaaatcccagtgacttataatttgaaaaacttcaaaatactggaaacaactcaggctttggagacataccaatgttcaacaaactgctaatctctctgggcctcagttttgtccagctgtaaaatggcactgcagttattagcactgttgtgaggaatgcgtgatggaaaagataaagctgtgagcacaaataggtgcccaacaaatgccaaatgtctttcctttatctgcatacccaattcatcttcctcttttgcttctttctaacaatgtcatcattgacgcattcagcctgcatttactgcttgcctactaggtggaaggcagcgggggtacaacactgaagagacagatctggttccttccggcaggagcagcagtccctggaagcatccact

SEQ ID NO: 1243913 - DNA, 4001 bp, Homo sapiens
aaaagaaataaaaataattagcagggcgtggtagcccaggcctgtagtccaggttacaggaggggctgagaagagaggtgagaggattgcttgagccaaggaagcagagcgtgcagtgagctatgagagcgcccctgcactccagcctgcgcaagagagctagaccctgtctcaaaaacacaacaaaacaaacaacaaaaaaatgcacaagctgcttttacttgtttacttataaggtaacaagtgggctgggtgtggtggctcaggcctgtaatcccaacactgtgcgaggcagaggtgggaggactgcttgggtctaggagttcaagaccagcctgggtaacatggcaagaccccatcttttaaaaaagtaaaaaattagggctgggcgcggtggctcatgcctgtaatcccagcactttgggaggccgaggcgggtggatcacctgaggtcagaagttcaagaccagcctggccaacatggcaaaaccctgtctctactaaaaatacaacaattagacaggcgtggtggcacgcgcctgtagtcccagctactcaggagcctgaggcaggagaatcgctcagctcacccaggaggccgaggttgcagtgagccgagatggcgccactgcactacagcctgggcgacagagtgagactccgtttcaaaaataaaataaaataaaataaaataataaaataaaataaaataaaaaattagccgggcatggtggcgtgcgtatggttccagccactcaagaggctgacgtgagctacgatcacgccactgtgctccagcctgggtgacagagcgagatctcgtctcttaaaaaaaaaaaaaaaagaaaaatgtcccattagttattaaactagaattgggttccatttggccacagagttctgctttatttgtactttgctaccaaaccacaaaagttcaccacttgttctatttgccattcttccttttaattcctcatgaacaaacttaataaattaactacagcatgtcaaacaaccttttgcaacccttgcaatttcaaactcttggagggaggcacccctggcctgggccagcagcctcaacgcgcgggagcgaagggagcgggacagcggctccgcttgccaagtccccagtcaggggaggagcggcgtccccaccgcggtgcccctcgggctccacacccgcgtctcggcaggcggcgacgcaccggaccggcggctaccgggcccagactcccgcgggcagggccgtcccggagcccgcgcctcgccggcggcgccgctccccgttctcatttctgaacaaagacgtggaccgggcacaactcgctgacgccgagagcggccggaaactgcggggaacgcgggcccggccatccgcgcgtccgccccgagccccgcagaggggcggcagggccagcgacctccacccctcggccccccgggacccggactgcgacccctgccccggggaccccagcgaccccaacgactctcatccctcagagcccctgagatcctgccccgcgaccccaacgaccctcattcctcagagctcgcggcgacccctggccccgcgagaccgcgagcccggcctgtgacccccgccccagccacccacatccctcagcgccgccagcgaccccggccccggcgaccctcatccctcaaaaccccctgcgacccccgccccgcgagggccccgcgcaccgctcgcccgccggtcgccccgggctccgcgtcccgcaccagtgtccccgggaaacgccagccgccgcaagcgctgccggacggccgggcccggaggggactgggggacagcgagggggaagcgtccgccgccggggcgcactgaccgtagctgtcgtcctcctccatggtgcgggagccgggctccgcgctccggctcgccgctcgcgtcccgccgcgccacccgcgcccccgctcgcctcagcccggctcggagccccgcccccggcgccccgcgccccgcgccccgcccgcccgcgcctgcgcctgcgcccgccccctgcccccggcccgaggccccgcccctcgcccgaggccccgccttcctcccgcgcgcgccgcaccccgggtacccggcctcctcccgaggctccggcctgcgcacgcgcgtccacccgaggctcctcccctgcccccgcctctagaccacgcccccgtcccgagacacacacaccccccccccttctcccggtccgcctcctggggccgagcaggtttcggtttctgaagggcggtgcaagtccccggggtggcggactcgacctggcctgcagccaggctactgcacgaaagcccaaggtcgtgtccggccactgaagggcagggtggtccttgctgacgccaacctggaaggtcagacccggccccagcttgccagggagggcccggtccttggcgaaaggccacaaaagctatttgaagtcatttactcctgcgttcagaacctttacatgctgtatgtcctaagtttactgcttctacttctttttatttgtcctgagttttacctgggtcaagattgaaaggagggcacttcaagtcccagcgttttggattttatttatttattggagacgagtttcgctcttgttgcccaggctggagtgcagtggcccgatctcggctcactgaaacctccgcctcccgggttcaagcgattgtcctgcctcagcctcctgagtagctgtgattacaggcatgtgccaccaggcccgactaattgtatttttagtagagacggggtttcgccatgttggccaggctggtctcgaactcctgacctcaaataatccgcctgcctcggcctcccaaagtgctgggattacaggtatgagccaccgcgctcggccttctctttctttatgacagaggacaatcccactgctgcagaatgccagcaccagaacccccctttccccctgcagtcacttgtggctcctgcaccctacacagaacactcactgagaactccacagagatccctggactgctgggaattttttggaccaaccaaaaaacgggagtaaaagccacagaactctttccttgtgggcccacctgtcctgagttttactatttttctttttcttttatttatttattcattttgagacagagtctcactcgctgtgttgctcaggctagagtacggtggcaccatcatgactccctgcaacctctgcttcccaggctcaagcagttctcccacctcagcctcctgagtagctgagactgcaggcaccggccaccatacctggttaatttttgtattttttgtagagacggaggttgctaggttgcccaggctggtctcgaactcctaggctcaagtgatcctttctctttggtctccttccttggcctcccaaagtactggaattacaggcgtgagccaccacgcctggctggattcatgatcttaaccttcactgactttaccagattgtccagttttacaggtgaccttagagagtcacattttggccctaacgtgtccttgggcttcggcgtgtgaggtcagagacccagctgcattttgttcctcttggcctagacttaggacacttttagaattgaccccacattgacctggcaaatcttctcaaaccatctgtcacatgggctaatggagcactgagcctctcccccagtatttgccatcctctgtttcactccctacttcacttctaaccccagactcaccagaaggttcaaggtatcttcgagctggctttcttcccttatcagtatgcaagtcccagaccacctcagctcttgctcaaagaccagaactccagaagaaaagcgattcagatggcatgttaattcttactatcagcactctagacctcttagctgaactcaccaactgaatagatttggagagggagggatactggtattactgctaatcacagattagcagagaacatgactgtttacaaattctgttcccttatattgttcca

SEQ ID NO: 1243914 - DNA, 4001 bp, Homo sapiens
tgggtgcaagacctcaaaataaataaaataaaacatttttttctttcatcaatataatccataggttcacataatctaaaacatctaatgagaaaaggaggtcacttacaaagcagcaagaataaaaaagaaatgctgaagaaaacaaggagaaaatactgtaatttttcaatgtgttgaaggaaaaaaaattgacttaaattttactacaaggctgaaataaatatattcttagtttatcacacaaagcctccttttgaaaacactcttgaagttctccagagaaacagaagggggaaaaaaaaccaacaagagatgggaagaatgaataactcagtaaatgaagtggattactgtttaaaaggcaacaagccgatggcatatctgttaacaatccagaagtaaaagtagacggtattttttttttcttttttttgagacggagtctcgctcggtcgcccaggttggagtgcagtggcgcaatctcggctcgctgcaacctccgcctcctgggttcaatcaattttcctgcctcagcctcctgagtagctgggactacaggcacgcctcaccacgcccgcctaattttttgtatttttagtagagatggggtttcactgtgttagccaggatggtctcaatctcctgacctcgtgatccgcccgccttggcctcccaaagtgctgggattacaggcgtgagcagccgcgcccggccaactagatgatattaactaaaggggcagtacggagggaagtgccatgtgctaaaatacttacctaattaggtagcagtgtttaacttaaggattttattgtaaacaactatgaatgtattaatttatatatttaataagtcactctatcctgactccacatctgtctgttaatcttgttcataatatgactcttacttgacctttatcatgaatcccaaaacggtctatgatgctgcgtccatacacacacacacataaaaccactaagtgggcctggtgaagtggctcacacctgtaatcccagcattttgggaggcctaggcaggagaactgcttgaggccaggagtttgagaccagcttggccaacacagcaagaccccatcccaataaataaaatgaataaataagtacataaaaacactgagtgatcgaaaactccaacagggggaacatttttcggtcttctccaagagaccctggggcaattttcacctcacgtccctagttctgtcctgttacccacctaggtccggggcccggagcctactctcagccatggaactctccagctcgaggcaatcgtctcctgagaaaggacataacagcaactcaaccatcttcaccaacccttggaacttccatgcctcccgcccactactgtctcccaaaacgcgcacagaaacgcgactcctgggaacagcaagactcaactccattccgacctacatcccgcgactcccgccaggctcttgcccctcatgccctccgcctcctttcagactccgttcagtcaacggccgtgacctcttggccacctcctgtccatctcaatctccatacatccctccaggctgttgtcccctacgttcctctgccaccttcattcctcggtcccctcaactcctgtggctccttcccggcccctataccctcctcagcttcggcacctacccgctggtcacttcctaagccccctccacgactccgcacctcgcctcagctattaacgaccccttccgcctttctttctccccttcccggcatccgtaccctttcccggttcgctcatcaaatgccggctccttctcggcctccgtactccttcctcagaggcctccgtattacattcgcgagctccatgagctcttcccgattccacagtcctggttatctcagggcagctacagcatcaatctcttggcgttttcggccgcggcttcagtttaaatttcctgccggctccacccctaaaagaacgccgtagctgcgagatccgccctacggtgtccttggaaggacaatattagtttcgcgattcctctttccgttcccccaccgcctacgtcttctcaaaccgtctcttcatttcttggctcttcactggctagacggctttgccccttaatggccctcaagttgaggactagtggtcgctttttagtgattcttcacactgagctgcattgaaattcctagaagtttgaatactaaataacaaaataagcctaacacttgcagagcatttgcagtttacataaagatttcacttacacatcatttcatcttcacatttttgtccccctcccgttcttcaattattacctgcccaacaaaacttctcaaaagacgtatctttatccctcacttcccatcttttcttcaacccatctaattagactgctaattagagatcaaatttgatctaataagagatcattcagtggagagctggggacctccccacaaaaactgtacttatccaggtcaactgtgatttccacagtctgaaatactatccttatcatatccaacttatagatggactattccttctttgaaatactttcttctttttgcttccatgactcagcactctaccgtttttttccctatctcaatggttcctcctcagtcccctttgctggatccaaagccactgttcacctatatattttggagtatgccaacgctttagcccttatccctctcccttatctccctaggagatctcatccagctccacagctttacaattcagctctgccacaccttcagattttctgtagctctgacctgtctgatctccagactcacatattcaagtgcctactggctatttcaatttggatgtctaataggcacctcaggctgaacacattcaaaacagaacatttgtttcgctgcccctgtcaaaaaaccacctgttctccccccaggtcttcccctctcagtaaaatgttactgtttactcaaatgtcacaatcattcacccagttgctcaaaccaaaaacctagaagttgtctttcagtactttcccttgtgcccatccccactccaagaaaaaaatcctactaactctgcctccaaagtacatctggaatcagaccaccaccaccctagttcaagctgctatcatttcttgcctaaagtactgcggtcaattcttcacttctactcccgagtagcttcctatctctccccagtataatccattctccattcagcaaccagagtgatagtttttatatttatttatttttttattgagagggagtctcgctctgtcgcccaggctggagtgcagtggcgcaatcttggctcactgcaacctttgcctcccgggttcaggccattctcctgcctcagcctcccgagtagctgggattacaggtgcctgccaccatgcccggctaatttttgtattttagtagagtcggggtttcaccaggttggccaggctggtctcgaactcctgacctcaggtgattcatccgcctcggcctcccaaagtgctgagattacaggtgtgagccaccgcgcctggcccagggtgatattttttaaacactggtagaggtatatacagtacataaacttggtatctcttccagtgggactcctccctgaggaagcttatacatctcagccctgatgaacgaacgaagccttggccatatgacttgctttggctcatgaaaaaagaaaaaagtgacatcacttccaagcagaaactttaagaggcaagatggttcagcatgttcttttttcacatgtgtgacagaatttgtataataaaggtatctgcctcagcattgtttgcaataccaaaagatcaaaagcaacgaaaatattgattaacaacgggcagtaggttaaataaattatggtgtagtcatactgtgcaacactatgcaactccaaaaaatgaaaatactttaaaatataaatgtatttagggaatcctagccagagcaatcagcaagaaaaagaaacaaaaggca

SEQ ID NO: 1243915 - DNA, 4001 bp, Homo sapiens
aaagatcagtgcatattccttggatttgtttgtaaattgttcatgtatgtgtaatgtctggacaatgagaatccatagctttcatcagcttctcaaagtggactccaaagaggacctactctagagaaacaaatgtgctcctgaaaaactgtaaacaaactgtgaaatgttcaaatttcttttttacaagaccctcacatgtaaaccagaaccccttccgtacaaactgtgggtcacagataataaaacaggcctgtgcaacatctcacagctagtcaataaccagacaggaccacctggtttcttcccccctgcatcagccttgtcactgaacagttttattcttctttttttttctgagacagagtctcactctgtcgcccaggctggagtgcagtggcgccatctcggctcactgcaacctccgcctcccaggttcaagcaattctccagcctcagacttccgagtagctgggactacaggcgcactaagctacgcccggcttttttttttttttttttttttttttttttttttttttttgtattttagtagagacggggtttcaccgtgttacccaggctggtcgcgaactcctgagctcaggtaatccgcccgcctcggcctcccaaagtcctgggattacaggcgtgagccaccgcgcccggccagttttactcttcttaaatctgatgttcatggcataaagcaggagtagtggctttaaatatcactagccacagctttcagttgctctgatcgctatcattcacaactttgagtaaaaggaagaaagaaaattcttccaactgacttattcaactttcaaaaatgagtttgttgcaatgccagtttaaaagctcccctactacaccgtgcttctataaaggattctcaaattgatgtatgtccagcaagacttactactaaaggtcacacaactgtactagcacgaaacaagccaagagataaggccctgtcatccttctgtgttcaggaaacaacggcgggatcatgccacaggccaagatttccaaagagattgctttagagagaatggatatcaggaagcaagagcaacagtaattctggcagaagggctaggatccatgagtacccggggggggtgggagtagggggcggggaagcttgtacaatagatcgtcttaatagaaatctagtgtggccaggagtgcacgaccaccaatagaagcgcctgcattttccttcacagctatcactctctcttcccttccccgcccaccaacgaaagcaatgcggcaggagtggagagcacgggatgaataaatggagtatctttggggcgtaaacccggttttaagacctgtttccaccccgaaatagctgcctgacccaggcaagtcacaaaaccgtgcctcagtttccccactacactgccgactacacaagaatgctgcctggattaaaggagacagacaacgagtacgaaaccttcagcacagggccagacagaggaaccgctccgtggccctagggcgagtccgcaagagggttctgaggcctgggctccggcccggaaagggcgctcccggggcccgctccccgccagctgggttccgagcccctgcccggcccaccttgttgttgtactcctccacgaagctgcccagcgccaagcgaaagcgcttatcgggccgcacactccagttcatcgcgtagactgtccagggcgcttcatacttgtagatctccttccgtttgccgtgcagggacatggtggccacggggccgcagtacgggccgggtcaacagtgggctgcggcgggcggggagccgagcctgagatctatgggtccgaagggaggagaggagggggcgggcaggaacggcctaacccggaagcggggatgcggcgacaaacaacgacgacggccgagcccgacccctagtttcaaaccagcttgggaacggacgacaaccaccttccgttttgggacgccgccccgccctctcggaacggaagccgccggacccccgcagcggcaccggccgttggttgcctgacacgtcctttcgaaaggattctttcttgtcattggttattgcggccgtagcgtctgaaatctcctcgctattgggttaaatgtttgtcattgcaactactcgccccgcccaactctcggaggcaggcgctttggcagccccaaaggtcattggttggccaagatgtcagtcaggcagataacggctcagtgcgggtggtgggggcgtgggtggcctggaggcgagcgtgctgtagcagcgggcctccaagttctaggccaagtctctgagagtgaaaccgtctgtgacctgcgctgacttcccctccgctgctgctgttctgagcggcctctccacgctgtcgagtaaaagtacaattctgccttagtggaagacctactgactttcgcgggacagagccctgcggcctggcagcctggcctgcgcccaacgggtaccaccttcccgccccatctcttcccagggcccttttaacccgaaagctgctctctccgtgcctcagggacaggcttcgggcgcgcagatgcgctcagggccaggccagcttgagtcaggccctcccgcgctttcctgcaggatctagaaatgtccccgaattctggggtaggcaccgacccgaccagcttggctctgtttttgtcagttcccatcctgtacccttcccgccgtggatcccaacgcaaatgctaatccagccccaaaggtatctgtgcctgtgagttggaaaaggggaagggccagagaccaaatgacacctttatataaattatttccaattctcagctttcatcaaaattgaaggaggtttgtattgaattgttggatgataacattaaatactttttttttttttttttaaagacagggtcttgccctgtcacccaggctggagtgcactggtgtgataagggctcactgtagcctggactgcctaggttcaaacgattcccccactttagcctctggagtagctggaaccacagacatttgccaccacacctagctatttttaaattattatttgtagagatgagatctctccatgttgcccaggctgatctcgaactcctgggctcaagcgatcctcccacatcagcatcctaaagtactgggattacaggcttgagccaccattctgggcactaaatataatttttaatgataaatgatttttccacctcccaggttcaagtgattctcctgcttcagcctcccgagtagctgagattacaggggtgcaccaccacagccagctaatttttgtatttttagtagagatggggtttcaccatgttggccattctggtgtcgaactcctgacctcaaatgatcttccagcctcggcctcccaaagtgttgggattacaggcgtgagccaccgcatctggccaagaaatcctcttttttttttaattttattttatttttgagatggagtctcactctgtcgcccgggctgtagtgcagtggcactatctcggctcactgcaacctctgcctttagggttcaagtgattctcttgcttcagcctcctgagtagctgggattacaggcgcccgccaccatgcccagctaaaggaaatcccctgtaaggaggaaagtttaaaaacaaatttaaaaaggaaagaaaaagacgtacaaaattcgcggtaccttgtcttattctaataaaaaataatgatatttatccacagatataggaactaacggggggaggaaattttctcttttatgacgtatatttccaataaaattttagtttttattagaaaattgaatatatatttatgttgttttgaacaactgtactactaatagatgtaacccttaaagccttattaaggttacaaaaattaattttaaaatgtcaattaatttatacacattcgttttgaggcagggtcttgctctgttatccaggtggtggtgcagtggggcaaacagtgcttattg

SEQ ID NO: 1243916 - DNA, 4001 bp, Homo sapiens
taaagctatcaatctaaaactgtgccagcaggtaattttctttttcttttcctttttttttttttttttttttttgaaacagagtcttgctcttgtcacccaggctggagtgcagtggcacgatctcagctcactgcaacctctgcttcctgagttcaagtgattctcctacctcgacctcctgagtagctgggattgcaggcacccgccaccacacccagctaatttttttgtatttttagtagagatggagtttcaccatgttggccaggctggtctcaaactcctgacctcaggtgatctgcctgcctcagcctcccaaaatactgggattaccaggcgtgagccaccgcgctcggcctcccagcaggtaattttttctttctttctttcttttgagaaggagtctcactctcttgcccaggctggagtgcagtggcacgatctcggctcactgcaacctcagcctcccgggttcaagcgatttttctgcctcagcctcccgagtagctgggactacaggcatgcaccaccatgtccggctaatttttttgcatttttagttgacacgggggtttcaccatgttgaccaggctggtctcgaactcctaacctcgggtgatccaccctcctcaacctaccaaagcgctgggattacaggcgtgagccaccgtgcccggcccagagggtaattttcaaaacaaagctaagttcgtggcttgcctgccttcagctatcagccctcttcttctctccttaaggtacaggcaccaagaggggctcggagaccatttaaacgttatttaccaaggggacagattcagaccttggtgaagacagacagaggaggatttggtgggaatttagggccctgctgagacaaaaaccacccgaacccgtctgtccactttctatccatctaccagatctctagcatttcacccctttccccaggcctatgccagcactgtgccacaccaactcaatcttgatttattcaggtaaaatgagcactctccctcctgcaaaaacaaacacgtttaagacataaaacatattcaaaggcttccatttcctcaccgttagaattgagacttaatgtcaaagttcacttgggtaggttgaatcattttcccacaactaagggagagtgaaaaatctttgaaaactctgtaagcaaacacctgaaatgccaacgcctcctttgcggagctggggaaggaagagacgggtggccggatggcctccctcactagttggtgggcgtgagatccacgccgccccagtcccgggggccttcactaaaaccttaactggcctcccaggggagagggaagcggaggagaggggtctgaaaatcggagatgatcactcagctcaacagtaaagcactttatacccaccctatgggacagatactgtagctttattcccatttttcagatgagcaaacttgggatcggaaagataccccaaggtcacacaactgaagtggcagaagctagattcaagaatcaatcggcccgcaaagttctaaagggcagtggctttggtctgatcctgagtttgaatccacaatctccagccctttctagctgtaaaccttcctgcgcgtcctcagccgtaaaacagaggaaataacacgttgcttggtagggttgctgtcaagacaatgggccgtggatataaaagcacttgccttagtgctggccgcatacgacgcgctcaatacatcgtaactcaggctttcaaaagaggcccgtacgccccactaggccgcgaaattgggtcgcccggggcggtggcagccccgcgtagcagccgcggccagggcccgccccctccccggcgcccggctggctctcaccggcccgcgtggcgcgctacgtacccagcgcctccgccgtggcccaggcctccgcctctagcccaatctccgcagcgcttacaggccggctcagcgggcgaggcgggacctcgggagcgcgcgcctgcagaccggacgtccggccagcaggcggggccgggagaggttggacgggcggggccgggagaggttgggtgggcgggcggggccgggagaggttgggcgggcgggcgggcggggccgggagaggttgggcgggcgggcgggcggggccgggagaggttgggcgggcgggcgggcggggccgggagaggttgggcgggcgggcgggcggggccgggagaggttgggcgggcgggcggacgcgggagaggttgggcgggcgggcggacgcgggagaggttgggcgggcgggcggacgcgggagaggttgggcgggcgggcggacgcgggagaggttgggcgggcgggcggacgcgggagaggttgggcgggcgggcggacgcgggagaggttgggcgggcgggcggacgcgggagaggttgggcgggagaggttgggcgggagggcggccggacggacgcgggagaggccggcggggagagctcggccccggagcacggcacagaggtcccccgcaacccccgacccggagccataaattttcctttccccggagccgggaaggagagggagagagaggagaggggcaaaactgcagggtcctaacttcggatataaagctcggccactcgctacttgtgcagccttggcagaggtgatcatgagcactttccacctgccaggtcctaagagcactttgtgggattatctcagcccgcacagtccgcagggtggatactatcatcatccccattttacacaacaggaaactatgtttagcggttaatccatttgccctctcatacaaagtcatgtgattgcagagcccgcatcctgtccatacaagcctagcaagccactcagcctctcatcctgtctcctctcaaagtggggataatcgcagccgtgcagcgttgttgaaagaatacataaaagccgggcacggtggctcacacctgtaatctcagcactttgggaggatcacttgagcccaggagttcgagaccagcctaaacaagagtgagactaacccccgatctctacaaaaaaaaaaaacaaaaaacaaactagccaggcatggtgacagtgtggtctcatttactcgggaggctgaggcaggaggatggcttgagcccaggaggtcaaggctgcagagagccatgatggtaccactgcactccagcctgggcaacaaaacgagaccttgcctcaaaaaaaataaagcatctaggccgggcgctgtggctcacgcctgtaatcccagcactttgggaggccaaggcgggtggatcacctgaggtcaggagtttgagaccagcctggccaacatggcaaaatcccgtctctactaaaaatacaaaattagccgggcgtggtggtgaatgcctgtaatcccagctacacgggaggctgaggcaggaggattgcttgaacccgggaggtggaggttgcagtgagcccaagatccggtcactgcactccagcctgggagactacagcaagactctgtctccagttaaaaaaaaaaaaaaaaaaaaaaaaaaactagttatctagttatgcctcacatatagcaggaagttgtttttgttttttttttgtttggtttgtttgtttgtttgttgagacagagtttcgctctattgcccaggctggggtgcagtggcaggatcttggctcactgcagcctctgcctcccaggttcaagcgattctcctgccacagcttcccgagtagctgggactagaggtgtgcgccaccacatccagctaatttgttttgcttttgagatggagttttgctcttgttgcccaggctggagtgcagtggcatgatctcggctcactgcaacctctacctcccgggttcaagcgattctcctgcctcagcctcccaagtagctaggattacaggcatgtaccaccacactcggctaattttgtatttttagtagagatggggtttcaccacgttggccgggctggtctggaaatcctgacctaggtgatcc

SEQ ID NO: 1243917 - DNA, 4001 bp, Homo sapiens
ggcacctgtagtcccagctacttgggaggctgaggtaggagaatggcgtgaacccgggaggcagagcttgcagtgagccaaaatcgcgccactgcaatccagcctgggcgacagagcaagagagcgagactccgtctcagaaaaaaaaaagaaagaaagagttgactatatttagttctgtgttttatttgtgttttctttccctgagtcagatgggaactgtttcttcccgccctgccattcttcccatgttgagatctttcccaaaggcaaagatcatttccctttttggccatggagcactctgatggtaagaattagtcctctcatcacccaccacactcaacccgaataggaaatttccaagaatgggaaccatgtctttgggcacttaggcgagattactcaatcaaaagagtgagactcagggactgaaacattcaatcaaggttaaaaacagattaaaatgtggcagttaccttttttcccctgatatagaatacgcactggagtcacagttaccttttagtaactgatttccttgagtgaatagtgtatcagaaaatgggacttttatggtggcaaagaattcagagggcctggggcacacagatctggatttgtataccgatttgccacttaaccagctatgtgactgtgcaatttaccaacctctcagggccacattttttcatctgtcaaaaaggtcaatatggccaggtacggtggctcacacctctaatcccagcactttgggaggccgaaatgggcagatcacgaggtcaggagttcgagaccagcctgaccaacatggtgaaaccccgtctctactaaaaatacaaaaattagccaggtgtggtggcgtgcgcctttaatcccagctactcaggaggccgaggcaagagaatcgcttgaacccaggaggcgaaggttgcagtgagccgagatcgcaccactgcactccagcctgggagtcagagagagactccgtctcaaaacaaaacaaaacaaaacaaaggttgaataataataataggacctatattgtagacttgttgagaggattaaatgagataatgtacgaaatgccttactacagagtctggcacttattaaagaaagagttgatgtgggctgggtgccgtggctcacgtctgtaatcccagcactttgcggggttggggtaggaagatccttagaggccaggagttcgagaccagcctgggcaacaaggcgagaccctcgtctctacaaaaaatatataaattatccgggtgtggtggctcatgcctatagtcctaggtacttgggaggctgaggtgggaggataccttgattgcagtgagctgtgatcttgagccattgcgctccagcctgggcgacagaaggcggccgtatttaaaaaagaaaaaagaaagaaagaaagaaaagaaaagaaaaaaagggtcgttgtggaaaattcttgtggggaattaaagggaccacgtgtgcgcgaaagagcttggcgaagataagtacctggaggccaagatgaggcggcgagccctgcctccctagcagtgtggtctcctggcttagggtcagtgcttcgcacaaaaaaatccactgcctctcatgagaccttgaactgccaatgaccgcaggttgcccagactcccgagtgaggaaggcggccaggagtcaactaggcttcttgcggaaaagcccactctaagaaggcctggggcattccggctccaggcaggtagcacccgcgggcctcaggccctttcacttacccgggaaacgtaacggtccttaacggcagccaataacggctcccagcggcccaggcactggcaagggcaggctgaaatcaaacctcggattttggaacctccacgcctgaaaccctaaaccagcatcgaactacaactcccatcatgccaggcggccgcccggttcccaagggtcggtcccaccaaccttgcgccccttctttcctcaaagcgtggccgaatgcctaggcttccgggtatcagtggccccgcctcttaatccgaccggagccgtccctcgtgattcctgggtattgtagtcagtttcctgggaaagagtcgctcctagtggcagctcgcttcgccagaaaaactacaaaacccagaatgcagcgcaaattccccttgtccaataggaaccccccatgtagtggggcgcggagccctgctctcgcaactcaagatggcggacgagagtgagacagcagtgaagccgccggcacctccgctgccgcagatgatggaagggaacgggaacggccatgagcactgcagcgattgcgagaatgaggaggacaacagctacaaccgggggtaacgaaatcctcggagtccaattcccgtccagcctcccacaacctgggtctctggggtgcggggaagtcaccgggagcttagtctagccccaccctcatgttcttattggctaagtcactaggattctgcctggcgattggttattgcctttgtcatttaccaagggtgggtgctctggatattaagggccggagacgttcagtacttttattatataaaagttctatgcagtgttccactcgtgtgcttcaggccattcctgggaaaagagcatgttggacgatggttttcgatggtacaacacaggacagtctagtaacagtacagttcaaagggaacgttacttatagacgtgttgtttgaacaacgtgactagcaataaacgaatcataaaacatttcgcagcagttcaccctcagtgaggaaactcatcagactatacaaactgtatgtataattatattgtaaaatatcactaccagagaatcccaaaatataaactcaccttataaacctatgtaattaacggtatggtaatgctttgatttacatagtttccattgctccaaataatccataagtatcctgaacgatatattaatataattaagtcttcgaacatctttgccttgttacctttgcagagcagccccaggcttcaagaaatgagcgatgttgtttcttggagagtatttggaatcctcgggctccatactgcctatcctgtactttagggtcttgccattagttactatttgttcctagggatgaagaaacacaccaggcatttgaatgttgaattcttttcccaaattagtttttacttctgtaagccacagcttattcatctttcttcacatggttagtgcctggcactggcactcacgctgtctctccccatcttcctgtctatatttgtagatatatttttaaactgaaagtcgtgagagatttttgggtgtataacttgctgagtctgaggtagtctgattttcgtagccagcttgttattcgcagtattggtggcagtgcagatataaaggtataaagaccaaggactgcgtagaagagatggtcccacaagattatagtacatatttttattgtatcctttctatgtttaggtatgcttagatacacaaatacttaccattgtattatagttgcctgcagtactcagtaacatgcagcagcctattgctcctaggctacaaacctgtatagcatgttactgtaatgtacaccatatagcctaggcatttagtaggctataccatctagatttgtgtaagtacaccctataatgttggcaaggcaaaaatcacctaaccatgcatttcccagcacatatgcctgacgttcagtgaagcatgactgtatttaagtggtttataatctgcttgtggtaaatcttaggttaaaagatctagcttttatgttcttcagccggcattaaaaatcacaggaagggccgggcatggtggctcatgcctgtaatcccagtactttgggaggcagatcacgaggtcaggagatcgagaccatcctggctaacactgtgaaatcccatctctactaaaaatacaaaaaatttagccgggcgtggtggcgggcgcctgtagtcccaactactcgggaggctaaggc

SEQ ID NO: 1243918 - DNA, 4001 bp, Homo sapiens
atcaaatcaaatggtgtatatttagacttcactgcaggtttaaatgaggattttaacagctttattttaaaatatcaacattcacaattaaccagaacttttatcctctgtaatcttcaaaataaaaatgtgaaagtttcaatctaaagctatcaatctaaaactgtgccagcaggtaattttctttttcttttcctttttttttttttttttttttttgaaacagagtcttgctcttgtcacccaggctggagtgcagtggcacgatctcagctcactgcaacctctgcttcctgagttcaagtgattctcctacctcgacctcctgagtagctgggattgcaggcacccgccaccacacccagctaatttttttgtatttttagtagagatggagtttcaccatgttggccaggctggtctcaaactcctgacctcaggtgatctgcctgcctcagcctcccaaaatactgggattaccaggcgtgagccaccgcgctcggcctcccagcaggtaattttttctttctttctttcttttgagaaggagtctcactctcttgcccaggctggagtgcagtggcacgatctcggctcactgcaacctcagcctcccgggttcaagcgatttttctgcctcagcctcccgagtagctgggactacaggcatgcaccaccatgtccggctaatttttttgcatttttagttgacacgggggtttcaccatgttgaccaggctggtctcgaactcctaacctcgggtgatccaccctcctcaacctaccaaagcgctgggattacaggcgtgagccaccgtgcccggcccagagggtaattttcaaaacaaagctaagttcgtggcttgcctgccttcagctatcagccctcttcttctctccttaaggtacaggcaccaagaggggctcggagaccatttaaacgttatttaccaaggggacagattcagaccttggtgaagacagacagaggaggatttggtgggaatttagggccctgctgagacaaaaaccacccgaacccgtctgtccactttctatccatctaccagatctctagcatttcacccctttccccaggcctatgccagcactgtgccacaccaactcaatcttgatttattcaggtaaaatgagcactctccctcctgcaaaaacaaacacgtttaagacataaaacatattcaaaggcttccatttcctcaccgttagaattgagacttaatgtcaaagttcacttgggtaggttgaatcattttcccacaactaagggagagtgaaaaatctttgaaaactctgtaagcaaacacctgaaatgccaacgcctcctttgcggagctggggaaggaagagacgggtggccggatggcctccctcactagttggtgggcgtgagatccacgccgccccagtcccgggggccttcactaaaaccttaactggcctcccaggggagagggaagcggaggagaggggtctgaaaatcggagatgatcactcagctcaacagtaaagcactttatacccaccctatgggacagatactgtagctttattcccatttttcagatgagcaaacttgggatcggaaagataccccaaggtcacacaactgaagtggcagaagctagattcaagaatcaatcggcccgcaaagttctaaagggcagtggctttggtctgatcctgagtttgaatccacaatctccagccctttctagctgtaaaccttcctgcgcgtcctcagccgtaaaacagaggaaataacacgttgcttggtagggttgctgtcaagacaatgggccgtggatataaaagcacttgccttagtgctggccgcatacgacgcgctcaatacatcgtaactcaggctttcaaaagaggcccgtacgccccactaggccgcgaaattgggtcgcccggggcggtggcagccccgcgtagcagccgcggccagggcccgccccctccccggcgcccggctggctctcaccggcccgcgtggcgcgctacgtacccagcgcctccgccgtggcccaggcctccgcctctagcccaatctccgcagcgcttacaggccggctcagcgggcgaggcgggacctcgggagcgcgcgcctgcagaccggacgtccggccagcaggcggggccgggagaggttggacgggcggggccgggagaggttgggtgggcgggcggggccgggagaggttgggcgggcgggcgggcggggccgggagaggttgggcgggcgggcgggcggggccgggagaggttgggcgggcgggcgggcggggccgggagaggttgggcgggcgggcgggcggggccgggagaggttgggcgggcgggcggacgcgggagaggttgggcgggcgggcggacgcgggagaggttgggcgggcgggcggacgcgggagaggttgggcgggcgggcggacgcgggagaggttgggcgggcgggcggacgcgggagaggttgggcgggcgggcggacgcgggagaggttgggcgggcgggcggacgcgggagaggttgggcgggagaggttgggcgggagggcggccggacggacgcgggagaggccggcggggagagctcggccccggagcacggcacagaggtcccccgcaacccccgacccggagccataaattttcctttccccggagccgggaaggagagggagagagaggagaggggcaaaactgcagggtcctaacttcggatataaagctcggccactcgctacttgtgcagccttggcagaggtgatcatgagcactttccacctgccaggtcctaagagcactttgtgggattatctcagcccgcacagtccgcagggtggatactatcatcatccccattttacacaacaggaaactatgtttagcggttaatccatttgccctctcatacaaagtcatgtgattgcagagcccgcatcctgtccatacaagcctagcaagccactcagcctctcatcctgtctcctctcaaagtggggataatcgcagccgtgcagcgttgttgaaagaatacataaaagccgggcacggtggctcacacctgtaatctcagcactttgggaggatcacttgagcccaggagttcgagaccagcctaaacaagagtgagactaacccccgatctctacaaaaaaaaaaaacaaaaaacaaactagccaggcatggtgacagtgtggtctcatttactcgggaggctgaggcaggaggatggcttgagcccaggaggtcaaggctgcagagagccatgatggtaccactgcactccagcctgggcaacaaaacgagaccttgcctcaaaaaaaataaagcatctaggccgggcgctgtggctcacgcctgtaatcccagcactttgggaggccaaggcgggtggatcacctgaggtcaggagtttgagaccagcctggccaacatggcaaaatcccgtctctactaaaaatacaaaattagccgggcgtggtggtgaatgcctgtaatcccagctacacgggaggctgaggcaggaggattgcttgaacccgggaggtggaggttgcagtgagcccaagatccggtcactgcactccagcctgggagactacagcaagactctgtctccagttaaaaaaaaaaaaaaaaaaaaaaaaaaactagttatctagttatgcctcacatatagcaggaagttgtttttgttttttttttgtttggtttgtttgtttgtttgttgagacagagtttcgctctattgcccaggctggggtgcagtggcaggatcttggctcactgcagcctctgcctcccaggttcaagcgattctcctgccacagcttcccgagtagctgggactagaggtgtgcgccaccacatccagctaatttgttttgcttttgagatggagttttgctcttgttgcccaggctggagtgcagtggcatgatctcggctcactgcaacctctacctcccgggt

SEQ ID NO: 1243919 - DNA, 4001 bp, Homo sapiens
ggaggtgacctttcaccacctcccacctccctgacagagaactggccaggcctgaaaacctcaggagtgggagccacgctcccccttggattggaatgtgaatgtcatgggtctctgcccgcgttccacacctggccccaagcccccagctacctgctggcagcctaggaatagcacatagtctgggcagcagaatcaggtttattggagggattgggggtaggatgagcacggcatggggcttgaggtgtgtggagggagctcagcaggcccagaagcccccttccaccggcaaagtggaacccgtggtcatgccacttcggtcactcagcagaaagaggatggcgttcaccacgtgctctacctctgtgggcagggcgggggtcaggggcatagaggaaggaggctgccgcccatctttccctcccacccctacccagggcacacacagggactgctggcaccacgctggctgggctcccacctgactcaccagcaaacttgccaagtgggattcggttcagcatagtcttggccttgtgggggtcactccaggtggcctggcccatggacgtcatcaccactgtggggtttactgcattcactcggatctacaccgggacagctggggtcagcagggcaagtggggtgtcctaggttgggggaggtaccccagccctgctcaccttgtggggcccgagctctagggccatcaccttggtcagcatgtccagggcacccttggtggagcctacgaagaggaacccaagctggctggggctggggtcggtgatgagggcgaggctggggctggggtggggctgagggcacagctggggcactcacagtagacgctatggttagttactgcccgctgggagcactggctggagacattcacgatggcccctgggactccccgggctattaagcccctggccacaatctggaatcgcagcgagaccgtgaggcagagctggcatcactcacgagaattcccgtccagcccacagggcagctcacctgcgacacctggatgaccgcacgcaggttcacctcaaaggatctagaggccgagggacagaccctggtcagagattagggctgctgcgtcctccaggacagcccctccctgaggttcctccgccctcacaggctcacctgtcaaaggcctccttggtgacctccaggaagggctgcagcagggcgacagcggcgttgttcaccagcaggtccacggggcccacgctgcccagcgcccgctcggtggcctcccagtcacccaggtccacgcacacgggttctatccccgggcactgtgtgtatcagggggcagttaccagaggctctgtgcccagcaagcggcacagctggggactggggctggtgacctttcagccggacaagtaaaggagttaggagttccgaaggtgtcgggactgtggggccagcagccgggcgctacctccggccggttcacttcctccctgcgcccgagcgactcctgcccggggcctgcttcgcagccatttcggcctctttctgagcccgggggccccggcggctctgccgaccacccggccgcccacgcaggccaccagccccgagagagggtgcgcgggcgcccaggccgcggtgagaagcgcagcgcccgcgaggggaggcggagtcgcgcacagaggtaccgcccccgctcgctgccgccccctcctggctcgccgcctcgcagcgctgggacccggcgggacctacctcgcggacaaggctgtcaagatccgcctgagtccggctcacagccaccacccgcgcgcccgtcgcgtgcagcgcctggaccgtgccgcgccctatacctgccgggagcgggctcagtgaaggcgtcccctgcccgcctctgcccgccgccggcctttgcccacctttccccgccgcccacctttgcctgccccggtgaccagcacccggcggcccgcgaggaacagctccatgtcggcgcagtctccgccctccgcactggggctgcggaacttgaagctctggccacgatgggcggggcgcggcggggccaatggcagggcggccttcagataggcggtggggacattcaaatagctgctccccgctgcagtgattggccgaaaggagtgggcgcgccggggcggggcggggtctccgctgcctcagggacgggtcttttgaagtgcctggtgtgacccatcttccgtgcttgaaatcgacgtagtggaccctggctagcatatttttccctgccaagattattgcaaaaagacgatgtggtggttaatatcggaaagaatgtgtggttaatatcaggaagaacacgtgaaatggagaatttcagggctaacatttcttgttttgtttctgaaaacatcggcatgtcctaaaaagtgtcgcctgtgcccatcatctctcaggcttgggagcaggacaccgccggctcactttaaagccaagggaaagaatttggacaaccaactacgtctggagaagacaccaatgtcagcagagctccgctttcatctgtgggcgaaggattacctagatgccaaggcaagagactgaagacacaaactgtttcagtataacaaagaaaataggccgggagcggtggctcacgcctgtaatcccagcactttgggaggccgaggcgggtggatcacgaggtcaggagatcgagaccatcctggctaacacggtgaaaccccatctctactaaaaatacaaaaaattagccgggcgcggtggcgggcacctgtagtcccagctactcaggaggctgaggcaggagaatggcgcgaacccaggaggcggagcttgcagtgagccgagattgcgccactgcactccagcctgggcgacagagcaagactccatctttaaaaaaaaaacagttaaaataaaaatagtcataatacaaattagatataaaaatgatcatgatcatggataattatcaatcattagtataaacattattaatcattagcttttaatattactctttgttgcattactaatataacctagggacattgtgagaagtgacctagaaggcaagaggtgagccctctgtcactcccgcataagggctgcttgagggctccttggtcaagcagtaatgccgttgtctgggaagccacccgttacttagaagactgcgaaggggagtctcctttccttggaggcgtcagggaacactctgctccaccagcttcttgtgggaggctggatgttatccaggcctgcccgcagtcatccggaggcctaaccccctccctgtggtgctatgatttaatggtcacatttcttgtccacttccatgttcctcccgtactcctggttcctctttgaagttcgtagtagatagcagtagaagaaatagtgaaagtcttaaagtctttgatctttcttataagtacatagaagaaagcgctgatgtatggtcttctctttctgtttcagctacctaaaagggaagcgccccctgtcctatgatcacgtgacttgcttcaccttgtcaatcacttggaagattcaccctccttaccctgccctccttgtcttgtatgcaataaatatcagtgcgcccagccattcggggccactactggtctccgtgtcttgatggtagtggtcccccgggcccagctgttctctctttatctctttgtcttgtgtctttatttctcacaatctcgtgtctccgcacacggggagaagacctgctaagccccatagggctgtaccctacattcatctgaaagggacttgaaccccaggtcaccttggacagccagcatccggccaggggcaccttttagaagttgaataggataggaagggattggggtcatggaagtacatggtggtccagcaaagaccagcattgcttcccgaggctttggggtcagttacagatgcgtgtgtgtgtgcacccacacactgggcctccatgtaaaagctactttgttctgtgggtc

SEQ ID NO: 1243920 - DNA, 4001 bp, Homo sapiens
ctttaaatatagtggactaaaaacaactgattatataagccacattactttatcacttgtatttttggaggtggaaggaagagttctagtgacagtgattagcatctactctacatatactttgagagtacctcacacactatatacaggtcagttctttgatgagaatctaaataaaaactcaagaacgtaatcacattcttctaaaccaaatacaagtaaatgctaggttatggttattttagaagcatcccttctcctgtcagcttaaagcaactaagagctgattatatgactatcaatgtaacaaaacaaatttaaataactgcactcctctcttatattaaattgttacaatataaatcagatattatcattcctctgatcgaaaccctcagatccttcctaagtaacagcctaaaaggctttggttgttccgctcactcccttcccccaattcttccctgaccttatctcctaatactccctcagctcacagtgctccaaacgcgttggtcttcacactcttaacgggccagctttgtcctcctcaaggcttttatgtttgttattctctagcttggaacgttcctttccccagataaacgtaggctctcactccaccttctagtccgcttaaatatcagcttgtctgtatggacttccctgaccactttattgcaaattccaacaccaccacctccccaaccccctttccagctttcttttccctaagatactgatcatcttctaacattcagtataatatatgtatctgtttgcctctcctcccgctactagaaagttaagttccccaaaggcaggggtctaacacctatccctatcacctagaacggcgctagagaataggcaccaataaaaataccccttgaatgaacgaattgcacattaggctacacaatgcttcttccaggtacaggaagatatattttcttttcccagctgtcaaaatataaacattaatttttgtacgaaacactcattgctcacctcttatgtgccagaaatgagcttggctctgcaaagcgccttaagacatagtccctgcgcttgaggaagtcctgggtgtgtatacgagagaggacagacatagaaacatcattgacaaaaagaaaacacagggaagccacaagaaattggataactgcctataggagtgggggcaagagggaaattctcagtgatgagaatgtaattccccaaaactctcgacagcttctcctgtttttgatgcatatgtttgcaattccatgtaaattatttattcacatcagatacgctctcaagtaggccgcaaaaaagtttgtgtgactacagtgatgctaataatcgacctactcaacgctgcacaaagatcatcgcctatatcttttcactcctctcatttggcagcttttgcctctcaggaccccaaattcggaggcctgcatctcccaagcgctgcctccttgggtcagaattctccccgcgctattcctgccctggagccgggcaccctgcaaatccttttcctaggcgagggggcgccgcctccggaaagccgccaactgggcctcggtaagacttgtgagggaagcgggagctgtgggagggcgacgcggctaggaaggaaccctagaggcctcagcccccactcccaccccttcccggcaccccggccgccggtgccccgaggctctgccgactctttgttaagcgaggccgcggttcctccgccctcgctaggcccagcagttgcctccagtgcccccaaggactggcggccttgcgtccagaaaccccacgcacaaacctgctgctatggctgcagcggcagctgctacaaccgcgggcgcggagcgaatcccggagcccaaagtacgcgctgtcccggcccggtcccgccgcgctccttcctctccgcccccttcgccgccgccgccgccaccaccaccaccgccgccgccaccgccaccaccgccaccgcctcacggcccgttgctgaaggggggaggggaacaaaaacgcgacatgcgcagtgaggaacgcgcgggcagaagggcggggccggggctacggctcccggaaggcgcctgaccttaaagctccagaacgcctcacaggctcctcagatactctgacgggaaactgcagttgggtggacagtgttcatgacccatctagaaagtgggtctgcgaatgaagaaaaagtggcgtcaaggggctagccaaaaatcccaagagaaaacgggttggacagaaaccatatttacatgaacatgcctatagtttaaactgttgcatatactactagagcgacactcttgcctctggccacgtggtcccacacagcatggccacctttagcttccggagcaccggttccgtgtgacgtcaacttgacggaatcctaggtaggaggattgggataggcgagggcagttccggcccaggggcggggattatgtaattttcccaaaagccccacctcgcctcagccgggcgggagagagggaggtctcgcgctttccccggggttgcgtcccgccccgcaggctgcgcgcaggcgctgacgagccgctcgcattctacgtaacggacggcggaggctacgtgaagagaggcgcggcgtgactgagctacggttctggctgcgtcctagaggcatccggggcagtaaaaccgctgcgatcgcggaggcggcggccaggccgagaggcaggccgggcaggggtgtcggacgcagggcgctgggccgggtttcggcttcggccacaggtaaggagcgggccaggacgcgctcgtcggcgtggccgggccaggccgagcggtgactccgagttgcttggcctgtagcccggtccggttgagataattgtaatggtttgggggaactttcccacggagctgtgagcaaatgatagccaaaagggcagagttagaggaaatgtacagtgtgtgccggaggatgacattaggatgtattgattctcttgggtggggagaaactaggcaaaggggtttaatagaagcaaaaacctctgtggccagtctcttctggaggtttctaaaatgaaacgtgtttgtatccaacacatataaagagacagaggaaagtctgcatgatttccagaatactcgttttggccgttgtcaggaagacctaatctaaaatgacaacaaggaatgatggcctcactcagtcctctttcctcaagtctagactcagtcgctgaggaactattggatgagcttgcagaaaataatcaaaccagacttgttagcgcttgtgtgaattttccttggtcctgtgttgcttgcttcaggagtcatagaggctgggtggtctggcaaggacttgtgcatttgagaactgacaggtgcagcggagacttctaagagggaaaaccaaggtaaaaatggcttggatgattgtaacctaaataaccttgaaggatctccattatagtgctgagttatctcagaagtgtttctatggtgtgaatattctaattggaaattcaatttgaaatgatcggatcttttggcaggctgttaatcgagttgactgttccggtgttaacttttagttgcttctatatgaaaaaaaagttttaagagtaggatttgaaaaggaggctgggcgcggtggcccacgtctgtaatcccagcactttgggaggccgagacgggtggatcacgaggtcaggagatcgagaccatcctggctaacacagtgaaaccccgtctctactaaaaatacaaaaaattagccctgcgtggtggcgagcgcctgtagtcccagctacttgggaggctgaggcagaagaatggcgtgaacccgggaggcggagcttgcagtgagccgagatcgtgccactgcactccagcctgggtgacagagtcagactccgtctcaaaaaaaaaaaaaaaaaaaaacccttggtacatatctcccgtaatacccactgcagccctaagaggcaagtagcaaatggtat

SEQ ID NO: 1243921 - DNA, 4001 bp, Homo sapiens
gctaaatacgtaattgataagcccctaacttcataatttagtaactagtttaaagtagccttcattttaatctggacccacctatgaacaccctattatgaaaaaaaaaatttattgttatactcaacctaatttaagtaaaaatcccaaagccacctatatccaaaagtgagtcacacctttcccaattatgaagtcagaacatgtaactctaccaaaattgagttatttgcaaaacacctgtcagaatttcatttactagaatccacgatcgagttacagcctgatgaagccacatgaatttactcactgctgtgcgcctagccaaatcagggtgctcttgataaaaattcttctcaaatttaggcagctcatcaagattccacttctttttaactaatttctccccagggtttccaaacttctttccagataagggccctgccctacttcctccaaatcgaggtgcaccaaacctggaatgaaaaaaaacgttattcacattttcaaatggctatacccaggtttctgtatagatttgtcatccattggcacaagctaaaaaccactgaaaacagacttcgagaggtaaacctagcactgtccttcgtgaaaatctctctctctctcaacagccacagttaacatttcccgtagtcccaagtacacattacttaggtcatgtaaacagcctgggatttatcatgtcggaagccggggatttatcatgtcggaaacttgtcacccacatgccagaatttgggattctggcacacaccacttcttgtggttactgtaatcttccccaccagcctagcaattcactatcagcaataacaaggctacatgaaccgaagagcatcacgacgatgttactcatatggccgttttggaaccaaacagctttagtggtaagaacctaaacagtacagtcagcgataacagaacaagggttttctcagaaacacttctgctagcaaacccagctgggggaacgccgcggtagagctccggatcaacgaatcaaaattatataacgcaggaaaaaagaaaaggaggagccggcgactaccgggggaggagtcccggcccgggcggagtcggccgggcggcgttcccgctggggcggcgcttccccctttgtctcgcatttctctctgcgccacattttctcgacgctgccattttgagctcctccgccgggcggggtaacaaaggcgccgccgccatgtccgaggccggcattttgtactcgcgactcagccacatggctgatgccggccgccctcctaccccaacagcaccagggctttggaagtggtcccctcgctcccacagaatgcccggccaccccaaaaacacctcccgaaacgccgcacctaacagatgttccttcgtctgcctcgaagcgtcccgctttcatccgcacaatacgctccctctcaactccctcaacagctaccaaatggcagccgccccgacagctccccaatccccacacaaaaagcaagcttgaagacactacaccgtcaaatctcttccaatcactgtgacgtgaatatcaaaatggcgcaagccttcgggaaaggaagtcccaagatagcccggaaaggccaagtccaagccgcaaagcccccgccggccgccaccctgacccgccctcccatccccccacccgccaggcctgacagctcggctcccaaactcaccctcggtcccggccgcggtctcggtcactcgaataacccgacatggcgtcaatggttgcggttggcggggaacgaagtatatagaaaagcgtgcgacaagtcgctggaaatggcctcgatgacggcgaagccttgcgggggcggcagcggaggaaggacaccgatgacaccagccgaagctgcactactagagaccggtagaaatgaatgaggtgccggccgctttccggcagccgcttttatagtctggaccgcctcctacgccgcagggaacgctgggagccgctctatgacctaatcgccccgcccctcgcgcataggccgcaacgcccgctggcgttccaggatcgccgcgctttcacccctccccgcgccactctctcaggtcagggcccacccaccattggaatgcctcattctgcactctcttgacctcaccttcttctggtctttccacacctcaagcaagccaccccgccctttcccaagcccagccccgcccaccctcgccactcggagatgtttacgtctccaaagagccctcacgtctgtaaccaaaagagggggaaggcggggcctggcgttgtcacgtggctgtaccaccccggaccaccgagagagcggtccgcactactttcccgttgacgtcggcggagggatacaaaacgaaatagctcaccggaagtgcgctgctcgcaccccgggacccgcccgggctgccggctgatgtggaccgtccgacccgcgtgtctgataatcctttgacgggttttggtcggcggagaatggtctctaaacttcccaaaccgcccccgtttcacgtcctgtgaaaggaagtgctcctctgatgaccaatcagcggcgagaagctcttttaacgtccgtccttctttcacgcctccttccccgcgctttggttcgtgcgtccgcgccccagtgtcgggtctgcgtggatcggtccttccaggacaccgtcgccttcccggccgcgtcggagtccggcggcgacctgcctctgaaacatggcaggctcggatgctggtgagtgtctccctggggtcccagtatgtgtggactgaaaccgtccacctccagggaggcctcgggctagcccggactgggtctgggctgtcggcggggctcgtgaccttcagacgccgcgtcgcgctggcgggttccctggatagggtctctcagcttcaccacctcttcgcttcgaggccgtggaacagcagtatgctgtgggagagagagaggcactggggcgaggccggtaggacacttgggtcctggctgtaaaaagagcggtcagaagggtcgtccccggacttgtctttctgtggggcgtctagccgctgtccgtgtgccctccgcccttgcactatgggccctgaggtcgtacctgcttttgtattggtctttaaaggaacagcattcttaagatttattatgcccctgcagaatagtagaatatgcccctgtagaatagttgtgcttttttctcttcagtgccctctagagtcatgggctttgtctagcaccgcttttgaagagcgaattaatttggttgtctaggacgctttcatccttttcacaaggactgcgtacaaaccagttgtcatggtttggccagctgtgagaaatgggcgtggggagggggattatgtgcatggaaaatacactctcattcgtttccagaacgttacgtgtccagaacatagtggagatgtttgtttctaataccgattgaaagtgctttcctaccaattcccaggcatttcaaggaacaagtattttaagctaagttacttttggtacagaaaccgttaaactttgcaaatcccagcaatatctaggggagaggagaatgtggtacgcaggaaacgtcaacagtattgataattctgagcttcatgtacttcccatattttctttcatatagatcgatataataaaaaagaaaaactaacaaatgcattaccgttgatgttgttattataccagttcttaacagcctaagtttaatcaccactttttccggcaccagagaaaccctgacttgcacaagataattgggtaaacacaagaccaatactattgcaagtgcgaagcagcctccattaatgagtttctggtaacctcggattatcattaaactgttgtttatgacataatattcctgtttacttgtaaatatgttttaactaaaaacacccatgtaaggcttatataagtaacttaagattttaggctgcaacagtatcaattgaatttgcagtatagttttgacta

SEQ ID NO: 1243922 - DNA, 4001 bp, Homo sapiens
gcggtggttcaggcctgtaatcccggcactttggggggccaaagcgggcggatcacgaggtcaagtgatccaggccatcgtggccaacatggtgaaaccccatctctactaaaaatacaaaaattagctaggcgtggtgacacgcacctgtagtcccagctactcaggaggctgaggcaggagaattgcttgaacccaggaggcagaggttgcagtgagccgagatcgcgccactgcactccagcctggagacagagtgagactctgtctcaaaaaaaaaaagtttcattcattagcttggcaaaaaaattaacaccaataatattcagcactgacaaggacttgggaagtcactttgtagtatttttcagagaaagggtacataccctttcaccatatgatgctacttttcggatggtattctgcagaaataacagtacctgtacaaaaggatttatgtataaatatctttacttaaaattacctttgctgtaacaatatttctaatgacaaatacctggaaacaacctgagtgccatcagctgacaaatgaccttattgtctgacttgtagccataagcctgtattatttttataactgaaaaaaattaaagagaaaaaacatgacagaaatcaaacactaacctgaagtcatcgtcttcctttttttcttgctctgctccctcttcctttcagttaggctctcttcttttttctctccattttggggcttctgatgtgtttgtgatgctccacacacacctgggacagacttcttgtttccaaaaaagtccagtccctgaagcacctccgaagaatcaaagtcatatttcctttttcctatctaaaacccaaaaaatgtaaaatgaaacctactgacagaataccattgctttcattcaagcaagactgttcaatgactcctcatcttttctaccctttcaccaagtatctgtcgagctaacaggtgtctggacaaatggaatctgaagagaccttctctgacctcataatagtaacaaattaatattagcaatgaacacatatatgcttactaaatgtcaagcagatttctaagcatgtttatacatattaaattgcttcacatttacaactctataaggtaaatagcagtattacgaatgagaaaaccaaggcattcggaaattaagtaacttgaggtaggtctaaaaatgagtaactggcagacttagcatttagacccagataatctggctccagagttcatactcaccagttagagaaagaagaaacacatgtcacacgcatatacacatccaaacaacaaagtagacattcaagattttccagaattgggccccaattgacctcccccgatgtatcactcactacttctctaggtaagagcccccatttcttaatcgctcttctcattggttacttaagccatggggttgaagcaataaaaagaatcacgcccagtacaactatacgcatgccaagccaaacttggggagactatagtaagagaatctgttttctccatctttggttgtttctgttttcgaaattcctttcctctaggttcggagaaaaagttccttttgaaaggaggattccaactttgctttgaataagagggaggaaagagggtttccgtgccaggcccaactaggtctacaacaggatagttaaagagcttattcaaaaggcttgaaccgagcagccgtgcaggcaagccgaacacaaaaggaagcaaaataccccaagggtggcgagagccaggccacgggtgtccaagtgcgccggcctcccccagcagcgggttcattcccgggctcctgctccttctcagttactcggccctcggtcccttgggcacagtacctggaatcgagctgcgtctgccgagaagcgtctcgtgtcgaatttggcccccgcgccgagccggcgaaagagatcgtggacgtccatctttacccagaaagcgccacagttctacggcgcctgcgcagactacttcccaggccccgggcagcgtcggaagagggcgtgagcataattggctcctgtaggcggagcctggctgggtgagaaacgaggctattttattatcgtgtactccgtcattatttatcttttttttttttttttgaaacaaggtctctctctgtcgcccaggctggagcgcagtggcgcaatcgcagcctcgaactcctgggctcaagtgatcctcccatctcggtctcccaaactgctgggactacaggcgtgtgtaaattcttttaaaaaatatttatcagtatcctcttatgttgggcactgttctagactttgagggatactatagtaaacaacatcttaagattcctcttcttacgaagcttacattttagtagggacaacagatattgttaacaaataaataagcaaaatctctgtaaagtaataagtgctataaaacaaaaaggtgtaattgatagagaaaatgatgagggagctgacttagtgaaattcactctgttgaagtgaaaacttgagctaagaggaagcaacctgtccaagatctgggaacagcattccagataggggaaacacgtggctgaagggaaaaaaattggaaccttgagggaatagaaagaatgccggtgcgactagagccaagttgcagtctgatagagtagtacagataaggttggagggacaaacagaagccagatctcacagaatcttgtaacaaggtcatagtaaggaatttggacttccaccttgggaaactatttgaaaatttttatggagagaagaacatgatttagtttatcacatttaattttttatatttattacatctgtacgaaattatttactgcttattgcctctccctcttctggaatgtaagtccctgagcacagggatatactttgcttcgttatgtatccccagtttctgtgcactttggtgaatgaatgcgtggatgtttcataaaggattacactggctatttggagaatggaccatagaaaagctaagagtggaaacaggttagtcaaagtagaatgatgatcatggcttgtctaggttggtatctgtgctgagagagataaatggattagatctggcatgtattttggaggtagagctaaacgtacctgacggattttatgcagaggtgagagaaagggaggaatcaaagatcactcctagttttttggctgagtagatggcatgccatttactgagctaagaaagcctgagagaagaagggctttctggtacaagtgagatacggaggatggaatcaattgttatgttttggacgtgttaagatgcctacctagttgactttaagtggagacatccaagtaggtagttggttctgaatctgaagctcaggaacaaaaattagggctagagaaattaatttggaagtcatcaacatataaatgatacaaaggagttgtaccatataagcatttaacttataaaaattcagttatatgtatttgaccaaagagaatgaaacatacttgaaattgtatgggtgagtcctttacaatcaaggaaagcaggtgtgaggtgagcatgtgatgggggaggtgaatctgcggtttctcagatgaattcagccccttactccctattacagtgggtcggggggtggtcttcctgtcccaagtgtgtctactctttaaaaataggaacttcccaagtacttcatctgttgttcaataaaaataatttatcttcagccaggcgcagtggcttatacctgtaatcctagcactttgggaggccaaggtgggcagattacttcagctcagaagtttgaaaccagccggggcaacatggcggaactccatctctacaaaaaattaaaacattagctgggtgtagtggcacacacctatagtcccagccacttgggaggctgaggcaggaagattgcttgagcttgggaggttgaagctgcagtgacttgtaacggcaccactgcactccaacctgggtgacagagtga

SEQ ID NO: 1243923 - DNA, 4001 bp, Homo sapiens
ttattggcttttgggtctctcccctactccaactatggtaagatcatcctggaacagaaaaatccatctctcttttagcattttattttgagacagggtttcgctcttgtctcccaggctggagtgcaatggcacaatctcggctcactgcaacctccgcctcccgggttcaagtgattctcctgcctcagcctcgccagtagctaggattacaggcatgtgccatcacgcctggctaatttttgtatttttagtaagagacagggctttaccatgttggccaggctggtcttgaactcctgacctcaggtgatctgcctgcctcagcctcccaaagtgctgggattacaggcgtgagccactgtgcccagcctcttttggcattttaatcactggaaaggaccatctcccattgtaatctaataaaccaccatatagctttagatgtttggaatttggttagtatgatctgatccctggaagacagatcacaatttaaaagcactaacagaattgagtttctggaccatggtgataacaccaaggtggtgggtgtgcctaggtgctgaatggacaaaataaggccatccctgtgagacaacccctaagcagctagctagtcagcctcctctcataggacaacgttaagtctaaaccagtgatttccaaatacaggaactggacacatcaaaacgatgcagggaactttaaaaataaaacacagattttaattcctacccttgcaaattctgatttggtacttgttgaggagcttgagaatctcttcaaagttccctaagggattctcaagtccaaccaggctgcagaatcactgctttatatcctgacaaggcaacttataatcaaaggtccccactgggttcttttttaggatagtgtataacaggatttgctactaaacagtaagaaaaagaagaaactgaagcattaatcactattgtgatgaaccacttacttgaaagtgtttaaagattaattcaggattgaagtacaactgaaaaggtgtgatcaattccaactgctgaaatagaaaaagagcttcttaaagcaaatcaagaaacaaaatttcatcatttacaacaaagaattagtaggtctagcaatttccaactctcggtcacttagacgtgatttcctttaagcctttcttcttaggccagaggaagaggttggtaaagaattctctaggattggtagaattctttgtatcctcaatacctaacacaaaaaagtctgttttatgttgcaatagttgaggctgacatgaagaaatgaggcagacaggtggtgatattttagacacaggacaaataaaaacagctgctatgaatctacccaccacatgggcaccacctgaaacagctgtatgaaacaacaaaactcacttgaaataacggagactggagaccctgccaccgttagggctgggtacctccagctagccccttatttagatccagagaccctttttattataagccattcccctctcgacagtttccagcttgctttccccattcctgtttcttcactaaacggaccttcctctcactagtcaccatggtaccacctggccattggcagagctctcggacacatttcttgggtgggaggctcccgcaaccctaacccgctataggtccggcgctcatctcttagaaactgacctgaccccccatgaagcagcactcccttctcgcgtcactggataagcattcttggcgccaactcgaaccccagagtaatccctgtacgcctccacccatccccgggaccagcccctctgggcctccccgaggcccaaaccccagtttcctgaagacccagtcatatccagcccagataatgagaaggtggcactgcagctgctcaccacggcggcggtggtgaggacgcaggcagtggtgtaggcgcggctgaccggtgggatctgcaggtactccagccgcaagctctggtacgccatcttccccaccgtcgcctgccccaccccccacccaccccatttccccttccgccagcaggccccggcggcggggcgggcccaaaggccccccgcccactttagttttcccgcgactgcccaatcaacgccaagcaaccgcaatccgtagagacctaaggaacgcacatccgccaatcacgagttgcgtcgccaccgcccccccccagcgccccatctccccaccctctcttctccaccagccaacgtccgggaaaaacgagtaagtacaggttccttctgccaatccccgccggccacagctaactttcccgcccggcccctttctgtcataattgaggtgtccacaaccagccaatcaggaacgcgagagtatcccgcgtttgctttcgctcgccgaggcgcgtatcagtcggaattttggggagccaaccgcgccgtctgtccctggcaagccagcggcggtttaaaggaggtggcgggaagcctgtgtgtgcttcaaatcgtcaccctcatggtcgctccggtaagtgctgcggggcagcattttctctgaggaggagcggggacgggcgagactggcataagcgtcttcgcgagggagcaaggcggcctgtgggtcggcctcaccccggcctccgacctgaagatcccagcatgcagcgcgggcgcggggcccgacggaagccgggagccggccggaagcagttcctgcgctctggcttctgggtcctgtcctgcgcgatcgcggggtcttagacagctcaactcgccgagatgacctgggcacctctgcgttgaatcggcaaatactgatcaagccgcatttattctgctctcaggaactctaagtctagcagagaagatgaggcggtagaagttcatcagtcagtgcccgaagagaggtcctaatgggaattcgaagaaaggagttaatcaaggaagtgtatttttttgttgttgtttgagatggcgcccacctgtaatcccagctacttgggaggctgagctaagaggatcacttgaacttaggaggcagaggttgtagcgagccgagatcataccactgtactccagcctgggcgaaagagtgacactttgtctcaaacaacaacaacaacaagaaaattagccaggcatggtggcctgcacctgttgtcccggctacttgggagactgaggtgggaggattgcttgggcgcgggaggttgaggctgcagtgatctgtgatcgtgccactgcattccagcctgggcgacagagcgacaacatgtctcaaaagaaaaaaagaaaaacagaaagaaatcctaccttacatatacagccaaacagttataaccactccatatttaaccattacaaacgtaaatttttattttattttattttttgagacagagtctcgctctgttgcccaggctggggtgcagtggcacaatctcggctcaccgcaaccttcgcctctcgggttccagtgattctcctgcctcagcctcccgagtagctgggattgcaagtatccaccatcacgcctgggtaatttttgtatttctaggagagatagggtttcgccatgttggccaggctggtctcgaactcctgacctcaggtgattcgtccatccggcctcctaaagtgctgagattacaggcatgagctatcgtgctcagcctacaaacataaattcttaagattggctgcatcttatcttcccataagatttgactgtactgcttattgcaaattatttcataaagtgcgtcctaaattcacctgataattgaagtagcagtttgttttagctaattgcctttatctgaaggaataataaaatttctcttatttctatgacaagcaatatcatttcatctcagaaaaagatgcctaggttgaattcccacaatgacaaggagataggggttttattttcctagatgtttatatttgagaggaattactcgcagacccttgaaaaaacatgtcagggttataaagctgacaagggacttactcatct

SEQ ID NO: 1243924 - DNA, 4001 bp, Homo sapiens
taaggctcaaaggaggctaagtgttagtccagagctggaaatcctggaggccagtcctattttaccagagtggacctaacgggctttaattttctcaactgtgaactgagttagaatagatcatttgcaaagcagcattctcctttaccaatttccaacatcagcaaaggacatcttcacctattttcaaacaatatttaaggacaaaaatgtgttgtccagtgtgtatataaaagacattaaaatattcttggcttaatcaaggtcacttatctaagattctacatgtcctgaaagaccaagcgtcaaaaggaatattcctttcagtgttctttttgagtatatttcgctatggtaccaacagctatattagcaaaagacataaaagtgctgccttggaatgacacttgttttcactgcacattcatagtacaaaacctgtgacccatcagttttgcggctgaagggaaaagttaatttgtccatatttcatttttccttatttaaaataaggagataatcgataggaacaaaagctaaaatatacagtggccatgaagcaggcaccacttagaaacctctgtattaacgttaggagccaagttttattacccaaaagggcaggctggctgaggagtggaggctggatgcatcgtctcagcaaatgactactgcaaagctgccacgcttgcacaaactcagggatgtttatttattagcttgtttcctcaaaatgagtttaggtcatcagcagagattaaagcaggcctctacaccactctatgaaatcctgattcccacggcgcattctgggacagtgagtgtccacgaagaccatacctgtaatcgcaaagcttgggttgacagccacactgctgcttgcaaaccatacagtaactgcacaggggcacgttgccccggatccagtggtggggcatggcgtccaggaccttggtgtcattcttgagcataatctccttgcactggaagcgcttgtcggccttcctgaggcagccctcgtccacgcggagcccgcagcagtcgcagaaggcgccctgcagaatgtgctgcgcgcacacgcagcagtaggtgggctggctgaacaggtccgtgtcgcgccacccgtgcttgctcttgcggaagatgtccctgcggtgcagctgccggcgcgaccgctggaggctacaccagaaggtgatgaacaccggcagcaggaccgagcacagcgtccacaagatcaggtgcccgtccgcaaacaggccctcggagggcgagcccggcgccggccgcctctccgcttccatcttctccaaggacgatacctaaccagaaaagaaacaggcggtgcaccccgagctcgccatcccttccccgcccccttcctgcctttccggggccaaaccgggcgccctcagtgaaggtggctccgctctcccgagggcgggactgcgcctcgtccccccgtctcccgggacctgccgcgccgagaaggcgacgtccagccatcacgctccaatccccactccccaacccgccccacctcgggagcgcgtccaggagcccaaggcggctgctgctgccgccgccgcctcaccttgccgccggtctgacccacggaagggcgcaacatacaggggcaagctgccctccaccgaaaggccgggcgttcaggccaggcaacgccggtcggcgcccgtaaccgtcggcccaggcctcgcactcccctccggggcgccgtctcctcccgggccccacccgctcccacgcgcggcccggcgaccctagcccctctcgggaggcctccggagacctgcgccgcgccggtcctcgaagccctacctcgcgcgggtggaggcgcggctccgggccagcaggccttggccgcctcgcgcaggaggagaacgacgctgggccgccagcagggatgaagccgggcgggggaaacgcttaaggctccagccgcacgcacgccgatccggcgcgcggggccgcgagctggaggcggggcctgtggcggcgagccccgtggctgggcggagccagggctgacgggcggggcggaggtgtgaggtgggaggggagacggaccggcctgagggggcggggccgtggaggaggctggagacggatggaagaggcagggcactgcggctgggggcggggcctaggggaagggggcggagtaacagtggggcgtttgagaggatggagggttgaatgccaaaacttcgtaatcgtagaaaattctggaaagccgccggcggggcaaggccacgaggatcctcctcgcagcaccgcgccgcgcggggcccaggggccgcgctcacgcccgccgctcggcgcagacacgagtgcccccgacttgagccgaacctctagccgatgccggcgccgccgccgccggggatgcgtaagccgactgggaagcgagggggggaggcggcctgcgcggcaccgcccgacctggccgcggcgggctgaggtaggtgtggcggccgcagtaacgcaaacctgagggctcctccgctgcggagcggcgggcgggcgcggaggccgagggcgagcggggcagccgcccgctcgtcgccgctgaccccgagcccggccgcggtttccgccccctgccgtggcgggcgggcctcccctgcgctaccccctcgcccgcgcccgccagcgcccgaggccggggagaaaggggagcagcgggagccggggactaccggagatgggagcacgcctcctgctgctgtcgtccagccccaggttccggaggaatgctcgctccccgctggagtcctaccagcccaacacggacctgagccgcgaccacgcgggctgcagcctgcagcacatcagctacccggagaacgcggacgcggaagcaccgctgctcagcacccccgaagaaacacggaatccagagaggcacaggcaccgccccggcgcgcacagctgcactcagcggcttccttcctactacatacatacataggagtgggagccgaggaccacttgttgcttgcggacttcctctagcataaaagatggaaagaaaacacacaccgaagcaagggaccaaaggaacagaaaagaaacgcagagatcataggaaaactgcaaagaaatacttgataatatcttccaaacgattagagaagacataacattcattaagaatacacatatagatgtatatatacgtgtatgtgtgtatgtatatattattatgtgtgcatatatatgcatgtgtatgtgcgtatatttgtattaactgtagaagataaagctagacactagtaaaagtggtaaagcagattttaataatatactattgtaatagggaagaaggtacctcgtgaacggaactgaactttgtgcagaagtgactaggtgtttaagagggaggaggagggaatgtgaaggggatgagcaggaactcagtagtcaggaaagtgaaacttgtgaagggtgggtcagtgtaagtaaggttaggcgacagtgcctgttagatggctgttatgggagtcagggtcctatcctcccacagtaactgggagataggccctttgcttcctggtgattgcatgttggaggaatggctttcaggttcttgagaaggatactcctgatgtgtaggagacattacatcccagagagacagaggaaggattcacaattgtttagttttttgttgttgttgttaactctttaagaaagggacatcaggggctgcttgtaaggtgttggcaatagccaacagtgagttcttttggcagctttcccaggaagatactttagggggtctggggtcatcctatggatgcagctttgagcagttaaaaactatgtgtttaggccgggcgctgtggctcacgcctgtaaccccaacactttgggaggccgaggcaggtgcatcacggggtcaggaattcaagatcagcctggtcaagatggtgaaaccccgtctctactaaaaatacaaaaaattagctgggcatcgt

SEQ ID NO: 1243925 - DNA, 4001 bp, Homo sapiens
gaggaaggccagcttggccagctgccctggcctggagccccttcctcctcccaagctgagccaggaataaaggacaggatcgggtgtcttgggacattcttttctgctttgactttctgtgagttcaaaaggtatagtcctctgagaatcagaaaccccccttcaccagattttacccacatttgatcacttcaggaaacaggagttttctctgtaggaagctagaacccaaattctgctttaacatcaatgactgaatcaatcaaagcagactgtgggcaaggaagactgcagctttcccctcccctggtgtacatcttcccgcttcctcctctagactcaaaattcctgccacaagaaaaccagaagggatgagctcagaatgtatttctccctgtcactgccttcctgttgccccacctgtgccacctgatctccctacctcccctcagtaatgatctacaacatcatgtcaccccctcacaacaggggcattctcctctcagacatggagtcaccctgggactgagtgatcagcctggggatccccttggggctcaggcccccccttcctggctagcttgcggtaggggagtaggtgagaaggcaagagtggcttcagaattacagaatccagttgtttaatccctggcctgatcctctgggctccaaggctggggctgggtcctgagctcctcagaataggataaagggaggaaagagtggggcagtgatggagccaggtgaccttgggattatctgggttataaagcatacctttggtcagcagcaggggaggggacagtcctccttcctgtataccttctccctctgcccccacccaaggcctccttaccctttccctgcctgaggactttgagcacggtggagataaagccctgcagctaagcactagcccgacactgagaatgagcttacagggcacatccagagagagcctagcacagaaattcctccctgctccaaaatggccatcttgatttttctctgagctctgagggctcccaaccccacgtcaagagcagagtaaggagttccaggttgctttatcctctcaaggtttccgcccgatttcacccactctgttcgccccaggagagtggaggagggcccactaatgaatattccattcattcctcatgccactgggcatgagttacccccgaggtgagggggcggggctgaggctcttcagtaaagctcccaccccaaccccaacctcagtcctggctcctgcccatctggttggccagccaccttgccctgcgtggtgggtgacttctggagattagaggcacttggccgccgggggcgagaaggccacaggggcgagaccaccacccccgacctccggcttccccttcctcgggccaataccctggggagacccgaggggcgggtggggagatgccggggtcggagattcggtaactcgagcaggggctgtcagggcaaacggctccttcaaagatgagacttaaggggaagggagaagcctgccttaagggatccgagaggccgccccgactagagcaaagggccccggcgtggcgggcaggtgaacccgactccggggaaacgacccgcccgcgacgtccccgccctcggcccggcctcacctcgatgttgcccacagtgcgggcgcagcccaccaccttcagtccctgctggaccagggcccgggccacggccgcgccgatgccccccgaggcccccgtcaccagcgccagccggtcgcgccaccgctccatgccgggcctggccatgggcccacgccgcccgtccgcctcgctggactagcccgacacgggggtcgaggagctgacgcccggccgctctcctgccgccgccgccgacctgcttgggtccgatccgcgcctagacccaccagagtcccggcctgcctccggccgggactccaccctcaggcccccggcgatccgccgtatccagtcggaggccgccgcggcccggccgccccgccccttccgcccctctgccccgccccggcgtagggaaaccgggctgcgcgggagcgtcctggcagctggcggcgccgcttccccagtgagcgctgccctttggggtcagggaaaccgaggtttagcggggaggttccttcagccccaagggcgcatactgaagcgtcccgcttagtctcccttctctactcctgaaccctaatgccaggatgaggaattaagggcacttaaggtgactccaacactcttccacaccctcccaaacccgccggtggctgatgggaagggattcggcccagaaaacgccgagtgtctccgccatcaatgctaggtgaccttgggaaggactcattcaccctacctgatcccttggctttactagccacggagaactgaaatactcctaagtacacgtgtactggggtattctgtccctaaatggcccactgtgtctaactgccctagacccccacgcttacccctaccccactgtagcaaatgtatcatgatatatgccaaagattaaaacagtatctaacatttgctgcttatggtgtagcaggcattttaaatatagtaactaatctacacaaccgcgctgagatggcacatattagtatcttaattttaaagatgagtatactgacgtggtgaagcatggtttggaccacaggcagtccagtcttacgccagggatgtgctcctcaactgtcttcacatcattatcgcttctcgggttgctggttttgttcagagtagagctcgctttactaaaagtgctgaaaactgcgtacttaatatagccattctcttaaagaaaaagcatctttgaataaccacctgactcccttccagcaagcaatggagtaagcggtgaatgtggctggtttattcattcaaaaacactcatttgcctatcctgtgtttggccccaatggcaaagattaaaactaaactaaatcagcctttccttttagggatctcaaaagaacatttgactcttaacagtggtgaagaggggattcacctctgagccaagggctgtgggagacccacagtcattttttagattctgggatgaaatcaaaaagggtccaagaggagtccttttacctctgccccattcctatacaacatttagatttgaaagacaactcaggaggtggatccaagaaatggcactatgaaaattcaatctaagtttctgctgctgcccacttgaaatctaactcaaaatctgattaaaagcacataaaattcactccacctccattgcacagaagtactgattgtcccatgattttatgctgccaccaagtattataaacatgtagacacaaatctctaagcatcatgtgtctacggagctatttgactggatcttttaaatggcagcaaaatgctactcctggggggaactctctcctttagtactcacagctgtgacaggagtaaactgtaagaccacagtgactttgttactggataccagataaggctgaacctcacatgcatttaaacagcccacaatgtggttagctctcagtgcagccttctgagcccagtcttacatgttgagcaattacttatcgggcaacccttggttgaaattctgccaagttttgtttttattcttctaggtcaatatgaacctctgaatttaagaagtactttgtattatgtattagggaacctttaataatagcaattaaagtctcatgggaaagtaagatggtagcaagtatttaaagtatctcctcaaaagaaaaagactggaaaactgcttttctcagttgtcaattctcatcaaaggaagatttttgtcttcaacaatctgtatctctgtccttcatcctttctaacatcaacactggccaagcatcaagtccacaagtggcaaatactaaagtactgccacatattaagtagaaacatgtacagcaaattttactgtgcgtattaataaatattctttattttaaattttgcacattgcgc

SEQ ID NO: 1243926 - DNA, 4001 bp, Homo sapiens
agtgtcagcatatgcccgcagctcctgccgccagcccaccactgggcggtccaggcgtttgaagtcaagacgtccccgacagtgggcagctgaggctaccaccaccacgcggctaggggcacatgccttcaggcaaggcagcagcagatgtgtcagcagaaagggaccgatatggttcacccgaagcagcaggttaaacgcctcacgggtccggccacaggaactgatacctggggcagaggctaaatgtgagcggctgctccagaaggagctctgcagccttggcatccctatctatgagatgggagaagggggcatccttcccatgtgtccactggccccagcagggcccccgctggagggggcagttgcccctggccacccgccaccccacccccacgcagggcctgctgcccctcaccggcattgtggatgaggatgtccaaccgtggctcagagctcagaaaggcagtggcaaaggcccgcaccgaggccagactggccaagtccaaggccatgaagatgacctcattgttcccactctcctgtggagaggcaagggctgggcttgtcaccaggcatctctctcctcttccctctccccaggcaccaaattctgagagtccatctcctactgtttactaaaatctgcccctgtgtcttagagtgtactagataagtgtgtggattcaaatcctgactttgccttttactaaagtgtgaccttgggcaagatacttaatctctctgggtctcagttctctcactgcgtaaagggaataataataacaacagtcccaatctcactgagcttttgtgaggatgaaaggagttaacgtgtaaaatacactctagcagcactgggtaggtacttgctattattattatcacctcctttccccattaccatttaccctaaaatctgtaacttctcactggtctcctctctcccgctcttgcccccccactccaggcaccacgcagccacaaaggagttccttccaaaggctattctgacagtccggagcctactgagggctgttcatggtctccactggtctctgctgcccaatctataaaatccaagcttctcaataggctctagaatgttctccagccccctcatttgcccatcttcctcatactttgtgctccagcctcattaaatctttttctcagtttttcagatcagtccagctctctttgcctcagagcctttgcttatgctgtgccctctgctgttccctttcctactgatcattaacccaacttctactgatgcttaaacgtctcagaactgcaattacggccttcaggaagcccctcccccactcggctctggtgcgccttcctcgggtgaccccagcgctccgtgcactccctcttcgcgctcagccgcccgcgccgcgctctcctccctggacccggatcctccgcagcccctttgctggcttctctgtgtcccggcgggttctcggctcaccgtcccacgcgcccccgctgcctctcacctggcggaggtcgaaggcagccgcctccccgcgctcctggctgcggcaggccagcaccacgcgcgctccccggcgcgccagctccagcgccgtcatctttccgatgccgctgttggcgcctgcggaccgcgggcgggagccgagctgagctgagcccggcgggccgctgctaccgccggcccggcctcctctccgcgcgccccgccagctcgcactcacccgcctccgcactcacccgtgaccacggccgtgcggccccgcaggttgcccatgccgccgcacggcggggccttcaccaggttgtagtagacaagcacgtaagcgcccagcagcaaccccgcgcccagcagcagcgcctccatgccggccgcgcctcccggctcccgcccaggccccgcaccgccctggatcgccgccaggcggctgccgatccgccctgcacaggcctggaacggcgcccgggcgcgtcagcctccgaaggcggaggcgggcaggaggctgggcaggggcgtgtgcgcgtgcgggtgcgcgccggccctgcgagcgccccctaggcgtgcgtcggcgtcctgggggcgtgtgcctctgtggacacctttgaggtgagtgtgtgcgcttgggccctgggagcgccccctaggtgtgtgcctgtgtgaactcctgggtgtgtgtgtccacgtacaccctgtgagtgcacgctaggtatgtgcatgcatctgcaacgcttgtatgtgaatgatctctaggtgtgtatgtgcccatgtccctgaggatcaccctttgggttgtgtgcgtgcctctggatcctgtgtgtgagctcctgtaagcaccttgtaggtgtttgtgtgcattctggcagagtccctccaggtatgtgcctgcatctgtagtctctgccagtgcatgtgcttgcatatctccatatgtttactcgaggtgtatgtagcacagtccctcccttctgaagttaggtgtgtacatgaatacacgtgtgtctttgagtctagtcctagatgcttttccctctaagaacaaatccttctccttccttcccttctgcacaaatccttctcctttccttcctttcctttccttccttccttccttccttccttccttcccttccttccttcctcccttccttccttccttccttccctccctcccttccttccttctttcctttctttctttcttttgagacggagtttcactctcgttgcccaggctggagtgcagtggcgtgatcccggctcactgcaacctccgcttcccgggttcaagcaattctcctgcctcagaatccagagtagctgggatcacaggtgtgtgacaccacacccggctaatttttgtattttagtagagaagggttttcactatgttggccaggttggtctcaaacttctgaccttaagtgacccacctgcctcagcctctcaaagtgctgggattacaggtgtgagcctctgcactgggccaaatccttcgttttcttatcttcacatccagcccccagcttctaggattcttccgtgttctccccacacaggctagagaggacactgttaaaggtggcacaggcagttaaggggtgtcagaattcactccttcattccccctctgtatctccctacctcaaccccactagtgccttccatggctgaagggaagcaggaagagatagagagtaaaatctgttattgcctttcaggaggaaatttgcctttggaatggttctcataggtgataagagacaggcagagaagctccatcactcaattacaagtgaccatgatggcaggaagggtggggctggctaggaacaaatgggtaagaccattccagggcagaaggccgttgcctgatacattcagtacaatttagaacctggtatttggcacttatggtgtgcccagcagtgtagttagacttggaaattccgagtggaagatatacaagtttctgtccttagggagttcaaaaagcccattagggcaccgggagcagagtgatgacgcctgcatgggcagatgaaagtcagggacagacctcagattccagggccagtttcctatttagctgcactgcggattcgggtttccattgtagatgctgtgggatgaggctgggggtagaatattcattttctatccctaaggcaaaatcctgacacacaagcagatgcacctacacaaacagtgctggaatatacacagaggtgctctccatctgaggaggctgacctcaggaaaacttcctggagagtttttcactaagatctgggaggaaagcatggaatttggtttaatgaaggtccccgggacttgagaattaaggtaatgcagcagactcgttttttgatgaggaatagcagttgtagagaagtgtgactgcagatcacatgactagaagtgacaggtcaagactagattccactatcagtcagggttctctggagaaacagctccccccgggccagcagacgca

SEQ ID NO: 1243927 - DNA, 4001 bp, Homo sapiens
gttgttgttgttgttgtttgagacagggtgtcactttttttttttttttttttttaagacggagtctcctcgctcttgtcgcccaggctggaatgcagtggcggcatctcggctcactgcaacctctgcctcccaggttcaagcgattctcctgccaaagcctcccgagtagctgggattacaggcgcccaccaccacgcccggctaatttttgtttgtttgtttgttttgagacagagtctcactatgtcgcccaggctggagtgcagcggcgggatctcggctcactgcaagctccgccatccggagcacgccattctcctgcctcagcctccctagtagctgggactacagacgcccgccaccaagcccagccaatttttttgaatttttttagtagagacggggtttcaccgtgttagccaggatggtctcgaggtcctgacctcgtgatccgcccgccttggcctcccaaagtgctggaaatacaggcgtgagccaccgcgcccagccaatttttgtattttttagtagagacggggtttcaccacgttggccaggctggtctcgaactcctgacctcaggtgatccgcccgcctcagcctcctaaagtgctgggattacatgtgtgagccactgcgcccagccaagacagggtctcactttgtcacccagacttgaatgcaatggcgtgatctcggctcactgcagcctgtctcccaggttcaagcaatccacttgcctcagccccaacaaatagctgggactacaggcgtgtgctaccttgcctggctaatagctctatgcctttggataaacttcttaacatctctaagcccatttctccctccataaataaaaattatagttcctatgattagggttattacaggattgaataattcagtaaagggattagtacagtgcctgtaacatagcaaacactcaaaaaatatcaactattattaaggaatggagaaaaggggacatgtacatggtagggaaggcatattccacacccttggcaaaggcacaaacatagcttccattatgcaaacacaccgttgcaatcggcaacagtgtaagcaagaattctgcttactaaatgtatgagtgtgtgaaacccaaacgttacttcaaaagtaacttcacgattctccaatcactacatggaaggtttggaaactgaaaaaaagagcattatgtggctaccatttgttgaatacctactatgtgccagacaccagctgagcaccttgcacgcgcagtctcatttacgcttcacaacaaccttatgagtgggcttgttactcccaaagttacagctgaagaaacactcagagtttaaaacatttgcccaaagccgcacagccaggaagccgcagagtaagtattggaagagcaagatatctcaaccagccattcccgtggacgctcgagtcagcaccctcctcctgccttctgaaaaaccggacttcctttgctagtcctaactcgccgtcactggctaaggtgccactggcccccagcgctcaaccctcggtcctgccactcgcagacgctgcggagcctcccctacgtcgcgcagaaatgtgggaataaacaggttgaagccaggagccctgtgggcgcgaggcctttcacacacagcgcccggcgcgacacccattcccagcagcggaaactggactcaagacacctcggcgacaggcgggtttccccgccacgcactcgccggagccagggctctggtcccagcgcctgggctgagtcttccttcagagttcggcgtcgcggggatccggaagccgcccagggcccgcggccttagctcgaccactacaccgcttcccctcacccaagccggggcgtcgcctcagctcaaggccagaccctatcgcctcatctcggaggttccttcttccccagcccctacctggtagccggagagaccatagtcaatcaacttcatcctcccgcctcggaagtgacgtgtacgcagccggcgaggctccgtccaatcccagcattgaggctgcgcatgcgcgttgggtgggcgtccctcaaggtgtacacaggacccgatggacccgagatctgatagggtccacccgcataactacagtgccttcatcttccggagggaaattccgaaggtcgtggttggtgttccgtggacttccggcgaagaacacagttggagaattcacgatacagttatcaagatgattataatgccacagtaatcagaacagtgtgataactggcacaaaggtaaaaacaatgaatgaaaaagagagagaccagaaacagacctgcagctatgtagtcactttttcctcctacaagtagccactgtaatgcaataagaagagttttttcaatatatagtgctaggtcaattgaaggtcgattggggggaaatgaaccttgactcctatctcaagtaaaataattctagacggatggtagacctgaatgtgaacaatacaactctagacaataaaatcgcagaatattatgaccataagagaggaaaataacgtgttagcagaacacaaaaagtgccagtcctaaaggaaaaagctgataaattgggtgtctgtaactataagacaccgaaaagaccccattgagaaaagggaaagacaatagaacagacaagatatttgtaatacatatatctgaaaatgaattttattcagaatatgtacgtacttcttgcaagtaaattttttaaaggacccgaagtgatttaaaaaaaaaaaaaaagcatgaaaagaggatattgagagagtaaagggcagaggaaggaaggggcagggcagaggaaggaaggggcggggggactcttatcgttcaaaatcataagatggcaaatgtgtgtaaggtggaaaatctccctttctgttctccaggacccacttcacctccccctaggtaacgatgctattagctatgtgtgtccttccagagccagtttattcataaccaagcaattatgtatgtattcagcacccccttgttacacaaacaatagcattctgaaacgtccttctgtttcttgcttttattaactttagcgaattaatatatcctggaaattcttacagatattcacaaaatctgaaaatgggaaattttatttttaactaaatatttatttttgacgttttcacaaaagtttttatacctttctggcccctctccattgttctggaaactctagattcctgcttgccaattcacaaagtttgaatatccttgtagcaaacccaatatgaaccgtaaggcagaaaaatagggtctggagacagggaacctaaggccaattcacgctgacttcctagaactaaatcaaaaggaaaacccgaactttccatgcccaggtaacaaaaggaacagaagctagtccctttgcaacctgccccgcttttctgcctggcagatgaaaaattgaaggtacctctgattggtcccctcttgcaaccaatcaggctgatcacaggccactacttcttttacatagagtgtacaccaagtaaccaacgggaaccctctagagggtatttaaactccagaaaattctgtaaccgggctcttgagccacctgctaggcaggctcccaacctgtggagtgtgcttttgttttcaataaatctctgcttttgttgcatcattctttccttgctttgtttgtgcgttttgtccaattgtttgttcaaaacgccaagaacctggacactctccactggtaacacctgagtctttattgcatgactaagtcagtttcctggggttcatttcccaggcctgctaccctcttagcctacccactcttcaatcctgcatggaatttgttttagaagcaactcaatatatttcaaagttttggtaaccaatttgaattgcatctgccaaatgcaagtgtaaaaactctaacttcgcagccaggatattatacaaaaaggattccagtgggccgggtgcagtggctcac

SEQ ID NO: 1243928 - DNA, 4001 bp, Homo sapiens
atacagagcgtattctccaaccatgttggaatcaagctggaaagcaataaaacaaatttgcaagaacacacttatccaaatgagggccttccctgatcacatgtcacttttagaggttattcattaaatacacattttctgaggatgtcaaccaagcattgagctaggtgctgaggctgcctgggtgaacaaaacacaggctccagcaccaggaagcctgtatctagtggacccactgagaaacacacagatacagcatgagaaatacactaatgtggtgtgcacttacaaggggccagttaagaagctggtccacaaggaccattcaagaggaaggagcaattaaggtgtcaggacaggctccagggtagaggccgtatcagggatcgcatgttagcagcctggtgcaatgccagacaaaggtgcgctatttggagagcaaatttttcgcaaagccttctgttctgaatagctttaggtgggcatctcttttccagctctccagggcggcacactccctgttgtcttttgtctggtctgattgacagatgtgtgtgccctggcttgcccttgaagaaggagtttgagtttgtgtacctcgctcccttttgatacaggatatcctctctgggaattgtgtgtgagactcatctaggggccacttagagagcctagtctatctgccttatgctttgttttttatcttaacaagatgcacctgggtcgatcacccactgaaaactaagccatcctcaaagcgtgcagattggctcccattgggatgccgaagaggctaagcagcaggctctgagaaaattctcagggaggttacaaacgttctcacgatggcagcactatgagagtaagtgcccagccccccagagggactctcggggcaatgctcaggacatagtggactcagtggacacttactgagttactaatgaatgtttggctgtgtgggatctatgctctattaaaaataataaaaacaacagcaaaagttgcactaactatgtaacatataaagttgtactaccattgtctggaaggatagagtcagaatcttgcaaacttaaggacaattacggcccctcatgtcatagatgtcaccagcagaagggcctctctgaggtgatataattcaggagttgcaaatgcaaatgccttcaatgccagaaagtgtaatgattgaaagaatcaggccaagtgtgatgcaatagggatgggtggggtgtgtggcccactagcgtgggcatgttttgcctatatgtgttcatgatcatcattactaacccttgagtgatatccactgtagctccaggtactgttctaagtgctatccatctatgaactcgtttattcctcacaatggcagcatgaggtagagactgctgttatcctcgccttacagatgagaagtttaaggcagagaagtgaagtaaccagctagtcattgctggagccaggaactgaacccagctcctgagtctgggctcacaaccagtacattgccccagctaaaggctttgaattttcaaaatttctggaaaccccatgaagccaaaacaaatcacatctgcagaccagttttagcccttaggctgtgagtttgcaaccctagatattccaccaccctcatttatcaggaatctgcagcctccaaaagatgggaaacttgctggttaatgatagaagctgggagagaacacaggatcgatcccctcccaccgagcaggtttgcccacacagcgccctgccgccctgccaccctgccatcctgccagtccctgggggcagaaatgggcacaggtgggagcaaagccagcttacccttgcccagtcctgagatggcatcggtgatcaccaccactttgttctgcacagctgactttgaccacagcctggacacctcttggtaaatgaagaggaggccgctgattcccagcagcagcagggggagcatcagcatggccatgactcccatcttgttctgggggacaacggagtaaaaggggattggctttgcaaagagacgctgatcaggactcccagggcagggggaggcccaaggctgcagggagctcagctctgtgcaagcctccaagctgaacacccagtgggcgtgctaatccccaaatgttcaacaaataggaagttactcacagtgtctccgaaagcagaccgaatccagggggcctgccctccccagtggttaattacaaacttaattaaaatgggtctgcatttttggaagaaaatccatgtgttaaggccacttgcttgggccctaatggttatttatagctttcagttgcactaaaaggctgtcagggtaaatatagtgtctattctgatattcaggaacacatgctggccgggtctgatttcagggctcttgccaaagctctcctggcttgcctgagtattagaggtttcctctgcagtttgggactgagcacgagggatccaaacctgggattttcagcacaaacatccttgccctcacttccggtaaccctcgtaatcaggtagcttccaggtagtttggatgcatgtggcagaagaccatctggcctttgctttctaattggagatgaaaagcatagaaaactgctaaacagaatgaagccttttgcagaaagagccactgggaggtgtgacaggaaatatcagaaagagcacactcttgagagtgtttctcacctctctgagccttagcttccctgtctgtaaaatgggcaggaccaatgggaggacaaaccatactgcacagtgtgggcctagcatagatcccgggccgtaggaaggtaactactgttatctttagcggttgaggatactaagaatttatcccaaatgtgaaatattttcattacataaggaaactcagtaggattagaactggagagacagaaacccagttcaagtactggagccatcccaaaccagaaggccaatcacaatcaggtcctaatttgtgcggtaaacagcattgagccaatcaggagtaggactaagagcagtgtgtgtgcatgtgtgtgtgtgcgcgcatgtgtgtgtgtgcatgtgtgtgtgcgtgtgtgcgtgcgtgtgtgtgtgcgcacctgtgtgtgtgcacgtgtgtgtgtgtgtgtgtgtgcgtatgtggggggggtaaagaagactgtatttctttcttggaaattagaaataaccaggaagattaaaaaagtcccagaattttattgacacttaatgtacatattagaaacacacacgtaaatgtagagcttgatgaatcttcatagactgaatatattcacgtgaccagcatgcagatcaagaaacagaacattgccaacatgcctcatcatgtctctctccagccctgagggtagctacttcctaacttttaaaagcgtatatacagttttacctgtatgtgtattttctttgctcaaacaacctcttgtgtaaagtttttctttttttttttttttttgagacagtcttgctctgtcactaggctgaggtgcagtggcacgatctcggctcaccgcaacctccacctcctgggttcaagcaattcccctgcctcagccgcgccgagtacctgggactacaagcccccaccaccacgcccggctaatttttgtattttagtagagacgaggtttcaccatattggccaggatggtctcaatctcctgaccttgtgatccggccacctcggcctcccaaagtgctggaattataggcatgagccaccgtgcctggccaagttttttttaaataaattattatctgtgttcaatgctgctgattggtcaagtaacgtagggtctgagaagtgcctgtcagctttagtgatgtggagtcattggtgacattgacgggcacctctgtgtgaagactattgtgtggtttctgctctccctcagacttactgtcagtggctctgtcatgagccaaccctgcaagatggttcctgactcatccaaacccccgggacttgatgc

SEQ ID NO: 1243929 - DNA, 4001 bp, Homo sapiens
cctagtaaaaagcgctgctaaaaaacgtaaagaaaaggctaaaaagctaagggagtaccaaaaccaccaaatggactcttggtttgaaaacaaaatcatagcatgggtcatcccattcctgggccctctcctaataatatgcctggaactaatgttcttaccctgcctaattaatctttttcaaagatttttaactgacaggatcatggcaatttcacaaacaactacccaaaaacatctacagacggcattgctcctagtcaacccgagaccaggaaactctccatcccctcgttgcaggaagtagccagaaagaacatgccgtccctcctcctttttataactatagggtctggattgacaaagcaggaacatcaccatcttggacaagcccctcattcaaaagttcaccttaataaaaaaccgcctaaatccaaaaggtatcagcctaatggctaaggtcagcacgaccataaaccacaaataacatctccagccagaaacattccaaactcctccccgaccagagacatgttaagggataaccccactctggccgggaatatgccagccgggaatatgccagccgggagataaaccccctcgggccggaaaaatgtctgccccaagataacatcccctgctcccaaagagtccaaccctgccaaaaacttctccacacatataaacattccaagcttgtgataagccccctcaccctaacaccaatatatactcttagtctgtaagagaaagggctcctgaccgaaatcggccaggagcgcctctcaggttttaactaaagaaaagctgtctttaactgccagccgcgtttcgtgtttctttcctttttctttaactcttacaaatagctcacatccaaatccagtgggcatcacatccaagtccagtataaccggacttgactgctgcatctgctcactctctattcctttgactagcagcactcatgggtctccttcctctctttggctgctcatcctttccgtccttcagtatctcctctaacacgttggggatcataagccccatgaaatcagtccctgccccacaactctgcctcttttcatgcaccagaaactacaccttccctttcgaccggaatgtgttcaggttcccatctctcaaacgggctttcccccctgcctagaatgccctccctcccacacgacctccccagccgcctcctcacaaaccgggtcagatccactcttctaagatccgcaagcccccggtacgtttctctacccttttacgcggaaggtgagtctttgcctacacacgttggtcactctcaccgggctgtccagcgcctccagggcagggctgccggactcttcttcgaggcccctctccaggtctggcccagaaaaggtattcaggtttgttgaagccacgaacgaaagggattgagaggcatgtaagaaaaactgctctagctaagccacggacgaagtgcaaggaagagcccgccggcgcggccactcaccgatgaggaccgcgttgtccaggtttcggagctgggccaacagttgcccccgcgcttggaagatgggcagactccggcgctgcagctccacagcttcagggtagggactggccgagggctgggccaggggcggctgctgcctccggcctcctcctcctcctctgccgccgctgcccgcagtcagcagcatcaccacttgcctcccgggagggaaggacccagcgcggctcggaggtccagagcctggccggaatctcttggccggcgggaagcccgcctcctccggcatgtcgggagggcaccgcggcgggaggcgcaagcgccgagagctcctgccccctctcaggtgcagacaacaggagcacaccgccccttcctcgccgccacgtgctggcggctcccggcgaccaccgatgacctcacggccgccccagtctttagaaaaagggactgcatctcccagcatgccttgggggcttgggaaggctttcacttcctgggggtgggaaaagcagggcctgaggtacaaccaggaaaaggcccggagctacaaccgggaaacacaggatgtaaggttccgtgggactgtagtcttggttaacgaggtttttctcattgttttattttttttttttgagatggagtttcgctcttgttgcccaggctggagtgcaatggcgcgatctcggctcacactgcaacctccgcctcctgggttcaagcgattctcctgcctcagcctcccaagtagctggggttacaggcgtgcgccaccggggcccgtctaattttgtatttttagtagagacagggtttctccatgttggtcaggctggtcttgaactcccgacctcaggtgatccgcctgcctcggcctcccaaagtgctgggattataggcgtgagccaccgcgccccgcccattgttttgttctagtagcattacttcttttcagtaaacccgcgttttccccttctctgtccaaataacagtcactcttcaaggaaagtacttaattctgtaaaatcaatgagaagcgcaaacgtgcattgtctaatcctctaaacaacttataagttatgtggtatatactggttattagattatctctaatttacagattaagaaattgagtcatcttagtcattcagatgtccccaaatcataattttgtgatcatcttgtgttacagaaaggaaaaccaattctgatatacatgaatttaactcagaaaatgactcctccaacggatgtggtcgcctccagtaatacaagcagagaaaggagggagttcaatgaaattaaaattgtcttttatctttcctttcccccaaccattccagccagactctcaagttctctacatggctgtgcaaccccatcacagacacttcagtgaagattcagaactgcagcagaaaaaagtaggattataactagttcttccttaccctcctaaaagttcttagatgatttgctaatttaccacggagaatgccaagtagctgtttgctcttacaggaaatgtgatttccagagaatacaccgtaagcttcagctcatgtgaagggtatcttctgaagctcgtttccatgaaactcgccctgttaaatatctcccttcccgtgattcgtgagagagctagtctaaaaacaaaaaacctcccctttgctccaggtcggagataattttcctctagttgctgacagtttggtgaccaggcattactgaaaatgtgcacgttgaaccagcagcagatttgtgtttaagaataaactgacaaattttcacttcctaccctgaaatatttagaaaggcaacccaaaactacaagggataataaatgttaactctcaaattatggactttgagtaaagacatcccagtcctttttcccagtgtgctttccagagtaacttaaggtaggagtccgatgttccaaatgattacaataatttaggtaatgtaaatgggtggacttatttcttgatggagcacattccacctctacatgcagcccctaatcatttctaggcaatggctgtcatgtagacctattattgccagatcttccaattttctcaagaaaagccaaaagtgaagatttttatctgtcaatgttaaatacaggtttaaacttaaaaaaaaaaaaagtactgtcaaaacaaagcacataggtaggtaacaaatctgtaggtaactcatccataatctctggcctaatgatccagctattctatagcctcaaagctaagaggaccaaagagtggaaaaattaagtcctatatatgcatcaagccatgctgctcacatttctcccattggtagactgaaatctgctgtttctcctgaagaagtctcttggggttcaccagctttcatatgtagatactgacaagctaataactattcagagaatatcctggttcttccttcaaacgacgaagtgtcagacacatttcatttttaacttgtctgggatggtctgtgg

SEQ ID NO: 1243930 - DNA, 4001 bp, Homo sapiens
agggctgaggaaagcagaaacagaaaacaaaaagcagattgctcatttcaaagttacttttcttgtcaaagttaaagcagaggaaacttcttgatgctcctaaaactggtctgtttggggatttggctattatctctttctcctgatttctcagtagatgaaaaatttagtttctagacttggtggcgtggaacttcagtatgagtaactccattttggtttggtctgttgggtctagtgcgggggatcagtccaaaccaaaggcctcctattaactttacttaacgtattttaaaggtaatttgttagttggcttgcgctggcaaagtcaggggataaatatttacctgataatgctctagagaaagaaccaagaagtactaatggcagcaacagatatcacatatctcttacccctcaaaattatttcagtatccaatggttaatagtctactgctagacaactttattctataaaatggaatatctagatgtaattctatttgagattattatggtaattaaaaatgggaaaatttgccatcccaactaattcttgaacctgaaatagaccataaagaagcaaaggagacataggggaagggggtgtgccaagagaagcgggactataaagcaaatactgggcaatcatggagtacagaagtcctactggcctttaaaaagaggatatttttaaaatatttccaattattacaacagaaaaaaatcacctgcttcatatagatattttgggagttgagttgttttaccacttcctgtatttccagtaacaataaggaatgaattgtccctcacagcttgaataatcttttttctttgtttctgaataggaaaagttggagtagttcctccctcctgggacgtgcatcctttctcttctgtaataacagaaaaacaagtcaattaaaagacttgtaaagatatctctgactcaatttctcatgactaaaaccagaaaggcaatagaattttagggctggacgggatcatccatgacttctcagttaaatcgctcatgtaagtgagcgttaatgagcgcaatttgtaagtgagggttaatgagcccagaacaactttttggtgaaatccagcaacttgagcatttgttcacgcataactcaaagtacttttcaaagcaagtatagctcaaggcaacgtatacacatgcatacttacacagaagcacaaaactcaattttatttaacaatagaccaaaaactggaacacagcagaaaattctcagctggattagaagccacctgtgtttgcttctgattcatggttcaagttaggtccctgttcagagcgactgatatcccagaaggccaagtggtgggtaaccatggaaactggctcctggaaactggctcccttcatactgtacccaaaggcaggctggcggcccgacgaagggtgggggggatgaatgggtagagaacaaagggtctatgagcctgtttaagaacagaatgcatttcgggcgttggggttcactttttcgccccccagtaaggttttcgcctaacttgaatctgggaccgcccccctctaaggcaaagtgctcattggacgcaaagttcgcctcgggcttggaaagccaggagaacgccacggcttcctcactactcttctcagcctgccaaaggcgtactttcatccccccaccaaaacccccacgccgtaactcccgctggcttccgtaccgtcccgcggaccgcacctctatcggcgatgcaaacagccgagagccgctcttcctggaggtctcttgaccgctcaccctcctcctgccgccttggcgccctgcccgcgactgcgggaaaccgggacatagacctggccccgagtggaggcgagcacgtccaccgatctgaggagatgggaggggaaagacgaggacgcgccctgatgacgtagaggtgtttacttccgcgcgtgcgacttgtagcaaggggagggggagctgctcgatgacgtggtacggggcggccggacctcgagccgaggctccaccccccagggatttcccgccaactgccacgtgcgcttcgccttgggcggctgagccatacctgagggcccgaagaccccctcttgtttcgcctctccggcgccgaaggtcgcgacgacacctcttttcaacgccacagtggtctctgcaggctattctgccttcacacacttgacacgatgtaaccctctgcccggagctggaaccatgatcccagagtgctgcgttcctcaactcattctcacctttcctaatctgatatgacctgtccaaggcacacagctactgagttgtggagccgaacttttagttatgttattatcaaaacttaggtcaccaaggctgttcatttccctcataggaccctgcattttaatttatttgcatgtttcctcttctgcccagctagattgtaaagcccccccccacaagagtcgaaatattaaaacactgctacatccagggcccagcacagtgattcaaggtgggctgtcaatatttgttgactttgctggaatggaggaataataattgacttccttaggaattaagctcatttttgatagaggtgcattccttggaaaccacagtagctgaaaagttcaacagatacacagcatctgaggcagggcaactttttcagaaaaggtactttgggggcaggtctttctggtctagagcctgccaatttttaaattagtgtcaactgtaacaaaatcattgcaatgtgaacaagattgtttgttggactcctcaattgttcctgctgttagaattagccaacacttactaccaaagaagacaactcaaaactgtcacttcaccatcacctaaagaccctcttgtctgaccaggcttcaaaagatgtaccataaggttgttgggcccccagatttttctgtgctcatttgaagtgaagtcatggccatgcatggtggctcatgcctgtaatgccagcaccttggggggccaggacagatgaatcacttgagatcaggagttcgagaccggcctggccaatatggtgaaaccccgtctctattaaaaataaaaaaataaaaaaaattagccgggtgtggtagcacgcgcctataatcccagctactcgggaggctgaggcaggagaatcgcttgaacctaggaggcaggggttgcagtgagccaagatcatgccactgcactccagcctgggcaacagagcgagattccacctcaaaaaataaagtgaactcataccaactgcttttaaatggaactgatcaacacttcttaaaatgcaagctcatcagattttgaatgataccaaataagttggaactttgtaacaactttatatctcaaaacctgggtatgagaggaagcaatctggtaaataggagaacattccaggtttctctctttcattaggagcatctcccagccttctggatcatgttaggaattcaaaatattatagaaacagaaagcaaaatggcaaaaatacatttgtggtacaggcaaggtattggtaatctcagtatttcagtatagggcatctctatcagtgatataataaagtcactttctaaaaatcatcatttcagaccaatgatgattaccacttagctcatagtagtcaaatctttctgatacagttgacccttgaacaatactggtttgaacttcgcaggtccacttgtaggcagattttttcttctgcacctgctaagctggagatagcaagatcaaccctttgtcttcctcctccttctcttcagcctactgaacaggatggaaacctttatgatgatccacttaaacttaatgaatagtaaatatattttctcttatgattttcttaatgttttattttctctagcttgctttaagaatacagtatataatacatatacaaaatacgtattaattaactgtttatgttattggtaaggcttccaggcaatagttggtattaacagttaagctctg

SEQ ID NO: 1243931 - DNA, 4001 bp, Homo sapiens
ggttgatggccccatcgagtttggaggccccgccagtgcctggggaggctgtgagacccagcacctggggtagcggctgtgccctctggagtttaagttctaggtactggctcatgatgacgttgtagacggtgtccttgtgcgtgtggtggcactcatccaccacgatcagggagaagactgagggcacaggggggaaggctgtgacctatgtttgcaaagcccttcctcccatcagctttcaagtagtccccacaatgatgtaagaattccttcttcccttcacaacctgcagctggtcccaggatgaggagccaggcagggaagacttctttccatttcacagattagtaaaccgaggctcagctggggaagggactggcctaagatcctacacgatagcccggcctgtttctactagagtgcctgcaggggttttgtgaacaggcaacccctcactcccactaaaactcccaacaccttgactccaggaggtgccctggggttggcgaaaggaggtaccccagatgcgtatctttttcctcccggccatggccctcaccagtgagctccacgtgctcctcctcctcggggctggtcagtgccatctgcagaagctctgctgtgcagatgagcaggtcatggcaccgggccaggtggccaaagccagcacgtggtcccatgtccccactcagggttgtcacggtccagcgtccatccagcatgcgcctgaactcttcaccatgctgggtcaccaggtgcacctgggggtggagaatgagctgggaaaagagagctgaatctggggccaggggtagggaggcggtaaggtgacccgcaggacatggctgggtactgagccagggtggaaagacaggtgagcttagcgatggccacagcagctttggagttctggtggggactgggagatgcctgaagagctaagaccctgcttggtggtgggagagcggggtagggacagaccactcaccctgttgaccaatacaaccaccttggctccatccacagtctctaggtgccgcttggccacataagcagccgcccgggtcttcccggcacccgtgggcagccagatgatgatattcttgccctccagggcaggcatgatcacctcccattggtaggaccgaagctccattctgggaatggcaggggactcagacccaccgactcctccacccctcccaactcctggccagaccagtcagtacagagacctccctttgcccaggactccaccccacttgagggaggtggggcaggactccctcagaacccatcaggaccctgctctgcccaaaagggggaggcgggagtaacacaggctacacctgccccctgcccagcccaggactcacctgctctagtaggtaggtctgcccagggcagtcccacttaactcagcctggtgccactctgctcagctcagagacccaagatggaaactgaaactgagggaaggagccagctgagccgacttaggaatctcccatccccgccccaggaaaaagaaccaagagaaaagaaccgtttgtgctaacagtcatcgccaactgccgtgagtacaaactccggttaagtactgctgctgcgccagcgccctggcaggcatgatcacctcccattggtagggccacagctccattctgggaatggcaggggactcagacccactgggccctccactcatcccaactcctggccagagcagtcggtacagagacctccctttgcccaggactccaccccacttgagggaggtggggggggggacaccctcaaaactcatcagaagcctgctgtggccaaaaggtgggggtgggggggggtgggagtaacacaggctacacctgcgccttgcccagcctgggtctcgcctgcaccaccacgtaggcctgcccaaggcggccctgcttagctcagcctggtgccgctgtgctcagcgcagagagcagaaatcagaaatggaaactgaaactgaggggaggagccagctgagccgacttacgaatctcctatccctgccccaagaaaaagaaccacgtgtgctaacagggaagcactctttcagtgctacaggatcctctacgctctggcccttctgcagtcagttgtaaccacatccacccaggttaaggtgaaggcaggaggttctgacccctgctgccctggcatctggatcaggagcagcctggaggagggagaggtggggggctgcaggcaggtaggacccatcaccccaggagcacaggaccaggcctgaggcttgctggggagagcagcctccagtttgcaagaggtccctgggggccaaggtgagcctgctaaggctgggactacaccaaagaaacaatcacacagagaaataaaaagctttattattccctctaagggattaatgccagggaatgaatggtccccataccccccacccctgggggagactgacagaacagtgctggacaaggcatggcccccttcagtttgggctgaacttccaacccctgaagccatcactcaagctaaaatgagcagttctggtcctcagggaaacagccacctgggccaggcccaggaatccaagcctccaaagctcttggggaccaggcctgggggccaccacggctgggcaaggttcatccctggccaccagctactctagaggggctgggccccaacccaggagacctctcacacacagtgaaggctgggacagagctgcacgcttgggggtgcctgaaggtccagaaagagctgcaggatcgggtccggaggacccttggctggagtgtctcaagctgagtcgggtccgtggggccagggcaccccctaaggatcagatcagaatccgaggtggagacattccaggtcagggctgcggcccaaagatgggcctacttgtcaatgaggcctccctccttgagcttgaagtagaagaacttctccagggcgctggcacagcggcagtactcgctgtccggggggttgtactcgcgacagttggcgatgacccgctgcaggtcggccacaaagagcttccgggtcacgtagtagcggcttcgcagccgctcagtcatggtcttcaggtctggggcagcaggagacggagcacagctttaagaggctgaagaccacggcagggctgtccaccagggtgggccccctggggctgcagggcgcagtgagggcaggagcaggtgtggggacagaagaggagggaaggggatggaatggaaggtcctcaccaatggggaagcggatgacctcgtagtagtcaggggcctccgacttcttcacaggctccatgaagggccaggcactggggtgagactggagagaagagccgggctggggacagccctgctgcgcccacgccagcccgagaccactacccaccccacactgcatcaagaggccacagccattggtgcaggggccctggaaaggaaacctggtctccccaccttgatttgggccagcaggtttttgagggttgtgtagagctggtcggggtccttcagctccttcctggggcgagagacaccaagtctgaggctccaagtccctctgccccacccccaacccggctcctttgacactcaccccttctccttccccaatggcttccagcctgtctctcctgcaaagtgggaagtgggagaatgtctctaagaatgccagtccacaccccaagcatcgtgcccccactaccctgcaactgagacccctgcttacgaatgccaggaacgctctccacagggatctgcctcacgccctccttgaagcagctgagccccgggtagaccttgcggatctgggcctgtttgcgctcaatcagcttcttgatgatctgagggaaggaagggactgaggggccaactccagccccaacaacaacccctcccagggccacagtcggagccactggctgcacccacccagctgcaacgccacctaatccagcacctcccctcataact

SEQ ID NO: 1243932 - DNA, 4001 bp, Homo sapiens
gccaatgttagtacttttaatgttactggttttataattctgtatgtaacagaaaaagcatatttgtgggttttctgcaaattaattgagatctttagctataaataaactaaaagattatgaagtttatacttcgctctatttttgtacacaaatgaagttaacatcaaaacaattaaacactgggggttaatgtcaataacttttttgtttcttctaaaaggccaaggtattaggagttaaaatgaaaacagagagaaaggtaagctccctgaaagcagaaatctgtcttgttctctgtggtatgcctagcccccagctcaatatttgctgaataaaggaaacatattaacgagatagcaaaaccgacgaaattatcacctcattatcaactaaaagagaagaatcctgcgggaaaagttatataggacagacacatcttggctgggaggcaagagaaaaaagtaaactaaaatatactggctgcagggcatcttcctaaatgctatatggtgaccctgtgaagacatcgtcccacttcacagatgagaaaaacagcttcagagaaactatgaatcttaccaaaggtcactcgtctaacttccctaacccctcctgtcacctgccccttcccttccatccctccggttgatgactttatcttcatttaggaaactgaagagtgggctggaactctctcactcatcttcccaccaccaatctctaaactcatctgaatctgcaactgtattctctgtcctcgctcctgttacaactgaagaagccttgctgtacgtaccaaaggtcaatccatccattggttgcccttgatcccatccatcctctgtaccttcataaaggctccatctgtctatggctttagctttaggaccctagccttttctaattcctcagtttcggctccccagatgtagtttgccccaaaacatctagtgactggtgtttaagacatagtacaggacgcaatggctcacgcctgtaatcccaacactttgggaggccgagggaagaggactgcttgagcccagaagttcgagaccagcctgggcaatacagtgagacccccgtctctacaaaaaatttaaaaatgagtcgagcttggtggcgcccgcctgtagtcccagctactcgggaggctgaggtgggaggactgcttgagcccaggaggtggaggctgcagtgagccgagatcgtgccactgcactccagcccgggaaacagagcgaggccctgcctcaaaaaagagtacaggatgaacggtcaaagaacacagttaaaagcacagacgctaactactatgtcacagagtggcgtgaagaccaaataaaataatgtcaataaagagctgagcatcgcatctagcacatagtgagcacccaataaacgtcagccatcatcgtcgtcatcgcagcatctgctgctgttgttgttaaacatgtttaattgaggctgaaaaaacaaacaaaaaacaatcaagcagagatgaccgccccgggcttcactgacagctctgggaaagtttctaaagtttctcgagggctctcaagccgaggccacggcagcgtgtaccctgggcaccggtgtctgcgacagagagagacagattcacacgaacatactttcggtccatcaaccacctttctccttcctccttcctccttccgcttccctcaatcccaaactgaggtcccagggacctccccgagctcaccaaggtccttgtcgttgatccccaagtgattgtccagctcagtgcaaacctttgacaccaaagacaggtactcgagtttggcaagttcttccgcggggcctggctccgacccgattaaggctcccgccatggctacagccacagccatggctatagcttgcccagaacctccttcctcacagccggcgctcagagctactccggccgggttccagctttcacttccgggtcagcgcgcgtcccctttgtttacggtaaattgaaaatttgaggaacgaatcaagtcccaacaggatggatcatagagatcaaacaggaagtgcttaaggaagggacaactagagtgggttactctgcacgccgatctgcgccctctacaggcgagaaaaatctccgcccgccctcaggcctggaaacgttcactcagcgcgctcccgccctgggtcggcagagggcgaccccggcctgcacaagaggcgccgggaggcaaccgcaaaacagcctgcgcctgcgctttagaacacttgaaaaaggaatcttaatgcacgtctggaaaaagacaaacttgctttactgtggatccgcaaattcccggcctcacttctttgtggttcctgtcgtccgatctcaagtgacccttgacaagccagtaggcagtagattgccttctcttgttttacacacgaagaaactggcacttccactgccagctggctgcttgggcaaatcaatctctggggccttagttttctcatctgtaaactagaataatgttgctctaccctaaatggaataactgcaaggagtgtgacacagagtaggcacaccgcaaatgacagttactgttaatatcacaaggctaggccgggtgcagtggctcacgcctgtaatgccagcactttgggaggccgaggctggtggatcacttgaggtcaggagttccagaccagcctggccaacgtggcgaaactccatctctactaaaaatagaaaacttagccgggcgtggtggtggtgggcgcctgtagtcccagctactcgggaggctgaggcacaagaatcgcttgaacccaggaggcagaggttggagtgacctgagttcacaccactacactccagcatgggcgacagagtgagactttgtctcaaaaaaaaaaaaaaaaaaattcaaggctgagatgatggtcacagaactggcctctggtctgtcaagcacagatccccttagtctgggaacccacagagccagctgcctccactcttgtgaaaacctgcttttcaatccccagttttcctgtgtcctctcagaacttattcccccaggggctgggcactgtggctcacccctgtaatcccagcactttgggaggccgagacgggcggatcacttgaggtcaggagttcaagaccactctggccaacatggtgaaacctcgtctgtactaaaaatacaaaaattagctgggcgtgatggtatgtgcctgtagtcccagctactagggaggctgaggcgggagaattgcttgaacctgggaggtggatgttgcagtgagctgagatctcgccactgcactctagcctgtgcgacagagtgagactccgtctcaaacaaacaaaacacacacacaaaaacaacaacaaaccttattcccccaaatatcagctgtgctgtaagtccaaggtcataagctcaggtctcccaacttctgcttcaggtcttttttacctttgtggcaaccttaatgtgggatggggatttttcccacactccagtgctctgtgtgatgagtaaggaaacagaagcaccctaaagtgaatggctctccaatcaatcggaaggaggaaatcagtctcccacttttcactttggcaacatttttacactggtgtacctttggactctgtttcttcaacatctcatcatggactgaaaaatgacaggcagagaaaaacccagccattgttctcactgtctccagaagctccaggtttccaggttcctaaggaatcactactaaaccctctgagttcttcctacccctccccatttcgcttcctctttctccccatgaatagaatggaaaactctgcacttgatccaatgtgctcaatttgccagcttggagttacgatttcaagggcttattctatctgatgttcattctctgtgcttctttctctttaaaaattaatattactattctgctttcctccaatatttaaccggaaggaggaacagatagggagtttgttttgttttcaaagctct

SEQ ID NO: 1243933 - DNA, 4001 bp, Homo sapiens
gcctgggagaaagcccgaaacccacagaatgaaggacaagaaagtcgccctggtggagagagggtgggggctccagatctaaaggtcctcagcccccaatctcttccaaccatcctcacacgtgcacaatgcatgtgtacacacatgtgtgagtttgtggcagggaacatgtgtgtcctcagctccctcccatgaaaagctgcagttcccactaaatataaccccctccccagcctgtgactcacccggaccccgcctcccccggcccccacttcctgtcccaccccccagcccccagctgcctgccacccgcccaagcctccctccacacaccaggcatccagctctccagtcccagagtctccaaggagagcctaggtatctgcatcccaccaggagctcgcctgtgctccatccgagatctcctgcctttgccaggctccaaccagagggacactcttgcacagatccccatcgctgccagccctgccctcctcctacaccttttcaccccagtaacctcagtaacttcggtcataagccctcagggacccttaaatccaggtgtcctcccccaccttgatcccaagcgtcaggggtatctggaacagtccccacatctgctcttctccctctctcttgatcagggctagatacagtgtgggaggagatggggatattgggcacctgcctttgggccacccccaaattgtgcaccacccacccggtccccctcctcaaatcccctctctccctaagcctctcatcctcctcctcaggggctggcaagctcggctgctgcaatcttctgcctcctatgggagtacccccaaatccttgcctcacctggtccattccctcaggtgatcccatgccagggccccagccctctgacaacttccaactacctccattctatatgactgaaccctaaattaacagttccctcaaattgagagagcatccctaaatgcagccaccacgagatgcttgttctagagtctgaaggcccaccccttccctgccagctgacacccccagatcagtcaggcactcacaaccaataacctttaccccatgccaggagccccccaaaactggacaaggcccttggaagccagcttttccctggggaggaaagaggaaccccccaacatagcccaccttcccacatacaccagcaggactcccttatgagccaggcttctccttaaataagtctccctcaaacagcgctgatgaacccccaaacccgccaggccccccgaaccatggaatatcctaaattttccatatccctacaggtacaaagggatcactccagggggcacctgtggccaaatcctgcattttctcagatgtgaaccccaaaactaaattaagacccccaaatacatcttacttctgatgctgccactccaggggcgccagtcccagataaggcctactaacccctccccacaaactcataccctccccccagtttatagcccccccatcatgcttaccttggttgtcactatacagagacagtccatgttggggggcctggccgcggcggcgggtaaggggctctgacttcatcggagtttcgttcctcccctccgtgggttctcacccctcccccctccgcaccccacttttgcagggggggccaggatggggggaggggtgagaggggaaggagggggttggagaagggaaggggaggggagcgtgggagggaggggaagggggccctaaaaggggctccccagtggaggggagggggcttggggagcacaccccgattctcaggaggggcgggggcaccgggggctggcagccccggagttcgggggctggggcatgagctggggtgggggaggggaactggatttcggggagccccggggtaggggggggtcttgccaaacggccaggggctaggggccgtggcgggggagtggggtgggggggttggaaacggcagcggccgagggagccgtggagccgaagagggaaggggagagaggaggagagaggaagcagggggagggagggagggagctaggagccagaatggggggggtgccttggcagagttaactccttctgtgctggcaggaacccggataatgggaaaggagatagaagcagaagcacagaggcccctgaggcaaacatggagacctggccagccaccagcgatgacagcaaagacgatgaggctggatttcatttcttagagaaggaagcatctatagttgggctgggagcacccacggttatttgaatacgggagggaggcctctcggcaggcggtagggggtcgggtgtgagggaggagctgaaggaggcaatccctgggggcctagttctccctcaggtttctcagggggaaacctaaaaagttaagccctagactctttagtgcctgaaactggggcagccaaagaaaacgaggaagaaagggagagtgggtacaggaccacagagagtgcattctcggtgccccaagtccctgggccactgactcaggcttttgtcagcagggcccccaagattccaggtaatattagtgatatttggctcacccctccagccctgcctgcccctcaggaagttaggcgctcgcccccacctccttacctgactctctgagagggaagcctcataatagtccaggatgtctgtcacaggaacagaactgagttacctccccaccccaggcctctccaggcacatcacccctgtcatcaccgctgctggctggctggcaagggaggagccctttcagccaaggctggtccacactcatggaggacaccataggcaggaccctgcatggtgctccagcttggaccaaatgatctctgggctcccaaacagcccccgaagttcagtaatggcccttggaggcccaggtccctcagaaaacgggctactcacccagcaaggcctggaagaggtcgctatgcagcactgtgaggagtgggggtgcccaccgcagcagtgggggtgccaggagccagagggctgacctgggagctagtgagatgcaaggagaattgggacagggaagatgccaacacaggaagatgaacacactgtcacttcatctccccagactgtgcccttcaccccagcccctacggaaagatttggggagaaggatctccgagccccagccccccacttcgctcccagacctcccctccacaaggagccctgtttttcacctcttggtctctgggacatctctctcttctctcactttaatctccctaatcctccaggattggagttgagctgcttctccccactaaattccagctgtgagtaaagtaggccgtctctgagccgaccagctgtcccattcccccaggtcccaaggcaccagcaccgccaccatcttgctccacacaccctggccccctcttcccataggcaggcagaacctagccacgctctcctgagaagccagcaaagagggcctcctcacagagggctccagcagctcaaaaagaagctgagcccagctctctctcctcctgggcctcctctcaccccaatgagaattgcagaaaaaggggtagaaattgtttgggacttcctgccctagggctagagaagttggggttttacgggtaagaggcaggagaattcctgcagttcctctcaggcccgggaggaatccatctgcctgggcacatggtctctggaaggaacagagggcaaagacagaagggaatgttcaggaaggtctcagaggctttactaagggaggggcagtgaatctgggggggtcttcctactgtgaaactgtagctgttccaagagttagtgaatggcctacatctcagaagaatacacttagggtactcacaccctagcttgggtgccccccaccactgtaccctcccttttgtgttggccgagatagatttcatcaggaaccctagagtctgtctttccatgtctctgcctctgccatctaccttacacttctctttccctac

SEQ ID NO: 1243934 - DNA, 4001 bp, Homo sapiens
cgaggaagaaagggagagtgggtacaggaccacagagagtgcattctcggtgccccaagtccctgggccactgactcaggcttttgtcagcagggcccccaagattccaggtaatattagtgatatttggctcacccctccagccctgcctgcccctcaggaagttaggcgctcgcccccacctccttacctgactctctgagagggaagcctcataatagtccaggatgtctgtcacaggaacagaactgagttacctccccaccccaggcctctccaggcacatcacccctgtcatcaccgctgctggctggctggcaagggaggagccctttcagccaaggctggtccacactcatggaggacaccataggcaggaccctgcatggtgctccagcttggaccaaatgatctctgggctcccaaacagcccccgaagttcagtaatggcccttggaggcccaggtccctcagaaaacgggctactcacccagcaaggcctggaagaggtcgctatgcagcactgtgaggagtgggggtgcccaccgcagcagtgggggtgccaggagccagagggctgacctgggagctagtgagatgcaaggagaattgggacagggaagatgccaacacaggaagatgaacacactgtcacttcatctccccagactgtgcccttcaccccagcccctacggaaagatttggggagaaggatctccgagccccagccccccacttcgctcccagacctcccctccacaaggagccctgtttttcacctcttggtctctgggacatctctctcttctctcactttaatctccctaatcctccaggattggagttgagctgcttctccccactaaattccagctgtgagtaaagtaggccgtctctgagccgaccagctgtcccattcccccaggtcccaaggcaccagcaccgccaccatcttgctccacacaccctggccccctcttcccataggcaggcagaacctagccacgctctcctgagaagccagcaaagagggcctcctcacagagggctccagcagctcaaaaagaagctgagcccagctctctctcctcctgggcctcctctcaccccaatgagaattgcagaaaaaggggtagaaattgtttgggacttcctgccctagggctagagaagttggggttttacgggtaagaggcaggagaattcctgcagttcctctcaggcccgggaggaatccatctgcctgggcacatggtctctggaaggaacagagggcaaagacagaagggaatgttcaggaaggtctcagaggctttactaagggaggggcagtgaatctgggggggtcttcctactgtgaaactgtagctgttccaagagttagtgaatggcctacatctcagaagaatacacttagggtactcacaccctagcttgggtgccccccaccactgtaccctcccttttgtgttggccgagatagatttcatcaggaaccctagagtctgtctttccatgtctctgcctctgccatctaccttacacttctctttccctacttttcccttctaaccccaccggagaagccctcccttcagtccacctccatccctctggctgcagtgacttaagccccttcctcttctgtcccatcctatcccatcaccccgtcggaggactagactctaggtcggacgggcgggattaaggagtttgggggagacgagggacgcttggagatccctctaagtcagcggaacgcagggccgggctccagggaactacagctcccagcatgccccggggcccgcaaccgtccgccgcccggtgcactgtggacgatgagtcagggttaggggcgccaggacgtgggcgtgcaggacgccagagctgggtcagagctcgagccagcggcgcccggagagattcggagatgcaggcggctcggatggccgcgagcttggggcggcagctgctgaggctcgggggcggaaggtctgtgtgtgacaagagggacggtgggcagcggccctgggcaccgggccggcactgaacccccactccccacagctcgcggctcacggcgctcctggggcagccccggcccggccctgcccggcggccctatgccgggggtgccgctcaggtaagtcaccgcagccttggcaagggggtgtgggagcggcggtccgcttcggcgcccgccatcggcagggatctccctcttggtgccaggtacctgcctactgctcagtcgccgaaagtaggggaaagggcaagccagggtgccctagggcgaaactaggggaaaggtcaccgcttcgcgccgcctccccgcgcggctctcgcctgttctccccttgacacagcggaagtcccttccctgaacttgctaaccgtctcttttcccagctggctctggacaagtcagattcccacccctctgacgctctgaccaggaaaaaaccggccaaggcggtaggtagccccgaggccaggtggaccttagccagacccaaccagagccctgaaatttgcctctctctgcccaggaatctaagtcctttgctgtgggaatgttcaaaggccagctcaccacagatcaggtgttcccatacccgtccggtaagggaagggataatcagagctgggtggggccagggtggtttcccctgccagcctggcctgaccagcctgtcccccaccctctgcagtgctcaacgaagagcagacacagtttcttaaagagctggtggagcctgtgtcccgtttcttcgaggtaaggaatgactcggggcttggtccctggtgaggtgtttggagatgttaagctcaaaaggagcctggatgtgggatcctgtgccttccccaggaagtgaacgatcccgccaagaatgacgctctggagatggtggaggagaccacttggcagggcctcaaggagctgggggcctttggtctgcaagtgcccagtgagctgggtggtgtgggcctttgcaacacccaggtgagggcgccctatcgccacatcccagtatgccataccccagcttggcagactcagctcttttgccatagacctagagactagggctaaggtctcttctaagcacctgccctgggtgcctgtgggatggatgttaactgtccaaacataacacaatttacatgcagtcccctaggcctgagccatgggcctcaccctggttcccaagtccttacaaatctctaagttggggattgcctaacaatagactgactagtagcaagtcaccctcctacctagacctaagacagaccagcattctctgctgtgccctttgcacaccccacttcttttctacacactggggatggcccaggtcaggcactgccctaggtcaggaactgccctaggtcaggaactgccctgttgcccacactctcctgttaaggtcaggtccccctgcagccagtgacaaccccagattcctgcttcccctccagtacgcccgtttggtggagatcgtgggcatgcatgaccttggcgtgggcattaccctgggggcccatcagagcatcggtttcaaaggcatcctgctctttggcacaaaggcccagaaagaaaaatacctccccaagctggcatctggtgaggcaaccctaggagagccagggattggggggcacactgggcttggcacagattaggccagttggcacttagattatcagatggctgagcatttcagttgggggaaggttttggggaggcatcacagtgtgctggttgggacatgcaaaagaactggatactcccaggtgttaagggggaactgcctgctggagggatggggaagtgggccgaggggactttgaagctcatcagaacttggggtaaagtagctctctccccaacaggggagactgtggccgctttctgtctaaccgagccctcaagcgggtcagatgcagcctccatccgaacctctgctgtgcccagcccctgtggaaaatacta

SEQ ID NO: 1243935 - DNA, 4001 bp, Homo sapiens
tgtacacgtgctaacgcagaaccttcccaccgaagttgaacctcgcaggcccccatcccaaaggcaagagttccaggagcccgcagggcccttcagtggccagccaggctcggcagcgcgcggggaactacggggtcccgcgcgcccccgcggccctggacagccaaacaccaacctgtgtctgcgtgaggcccagctgcgcggccagctcggcgcgctcgggcagcgccaggtactgggccttctggaagcggcgctgcagggcggccagctggtagctggagtagatcgtacgcggctttcggaccttcttgggcttcccattcaccatgcgcacctctgcttccggctcctccttcaccgacactgcggggaacgcaccgggcggaagagggggcggttcagcctcggcctgcgactcctgcgaccctccagggccccgccggacgcccctcgcttccgcccaccgactcgccgcgggattcccggccgcgcgctccgctgcccgcggcccaggggggagccgcggccccagagccagaactggccgcggcccacaacgcggcgctcccagctccgcgcccggccgccgcagcactgtccccggcgccagccgccgcctgcgccaggaccgcctcggcttcgctcacgacgccttcccggctcgcctcccagcctcggggctcctcgccgcccggctgctagccgcccccttcccagtcccatctcgccgtcggttgtttctctcgctccttcccgtccgccccccgccctttaaaaaagtttcattttagaatctctttagattttcagaaaagttgcaaggatagtgcagactttctttctttccctgtcccccttcttccccccttccttctctccttcctttcttgtttcttctgccctttctctcactgtctttccatacttccctcttgctgccttcacttttccctttttcagcttctctgcctctcggtggctgcttccctccgctttcccgcaacttccgtgggtccttctcattgccccctcacgactcctagtctccccatcccttatccaaaggagggcccctagagtttccagcccctgccgcctacccccaagccctctgcgacttgatcgaggatcgcctgctgaaatgcccacgaaatcacctcgattcggaggtttcctaacaacccacagccttccccttcctctctcagctcatcccgatcctcatccgggaccgcggcgcactgcgcacatcgcgccccaaatgcttgcacacccggggctggaaggtcgcctggtccctctgagggtcatctaggccaacttctctaactccagacagtacttttcttagaagttttcctagattttggcttccagtccatgccttttcctccctcgggaaccttccagtgtctcccactgtcctcgcgaccccgtggccctcacctgggtcctgggctggcagcggctgctcccgatacgccccgtattgccggtaggaggctccgtaggtatattccgacttgggcgagtaagcgcccgtgcctgcaagcccattgagattgaattggtggtggtaggtgtaggggttcaccgtctggccatagggctggcccgagtagtaatcgtgctggggagcgctgtagtagcccaggtcagtgacagaagactcgggcagggtaggcgagtccttggagcccgcatggcagctaagggagctggagatgtcggtgaggatgctgctgagcttgcgatcgaaggagccactcatcctggcgggcgctgcacctccccagggctggcctccgcagaggacaggaacggaccggagtgcgagagaggcggaagagacgaggcaggggtgtgtgtccagaaggcgaagggaggacccggccgcgtctggggggagggggaggccgagaggcgcttacaccattgcctgccgtcaggcggtcgctgcgcgcctctcctcgcgtcccaagccacaatcaaatgctgccagctccgcccggccagccggttatagactcaatagtggagtcgccgagggaggctcctacgcgctgattggctgcaagtcttgccttccaggcaaaacacgcttttgctctctcgctcctatgctctcctctctctctctctctcccttttccttctctcctccctcctctctcttctttttccccagtctttgttgttactcaaaacacacacacacacacacacacacacacacaccctcgctactcttgtagctccagcccagataagttctctgaaggaggggcgtggaggtggaggggaagggttgctctgtggagcccccaggatctgtcagtctgtttctctggctgggggatgagagatgggcttaggtgaggtgggcaaggaggggagtttgcccattgtgtgtttgtggaaagagatggtctaaggtggggtatggttgtgtgtgtgtgcacacgtgtgcacgcactgtgcaaatgacaggcacacaaatgtacccaaagtggtgaggactcacagcccctgaaaatggtttctcttaaaatcagaagaaaaggaaaacaccttttaggtgaaagagaatgtttgaatatatgatattaatatattatcttaatagcaatgcagtcattgctattatatccttgtattacataattacaaaaacgtaatttaaaaaattttctttttatttaggaaggtgcccaccgggcaagaatgtcttgagcctatgaaagacataatttagcactaggaggatcctattggagaaggggaagcagacctgtgtggatttagaggttgttggggatgtacagcctgtccggtgataccagaactatctccaaagctatgtatgtgcagtttcacagatggcccagtcttgctgaaggtagcaagggacctggggtccccacgaggttgggtggacacaggctggctctgtgactgtgtgcttcagtaagtctgagggcagattttgtgtatcatgggacagcactggggaattgggacacttttggggactgggtgcatgggacgagtgtatttggggtgtgtgatgtgaggatttcatgtgttccacagtatccacagaggtacatgcatgcaggagtgtgtcgggggcggggtgcaggcagcatgagtggagggccatccgcgtgtgaacatgtggttgtaggcagatgtgtctagaccgcttagtaccttcctcatctccagtagctgggagctgtactgctccactgaattcctcctgcaccagaaaagccctgaagaatggctcccctctgtggggacccccagcttttagtcctgtctagcccaccaagctgggccccctaggtcatgctagctgttcccaacgtctagctcatccctgcctcccacaccccattttgcccttcgcctttctctgggggagagaatccaaatctcagttcccagcctgcccggctcgctccgtcgaccccacgtccactcgccctgcctcgccgggcgaacgcagtgctagcgcgccacctcgtggttccttcgagctctgcagctccccgagcccggcgcccggccaagcctcggggaggggtttcctccgaagaccctgcctggcagagcagtgtacagggggctgtatgcccctttccaaagtcagactcgcgcagcaggcttccggcagtccaaagggctttgagagctgcagttggcagaaacagagggcacggtccgcggactgaggggcaggggtgagtgcccgcttggtctgggccactcccggaggccgccgcgtgggaaaggtgggggcgggggcgggcgaggggagcgctatctgtctgtctatctccgcgtccccccagcgcccagcgcccgccgctccgagcccgtggcggggcgagttgccacccgctccgggtgccctctgttctgctgccaagagggcgccaagagagcctgcggcgttgggggcaggaagggcactgggcgggccggctccc

SEQ ID NO: 1243936 - DNA, 4001 bp, Homo sapiens
agtgttactttaccaggtttccaaaagtgtgtgcccgtgggttcgttagggattagggatggggaatagaagggagcctctcaataaatacctattgaattatatggataattggatccattatctattcaaaaaggggagatggggagggggtgggaaagagggctttttttttttttttaggaggaaagcataaattacccataggtccacaaattccacatttctctgcatctcttctacctcccagtatggtaagtaggtaaatcagttatgggggtaacgggctgacctccaaggaaaaatcgctgggtgggtgggagctgatggtggtccacttctgcttttgctcacaaatgggttgtgcaaggccaaaggcatacaaagaaaaaaaaatactcaatgtttcttgctgattttgcacccaggctgtagtggcgattcagtccttttcaagaaagcagggagaggagaaagggagagagggaagaaggagtgggggagtggcaagaccaagggttctggggacagtctcaactccagccaatggctctctctccagagtctttgtccagctggagtgaaggtgtccagtccatggtagtggtggggacaatgattatataaggctgaggtccttgatttagctgttagggttaggggtacaggctctgctccattcctttttctcctctaactgcttgtcctccagagaaaacccatctggagctggtttcctcccagcccagaaggggtgcaggtggactgcctgggtcctgggctttgcaggaaggctgtgggcctgacccgcccttccccagattcacatcatctgaggcgaagccaggacatctgaggagtgatgctgataccaggctccaaagctgttgccatagccactggtgggcagggtccctgccttgggtagatcccagagggaggggaggggtggggagcagggagacacagagaaggtcctcccagggaagtccccttcctgccccccagaattctgcttcaggagcttcttatacttggagcgtttgttctgaaaccagatctttaccttcgggaagaaaaggggaaagaatgaaagatcaggaggaagatatgtgtgaaaagtttcgaggaagggaaagggatccaggtgcaggcacagtcctgggagaccagcagttccctaggctgggaacatttgcttcagtcccccacagccccaggagccttctgagttcctgcctctgagctagtatccatgtctccctgtctgacctaccctcctcttcctgacccactccaccccacccgcacatacatgcacacctttcaacacattccccccaaggcttactaagagccagctatgaacattccctggagaactgtgacaacagggccacagcaccaatccatcagtcattcacagctggggctgggggatgagttcccagagaaccagggaaggtgagagatggggaaggacgacactggccccacctgggtctgggtgaggccgagctgcgctgccagctgggccctctcgggcagcgccaggtactgcgtgtgctggaaacgctggtttaggtgctgcagctgcaggctggagtagatggtcctcggcttgcggagctttttggcgggggcctgagggcgccgctcggagggttccggggacagccgcggcttctccgagtctggtgggcagcacaacacggtgtagggggcgaggagggagcgagggggtaggacggacagtttcataagcttatttgcatctcgtctgcatgccgtcggcagcaaatagcaaaaagcgcagccaccaggatcgcccccttggcccctgccctctaccttccgcgtggagcgtttcaacccccacgttcaccgcgccaggtgatacaagacgcagttctgctcccagggagctcccactcgtatgggtcctgtgaccctaggaagaaagcgccgagggccacagccagggtaccgcggcgcctgcggtgggaggtcggagttcagccacgggcggtggcgccagcttggggtagggcggggcagaaaggctaggtccagggctgagccgaggcctagagatgacagaggaaggacattgcaggcagaggctcagagcaatgctcagaggcttgagacggtgtccgcgtggcagcctccggctgcggccagcggggtgggtgagaggcccggctgagaggaccttgaataccagtctcgcagcgctgatagtgaccccgggtttgccctggcctcgcctactgtaacgggctgcccctctgctcaggcgcaccctgcaggaaaagtgaccatgtctcccccgccacaccgtggccgcctgggtttccagggacccccagaagccgggtctgcgtggggcagccccttccttcgttgggcagcgcgcacagagcggttccggcggcagggaaggtgacccgggttccaagagcgcgcagcgtagcccggcggggccactcctggatcgcgctgcggtgccgccgcgggggatctggtcagctctggcccgcctagctctccaggaatctcggccgcgggacagcccagccctagaatgctgagggacaggggagggttgggccgaggggtttctgttcttccaagccagccaccctaacctgcgcggctctacggggacgctgcagaggtcccaggcaatgggaggagtagggcggatggagcagccgcaatgcccgggcgcttagggcagcgttcgccgcattccctgcgggtctgtccagccgacctgagccgagagagagcggcttctgtccgcccgcgtccccccaccttcttcccctagtcgggctcaccctccacacgtcagtgtacccgccctcggccagccgcggtcaccagctgccgtcacctcccccgcatccctcacccgtggcctcgggcgctgcgggcttctgagatcctccctcctcgaccctgcctcaaccaattcccagaaaaaccgttgggtttccgctcccgcccgcgcctgtcctgcctcccctgcctcgaccccactgctggcagctctgggctggcagcccagagcccacccgcgcctctctggctgcgtggactgcgcaattcgagcggggacgcagagtctctgaggccgacccggttgctgaattcgcatagccctccgcgccccaactctcccagcagaccccctccaagttccttcccggacagctgcctttccctaccccagttccagcaagttacgagatctgcccgggtcgcgatcatggagccccaaggcctccctccaggcccgctgctccctacggctcaacggggtggtggcaccgctcacttggagccaaaccttttcccaaggcaggagtggacatagagtggaagtaaaaggaggaccccaagctctcgatcacatgccctccactctagagcgcccaaacccaccagttccagcagagaaatgctagaaatgtattctaaggaaatctgggtgtgtgtggtttttcgctggatgggggaaagtccttaaagaaaatgaactctccactctgttgtccttagatctcagacaagactgacaacaccaaccctactgccagcaattcccctgaggacaaggtcatgatattcccaccccagtccccaaacacataacacacacaaacatatcctattagcatacactaaaggacagtcaaagggattcatttgaaaaactagaactactcctccctgcaactgcgcccactccagccacactccgcagcccaggagacagccacagttctgtcacagaaggcagttaattttgggggggttggaggaagctccctaaaatcgatgctcctggccacatgctttacccatctatacatcaaagaagttgagcttctaaatcctagggtcacttctggctctgatggtttgtgagcatgtcagagccacaggagaagggaggaagatgtcttggtcctgagctgactccagtgaag

SEQ ID NO: 1243937 - DNA, 4001 bp, Homo sapiens
agatctcagacaagactgacaacaccaaccctactgccagcaattcccctgaggacaaggtcatgatattcccaccccagtccccaaacacataacacacacaaacatatcctattagcatacactaaaggacagtcaaagggattcatttgaaaaactagaactactcctccctgcaactgcgcccactccagccacactccgcagcccaggagacagccacagttctgtcacagaaggcagttaattttgggggggttggaggaagctccctaaaatcgatgctcctggccacatgctttacccatctatacatcaaagaagttgagcttctaaatcctagggtcacttctggctctgatggtttgtgagcatgtcagagccacaggagaagggaggaagatgtcttggtcctgagctgactccagtgaagtcacctaatgggtgtgcctccttggaagagactgccaaagacaattgcaggaggagggggtgagcaattagatggaggcagagagtccagagacctggaggctaagctggagccagtgcagatgggattgtgggcaatgccatacccacattgtatgtcagctcagctgcaaggcccaggatcccaaagacgggccaggttctccgcttcattgaggccttccagtgagcactttctcaggagctcagagttgctccaggcaacgggaactgtggcctaacctaccccaaagccaaagagtggagatgacagcgatggccggctcctttggctggaaggctgaggtagtcagggagagatgagcgactttcctaccagcctttggctaccttctcagaacaatggatagaagggtcctactcccagattctgccaggccagcttccagtcaaggtcaggcctggtctgaggagagcgggtaaggccagggaagggagaggacagagcccagaataagcctcgatgtctacagccctcctaccaggacttgatctgtttttcagtgtttggcttgatcactgctttctgagacaagactaacgcagagaggggcgacaatggggcaggaagggagtacaggacgggggctgggggattctgacaaaggggctaggcccccatccccacatctggattgcttcagttttccgttactagtaggtacagacagccccgctgctccaggtggggggttgggggggccctctcgcctgtctttacacaactgcaaatcgaaaccaggtcggttttgaaaggagacctagatcaactctcccccgcccctccccccgtgtctcccgccccatcccttcgccctccccccacccccacatcccagggaatccaaggaaggtttgaatcccgctagctgcgtccaaccaggcgagggagaagtttaggggcgcacaggagccgaaccccagaggtgggaagagcctccacggccgaacttacctgcctcgagttcctgagggtgctctgcaggtccgcagaggggctgagagagcgccgcgggttgctggcaggacaggtaggagtctccggggttcgctggctcggtgtaggggtaagacaggaggtggccatacggcctggagtaggacaaattgggggaggctgcggttgtaggggacaagccaagcgggtaggcagccgctaccgacgggacaggggcgaggtctgggaagacagctttggaggcgtcccggccggggagggggcagggcaaagaggtcattgtggccagggcccgggcagaagggccatggcccggcacgtagtccgctcccgctgccaactctcttttccaagcctccggcgttgggccggacgggccccccagccagcagcccccacacttaagatcccggagaaagtgtctctctgagcctctttcagcggagaacgcgcgcctgggaaaggggttccgggggggtgccccccatgactttcccctccccccctaaatccatgggggccccctcctctccatcgggttcggttcccgggacccgacgggggccccgccctcttagacgtcccggattggctaccgcccgcggtgacctcacggagacttgcagccgggccccgccccccgggacagcccgctgtagagaagtggtaaatgggagaggggcggtgcgcatgctccaggccggtctacctcggggtctcctccgagaggtgctggggttgcagagcgattggtgcagtccaggaacctcggttataatggcagaaatgctagagaggtggcgagactggatgcccaagagacagggagctgggtggtgggcagaggcccgggggctgcggagacgcagggaatctgcatttgcagtctcccgatttcggggatctgcacgtcgattctggtccagccgcggtggacctgaaggggagtcaagtgcagaccgccagcgccaaccgcttagtcagcgcgtcggaatgcgccgctgctgagcgccggcagtttgttggtaaatagacgccggggctgggagggtgccgcccggcgcccagcctgccccgcacgcgtgtggcgcgcacgcccccgcggggcgccctgggcctggcacgccgagaccgccgccgctgcaccccaccgccctgcgtgctggcttccgcttccggcaggggccctggtttggttgcgacaccgcagctccttgcaggcccccgaggctgaagaagggatccgccctctgggctttagcctgtgcggtgccccgccttacctggcgccgcagggggctgaagtgttgcttgaacccggacgaaatctgggagtgggagatgagtccagttggatggctcctgggcgggcacaggaaatactgcaggccagtctccctggcgcattttccaggctgtgttcaggacttgcttctaaacattagtatccatggcctcgatggacacgtgtccacgtatacaagcatttattgacacgtgtacacaactacacagggactccattcaaatacaacatgtatactcacatataccaacatggaggtacctacactgatgttcacactagcattcctctataaaaagagaggttcatttgtaaatctgcaaacactttaggctgtgatgtgtatacatctacatacctaaagatgaattagcactatccctaaataaaaacactatctagtacttgtctcttacatggattcatgagtatacaagtcaaatcactggtgtacctactagaaaatacagaagatccaagcatataaaatgtatacttgtgttcctgctctatgagaaatacctgtccacacacatctaagatgccttatgttagatgtgtccctaaactgccagtcttcacaaattccccagcatacccaaacacctgttcccactttatgcaactgggcaggcatattcatgtttgtacacacacacatgctctcattgttagcgttcagagtgaaggtagccctcgtagaactgggagatggaagaggatggtgataagaaagagagatcaggcaaggtggctcaggccggtaatcccagcatttggcccaggcaggcagatcggttgagctcaggagtttgagatcagcctgggcaacatagggagactcatctctacaaaaagtacaaaaattagctggtcatggtggtgtatgcccgtagtcccagctactcaggagactgaggcaggaggatcacttgagccctggatgttaaggcagcagtgagttgagatcatgccacttcactccagcctgactgaccgagtgagactctatgtcgaaaaaagaaggaggaggatgaggaggaggaggaggaggaggcagcagcctggaagaataggagaaaacactggctggggaatggagcccaagcctccttagacaaaatcaatcaaatgggtgtgcaggggtggttgaagttcagtcaggtgtcctgcaaggaggaagagcaagtctatttcaaactagactccccagtggaatagatagaggtgagtttttccaaggag

SEQ ID NO: 1243938 - DNA, 4001 bp, Homo sapiens
gaaatggccgcaaccagacagtgtgaaggggatggggtaggaaaaggcagaacaagaggctggggggtcaggttgaaaggtcctgggaaagcaataaaagacgtcgcagccccagagtatgtgtgaaacgcaagaaggaagcagaccccacgtgcaggccgtgaggctcagcgctcagtcttagccgcagccgtggtgcaccttaactttcactctgctctgcaccctttctccctccagcccccagcgtgcacccctaaaagaatcgagctgcaaattcctgacagacccctcacaagctgctcagatgctcgggggtagggttaactagagaattggggggaagggatccccttaaagaacaccctgaagtcccaaagtttaggcaagtgaggtacttacagaatttaaagacacacccaaacagtcatcaagagaaaaggcatgtcaatatttttaaacatcaaaatgaatgcaaacaaatttatgaacaaaataccaaagtttcaaataaagacaggctctggcaagaggcctgaggtgggggccttggaggcgagttctgcaagggcagggttgaatgcaaagggtcgcctgatgctgtgttttcatcacaatctgggaggtatgcagctcctgaatttcaaggggaaccctggggtattcagctgctctgggggtccgtgggctggggctggcctgctccagacctggcagctgctgaaaagcatcagggtggacagatgacgttggaagcactcacaaattctgccttttggtttgacccaagctattgcttttaagtttgtaacagcctacagttccccaaaagacacgtaataccacggaacaggtttatttcaccctggccactatatatcggcaaaacaactatatgatgggaagcagtagtggatagcatttggatgctattcaaatggtctgagatttattcaaggctccaaacatctctgagagaggacttggggaatatttggccagcaaatggcagaaacatggcggtccacgagcaaagccacccgattcaggcacatctgtgaaagaaaaaggggacaccaccaggcaagtaggaggagcaccgcgtggcatttatggagatgactcgttcaccaggttcccacagggctttcagcatgctgctgaattaatctccacccaggatctccgagacccggggacgcgtcacgtcgtcatttcctagggggatcaggaactcaggggagcccgagtcctggaaggttcctgattggaagtctcgccaagctggtcaggcgactggactggagggaaacatcctctggtttactgattttgtggatttgggctttcacaaagtcatcttttcttccaagaacggcatggggtgggctgcctcccaagccataacatgtgtgggctgaggggcccctacaccccgcaagtttcttgcacgatcgggaggtctcatctcaggctcccacccagccgtttcctgggctgaaggccaggaggtcccagttaacaatagggttgtcccaggccatgcttccggaggggcagagacggcttctctgggaggtggcccatgccccaggccttcaggactccacaggaggaagctggggctaggggcttccaggagaagccagggggctgaggcaaggccttcccaggagcagggaagagtctggagccctggaaggggtcaggctggtacgtggcagccagcctcggggtcccagagccatgaacagctcccggtggcgagcagagccacttctggggtaagtggagggtctgctgtctgccagggcctaggtcccacctccatcctctgaaggcctccctgctccctccaccttggcctccgactcccccagcatggttgaaggccgctcaccagctgaaggcaaacagcttctcccgcaaactgatgagcaactctttcccaaaccaggaaagaaaatggctcccttccctcgaggggctccaactgccacataacttctgggagtctcctcacggtacctggggcttctagaaccttccccttgggacccaagtaaccaatgatagcgcagcaaatgaggaaccaaccgtcaccccacagtggaaaggctcttagatgatcattttgaggggaggttggaggggggacagggtcgcgctctgttacccaggctggagtgcagtggtacaatcataactcactgcagcctcaaactcctgggcttacgtgatccccccccctcagcctcctgagaagttaggacaacagacgcacatcaccacacctggctaatttttgtactttttgtagagatgaggtctcactctgttgcccaggctggtctcaaactcctggcctcaagcaatcctcccaaagtggaaaggaagacattatctctgtttacaataaggtgatcttgtatgtagaaaatcccaagaaatccataaaattgtagagctaatagaggaattcagcaagtttgcagtatacaagatatttgaaaattaattatatttctctgtaattatattatgaacaatctgatgatgaaatttagaaaacaattgtccccataatgaacaatctgatcatgaaatttagaaaacaactcccatttacaacagcatcaaaataatttcgtttacaatagcgtcaaaaacaacaaaatacttaggaataaactttaaaaagaagtgttaagacttgtacactgaaaactgcaaaacatcatggaaataaagacaacctaaatcaatggaaggacatgctgtgttcatgggttagaagattgttaagacgggccaggcgtgatggctcacgcctgtaatcccagcactttgggaggccaaggcgggtggatcacgaggtcaggagatcgagaccatcctggctaacacggtgaaaccccatctctactaaaaatacaaaaaaattagccgggcgtggtggtgggtgcctgtagttccagctactcaggaggctgaggcaggagaatggcatgtacctgggaggcggagcttgcagtgagccgagatcccgccattgccctccagcctgggagacagagtgagactccgtctcaaaaaaaaaaaaaaaagaagattgttaagatgacgacagttctcctcaagttgatctgcagattcaacacaatccttatcaaactctcagctgccttttttgtagaaatgaccctagattttatagggaagtatgagggaacaaaaaccatccaaacaactttgaaaaagaacaaagtctgaagacacacacttcctgatttcaaaactcactacaaagctacagttatcaagacagtgctaccagcataacaatagacagagatcactagaatagaattgaggttccagaaataaatgcatccatttatggacgattgagttagcaaaggtgccaagacaactcaatgggaaaagaatcaccttttcaacaaatggtattggaataactgaatacccacatgcggaaaaacgaagctgggcccttacctcacgccatctacacgaattaactcagcatagattaacagaatgcaagagccaaatgtaagagctaaaactataaaactcttagaagagcacacaggagttgatctgacctcagatgaggcaatgatgtcttacatatgatgccaaaagcataagtgagcaaaggaaaaaagataagtttaacttcatcaaaaccaaaaacttttatgcttcaaaaggcaccctaaaaaagggaaaagatgacccatagaatgggagaaaatatttgcaaatcatatatctgacaagggacttgtcgtaatacaataaaacaacctaattttaaggagtaaaggatatagatatttcttcaagaaagatacacaaatgaccagtatgcacatggaaagcagcttgatatcattagccattaggaaaatgcaaatcaaagtaaaatgaacttcaatgaggtccctagagtagtcaaattcattaagtagaat

SEQ ID NO: 1243939 - DNA, 4001 bp, Homo sapiens
ccccaggggctgaaaggaggaaggaacaaatgagatataaccaaaagaccatgaggaacaggaaactccctctggcttccagaaaggaaaactaagaggggaatgaggcacagaggccgaggcaggaaggcgtgaaaagatggaacaggcgattccggagcttagtagtaggtgagtaggtgagatgatccaactcccttgggaaaactgctggcattcaggttccaggcaagaactaggccaggggagactgggtgcggtggctcacgcctgtaatcccagcactttgggaggccgaggcaggtggatcactcgaggacaggagttcgagaccagcctgggcaacatggtgaaaccccatctctactaaaaatacaaaaattagccgggtgtggtggcacacgcctgtaatcccagctactcaggaggctgaggcaggagaatcgcttgaacccaggaggtggaggttgcagtgaactgagatcgcaccactgcactctagccttggcaactgagagagactctgtctcaaaaaaataaaaaaaataagctgggcatggtggtgtatgcctgtaatcccagctacttgggaggctgaggcacaagaatcacttgagcccgggaggcagaggttgcagtgagctgagattatgccaatgcactccaggctgggagacagagtgagaatttgtctcaaaaaaaaaaaaaaaaaaaaaagaaagaaagaaaagaaagcttggagctgggagaggcagaaatccttgctgttcgaaggccaacacattcattttaaagctccttcccttacctccccagaggattctccatactgaacctcactgtcttccctcccatcttcccctactcctcctagcagcgagcaatcccattttaactgctttcacctgagcacttcagaactcagaaggatacattctgcacatttctaagatcctggaacctaatgcaagttcttatggcccagggacttttctcccatgcccacgcttaacctctcaacctttaattttagaaggggattctatttcacaagctactatcagtgtaaaggagctccaggtaaagaaggaggtctacacttagctcatagtcctgtctacactgaccagtgctctcagggagatcccagcaatagcaacaactaccaaaaaccttccaaccttactggctccggctcacccacaggaaaggaatccctcaggtcaaagccacaagaggctgcctcgttaaactctttcctccctagatctagacttctttcctgtcatcctgaacctgaacctccgcagtctaccaagtccctgccaaaatgagggcggagatagaacagccctcaacagatggtagaaagcatcagccgggctttggattcaaagggtggcaaaacaggctgagtctccatggtgatgggcttaatgggagaaaaacattatttgttttgccacccagggtgaaaatgggaaaaaggaagagatcaaaccctcttcagtggggtaggagcaaccaggaacacttgaaataaggaggaagaggctagagaaaggactggttggtgaactcctggtatattgtgggaaattttaagacagaaagaacaaggatgaggctggccaggaggaagacatacaaaaaaaggactcagtggcagggctgctgaacctccatggctgggggcgtcacttagcccgtttcctgcccagaagcaacagcgcctgctccccagccctaaaatgcctccaagcccctctgactttccccaccctccattgctaagcatcctctgccccagcaagtacccaccaggctcctccttggggagctcagcctgcagctctggctcactgacagccggggcattcccctgctcctgtgtggccacagcagcccgagtggcccgccctgaccagcttgcctgggagcttcctcggccactcaatcgctgcttcttctcagctttgctggacatcgtgcaggcaaaacctacaggtatacaggagtggagagtctacaagcagataccacccctgaaccagccccctgatacaagcagtcccttttgaattcataaattgactgaaactcaatatgatcatcttttctggtggtacccacaccctgctccattaaccacaagggctctgtactccacaggggcctgggaggccttgctgtttttccctaggatatcctactgtcttcggggcactgggctaaaaatcaaagtcagtccctcaaggcactaggaacaaatgggagttaaagatgatggccaggctgggtgcggtggctcatgcttgtaatcccagcattttgggaggccgagccgggtggatcacctgaggtcaggagttcgagaccagcctggccaacatggcaaaaccccgtctctactaaaaatacaaaaaattagccaggagtggtggtgcgtgcctgtaattccagctactcgggaggctgaggcaggagaatctcttgaacccgagaggtagaggctgcagtgagccaagatcatgctactatactccagcctggctgacagagtgagactctatctcaaaaaaaaaaaaaaaaaagatggccagacaccccactaatgaggatttagaacctctatctctgccccggggtatgagaacataagataatcaggaaaagatctatcaagctgaagtgtggttgcccaaaccctcatccactctaccctccaggaccatgagtgagtgagagaggatcaaggaaggggtgcacatcccccatcctttgtcactgttcaatcattcaagcaaaccaagatgattttcctatgtacctcttttcctcccaagttaaatggaaatatgctcctcccaatcccactaaaatctgcaacatctgtaaacagagaaaaacagtatttgccacctgggtctatcgctttgaagtcctgaggggcaggaacactgttttgtgtgtactgaggtctcttagcagagttggctgaggaactctgtgctaatggttaagatcagtcaggatcatttatttgactcaaaatgccctgagaacagattggaagaaagaaggacaaaagtcatccaatcataaatttcaaattgtgtcatgaggaaaaagcaattggggcacgaggaaggtcacagtggtgcctctctcagaaaggtaggatggcaggaagcggggatctcggacaggtgctcagaatcccaggcgcaaagtctgaggcgctgggcactctcttttcattaggctgcagcctaacggcacctgtggctctccttcctcatccccacaggctgccacaggcattgatctcaggttatgaatttcaaacttgaaggatttgtactttgctccaaggaaaaacgttctgttaggccagcaaatcaataaaaccaactacagcaaggaggcttcctccatcagtctccagagaagcatcaagctgcgctttcctgcctcaaactagagcctgaggcgcatgcaccgtggggttcaccacgcgatcccacaccgcaggccccaggaggaactgctctgctaagtcggggctcactctagtactaggaaataccgcaggggccagcagtatttatcctgcagtataaatccagcagtatttatccagcagtatttataccagcagctggtatccttaaactggttaccagcaggcaaatttcccctcagaatggctcttcccccccagctgtcacaactgccccttctcctccccctcccccacacaaatattccttgctccctctccctccacaactgcctcttctccccaacaactgtcccttcctaccccgacactactgccccttctccccagcactccttccctccttccctctgcccccgacacacaccttgccacgctgaccctcccctccctagaccgaccgatgggccactctaagaagttgcccctcgcagccctctcgggccggcgtctgcacgcgtccccatggcaaccccgg

SEQ ID NO: 1243940 - DNA, 4001 bp, Homo sapiens
ctgtctcccacatacactaggttaaatcctgtctctgaacctttgatcagtctgctctcagtatcttgaaagttaccttgctctctacttatacaaattcttctaattgttcaggagacaattcaacacttatgttaagcatgcttctcagatcacaggcctgtctttctcctctgaagccaaaagtactttctatcgtcaacattcattagagaagctgatctaagttcaggcttcagcgggatggctttcagacaatgcacagttgcaagaccattctgtttgttaaaatattgaaatacctccatatctaagagatctagcttcctgggccctctgtgtcctcctctatctatccaaccctttccctggaattttcacctccccacagcctcctgatacaccatctaaagggcttacacttgacatagcagggagactccaggacttgcatccagcagtggggccaacttttaggtaagctttaccctcaccccagtcttaaaagtttgaaacattttgaatatatgaattattacatacgtttcagctccttggagtaagcatttcatgggtgggaatagttctttggtattccctatagcacctatcacctgaaccatcatacagccagtattctgcccatccttatttcacaacctgcagggtccagggcatcaagcctccataagcacacagcctgacttgcagggcagtttactcccattccagaaaggtctaaggggcccaggaatctctctggagcacttccctgaaatctcctgcattctcgaagcttctgctgtggtgccactaaagcactcatgacccacatctccaccttcctccctgagcttcaggcagactcctccaaaggcctgctgggcatttccaaatgggagcccaacttcttatgctggcacagggctgacctttgctaaatggttggtaatgaatgaatgagatgaaaatcaaaagcaaatcactacccacctccccctcccatttaactgctctccagaagtaggcactgtttatagccatccacctccttccaccccactgatccatcagaaatgccgtcttgtccacttcccatcttcttcagatctttccaatttacaggagggattacgagaggctgattttgaaagtagtcagaacctaggcactcttcagattatggtcttcccctgactttggctggaacccagacccggactgacccaagcctcagctccttcccattctcattctggcctggcctccacccagatccctccctccggacccacccgactccgcccctaaccccatcccattttcttcctgacttcaggaacttccctcctggttgtgctccctccacagcctcgcccctctgcctatcactccgcctcttggacctcccctgcagcttcgccccgccccctctggccccgcctccgtcccttaaggctcctcctcccctcccccacccagctttagccgcgcggggacactaacccaccctcacctccgagaacagcgcggctaggtgctccagaggtgccgcgggcaggtccccgcagaccactgcgccgcggaagctgtcgggccctggaggctcgggcccggtgcgaaggaaaaaaagcgccttagcgccagccaggcccgactcaggtcccacctccagcccggggcgtattgccaggcccctgggcccgggccgcaccaccagcagcggccgcggcccctcggcagcatcgcggcccaggaaggcctggagcagctgctccgcctcagcactccccgcgcaacgctcccaggcgcccgcagccggccgcaggctcatggccacgtaggtccccaggagtcgcagtcgtcggtcggcgccgggttccccatccgcgttctccgccgcgagcgcggcccgctcctccgcgagccgcatcgcgcgcggcctccagctgcatcggtttccctagcgacggggacgcggccaggactcactcctctgctcccttcctattgggcacggacccctggtcccgccccttccaggctaataaggtaggaggtgtacgcgggaaggggcggggtcgcgtcgctgttgctaggacaccagccgagactcgtactcagtgtctgcctggtgtattgggagtgctgaagtgtgaccgtggagcgcaatggcttattgatgggctgcgtggagaggagatcaagcatataaatgctgttaaggatcgttttggccaaggtcgaattagagtctttagaggtctccagacactgaaaatagtgtggtcctcttacctctatcctaaatgtgcaatccagacttaaacacaatgccaaatcataaaacagatttaaggacattcagtgaattttatttcttttccatgatggcaaattaaacacttcagaacagtgctgtccagtagaactttctgcgatgatggaaatgttttccatctgttctagccacgcatggcctataaaggaggtgaaatatgctcgtcccactgaggaaatttttaattttacttaattttcacttaaaattaaatagtcacatgtgactgtagttatatcgaacagctcagcttcaaaattttaatatcaagtttttttaagttttcttccgtgcctttctttgcccatgttttttaaggcatgtgcttaatcttctaaaaatgtaaccaaactgtaagaggcttgtttttgagacagagtcttactctgttgcccagactggagtgcagtggccggatcatagttcaccgcagcctcaaatccctgggctcaactgatcctctggtctcagattccctaggagctgggaatacaggcgccaccacatccagctaattttaaaaattttttgtagagatgaggtctcgctgtgttgtccaaactggtcttgaagtcctggactcaactgatccttctgcctcagcctcccaaagtgctgggattataaggatgagccaccatgctagagtttttgacttccatgggtatgaccactaatcagttcttactaaatgtagcaaagtacttgtaaatatgcaggatgctcagaaccttcccatcctgccctatacctggatattggcttcaaaaagggataatataaagtgccttgcctgacctcagaaattagcatttgttacctgcttagtccttctccatggtcaggataaacagcttggccctttgcatgcatgtaaggtgacagtgcatgggtgctgaaaaaatggacaaacaacttgggcagcatgaggtctgcaggactgaatgagctcccctctgccctgccatcctccctttagtcacctcccagggactgctgagtttctgggtaaaaggaatgtttataatgggtttcaaaggaatattaacagaataagcacttatcaatggtagcttggctaacaagagcccctcgggaaaacaccagtggttgggaagtaaaatgattgatttcataataactggagcaaaggagttgctgtaataaaaaatgttcatgttagaaatgaatctttatgtttgtaaagggtgtttcatcattgctggattaaacaataatcaaccaactatgaggaaagggaaaaagtgggaaactaaaacaatctttaggatgaatttggtaactgacatttcaagaagaagcatcagggaaaaatagtaatgtcaggggcttcttacacatatcgttttttgtttatctttgcacataggaaggcatcgttattgttttagtgcttagggacttcaaatgtgtcaactatgctcatgtttcgtatacagagtgacttcaggaccattaactttcagtaaacccttgaaataaaatttctgccaccgcactgtggctctattatgccgttaatctcctatgtccccttgccccaacatacataaaaataggaacaaaggagtctgtgaatatgacttaaagatttctgtgtaaggtgaaggctcctgaatattagcaatcccagttttta

SEQ ID NO: 1243941 - DNA, 4001 bp, Homo sapiens
agagatcagtatgctgcatcccatcctctgacctactctcttgatgtaagttgggtctgtctccccagctctcttatccagggcagtggcagctctaccgtaattactttacaaactctcatgcccccaaccagagatacggaggccataggtaactgatagtggaacctggtggtcacatccctgctgttgacccaatgttcggctgactcttcctcctttcaatctcatcactccaacctcaactgtccctcaccccagagtgggtatgacctggtttatctgtcttacccatcattgcttttcatatttcctaccttgtctctacctagaacgaagtctttcatatttggagaaatcccaataatctggcaataagcatcttccgtcaaaggtatattgttcctggacactgttacagatatgctctgtcctgctcagggccaatatctccaatgcccttctgatgcaagcgcgagactgagactgcaaaaggccttgttggaggtttggtggtatgctggaacagagcaggggttgggcccctttcccatcacaccccgtcttctagtcctcacaggggggaccgagggccttccaaacattataaaataaaggaagctacacacagtagggcactgtgtcatcacttcccaggatgatacagtttttgagagctgagtttcctaggaagttattgaggttttctcattaagatcagacttgtgagattctgcggtccggtgggttttgtcaggatgcaatcatgcccaaaccagttggcttttccagcagtgcgattccttagcttcagggcaattccacacactatctgaggtatccattttgagctaccattccctgcacagaataccaggccccacaaaggcttaagtgttcctcaactgtggatggagttaagacatcaaaagtattttccagaaggtgggaactacataatacaagatatatggggtagtcacttcaggagtcctgcctaggtagactttctagaagaaccttgctaagacagaaaagccatgtgttactttgacatttttctaaaagtcagactcattgtctaagaggagagaaaattgtaggaggaccccagcctaggctgccttcccagactagccagaggagttttacctttttctcaacttcggcagcagtctgcttggtgatctctaggttttccaccagcactgtttctcccaggaagttcccagaggcggaggagaggcgagagagaagactgtcttccaacgttttcagggtaattttgaatccattctgctgctttgtgagatcggactgcaaatatcaagcaagagacagtcaggtgcagatgcccagggcatcctgctctaaggatgtgtctgaatagggcgagagtcccttgccttaaagatagtaaagtggaggcagaatggcaaagagcttcagaccatgagcaggagacaaggagtcaaattggtgcccaactgtacaatattctgggcacatgaccttgagccagtttaccctctttactcttctgtaatcccagtcccaacttttaggatttctgtgctatgcttaatgcacaatgggcaacacactgcattatcagtgttcactaaacggagcttatttgtgtaactagagggttagggtccagttttagttctctggagagttctctctattaccaatttactttaatgaacaactctcctatggcttacttaaaaaaaaatcagcagaatctgtcttccagttttaaactgtgtaaaaccatggcagactgtgtaaaagcttcctcgaggctggagtggggtgctggtatccaagtggatctcatctcttcctctctttatgctccatatcctaaagcactaacttcaggcagctgtagtgtctttgcccttgtacagcctttggattcgtgggaagaacaaccttcctgttggaggttccaaccacagccaccctgacctttcttgtttcttaaaaccacatatcttgatcctgccttaagaccaggatttgctgttctctgtgctgggaatgctctatgcccagaggctttacaattatttaggaattagctcagatgccaactcctcaccgaatctttttctgaccaccactgtttaaatttgccctctggctttccagtattaccctgttttattttcttaaaaattcttatcactatctgaatggcattgttcatttgtttacgttgctgttttctgtgttcctccactagagtgtagattccatgaaggctgggacatggttttctttgttcactgctgaatcctccatacctcaaatcctgcctgttacagaggtggtgctccctaggtatctgttcaatgaatgaatgattgcaggaagcggagtcccagggagccctgaactcaatctctcatgcactggaattccacctaccgaccccgccatattgtataatctaatcacatttaaagagaggacaaaaagcacgttatctgctgtggattgaattgtgttgtcctaaaagtcctatgttgaagccttaactcccccatgtgactatattggagatgtggcctttaaggaggtaattaaggttaaatgaggtcatcagggtggagccatggctttctttatgtgcaaagaagaggtcatgtgaggtcacagtgagaaggccgctgcctccaaggcaggaaaagaggcctcaccaaaaaccaacatgatcgcagacttccaacttccagaattataggagaacaaatatgtgttatttaagccaccccgtctatggtattttgttatggcagcccaagctaagacatgaccctaacactgttggacctagttctgttacccttgtagaatttcattccgcttagttctggcacgtggacctgtgtgatcagcagcactcatgttcatgccaggctctgctcttggtcataggagtgtccagtctccaagctgttttttttttcttttttttgagacagaacctcgccctatttccaggctggagtgcagtggcacgatcttggctcactgcaacctccgtctcccgggttcaagagattctcctgcctcagcttcccgagtagctaggactacaggctagcgccaccatgcccagttaattttaatatttattttttagtagagatggggtttcaccatgttggccaggctggtctcgaactaccgacctcatgatccgcccaccttggcctcccaaagtgctcagattataggcatgagccaccatgcccggccttcaaactgtttttgcttctgttcttcagctcacccatccttctttccccagtatggtattcccaggttgctacatggggtcagcagtcttccagagtctagcagaacccacctaactcaatccaggaaaaacagcccccctctgcaacctctcccagagtggagtacactgcaggctctagtggcagaacattttctcccttctgtcctcaccttcagctgctccaagtctggcctctccatgctgaccacagcggccagcaactggtcctccaggccatccctggtcacggtgaagttgatcagggtggcctgagcctgcagctcaggctggtagtgaggattagccagcttggtgtggaggatgagccggaacttgggattgtattcacattctttgtctccaattttaatgaatctggaacataaaggctcatgtgaaggtaaggtgccttcctgcaaaatttggttggggtcagaatttgagatttttttcaaacaatattgctatattcagatggattcctcctatgtctaggatgagccctgggattcttttttgcactaatgttgggaacaggtgtggagggggatagatgttttcccatggccaccatgtttggttctgtactgtgcaactctaggaagagccatgcctgttgtgtcaatgtagattagtacattatgaacaatttccagcagatggcagtgaagtgtctggagga

SEQ ID NO: 1243942 - DNA, 4001 bp, Homo sapiens
cagtcagatgggaaccttcactcactataaaaacaaaactcgtcttgtgcagtgagaatgagcaaagtaattcctggagagaacctccggtggcttaagggaaagtgtgttttccaagctgggaggaaggccaagggagtgatggggaggaggagtgtcagcgtgggagactgggaaggaggcaagctggaaggtcagccctccacattgaactccctagtggaataaggagatgagaacattttcctcttcttcttggtccctggtacagcccctactgggttcctgcgagtggtgggccctgcatggcacctggcaggagaggacttccttccctctttctttgttgttgttgcttttgggacagtgttgctctgtcacccaggctggagtgcagtggtgtgatattggctcactccaacctctgcctcccaagttcaagcgattcttgtgcctcagtctcctgagtagctgagactactggtgcatgccaccacactcggctaattttttttttttttgagacggagtctcagtctgtcacctaggctggagtgcagtggcctgatctcagctcactgcaacctccacctcccaggtttaagcaattcttctgcctccacctgccgagtagctgggactacaggcgtgagccactgcacccggccagaatttttgtatttttagtaaagatggggtttcaccatgttgggcaggctggtctcaaactcctgacctcaagtgatccatcctcctgggcctctcaaagcactgggattacaggtgtgaaaaccgcacccagctttctttctctttcttatgtccttgtgcaccttctggaattccggggtcctgagggactcactctaccctcaaaagaggcagacctccctagaaagcccccatttattttcccccaggatagcactaagcatggctgagccccccaaggaaagtgaaggttgagggcaggacgagttgggaagaggtccccagaattggagaccgatgggggtcagtgactacctgccctcacaactaccttgtggtctccttgacggaaagactgtggtcttttattcactcccgtccccagggactggcacatagaaggggcccaagactcctgtcacctgctgcgttagtgactgtgataccagcgcctaccaggcttctctctacagctctctcccctgttcctcctctgctgaccgtgacaaacaagcaaaggatttgaaaccaaggattcgagaggaaaacacatagggtctgaaagctgggagaagacgcacttctgtggttcaagagaatgtggtaaaccttgaccttgagcaggaaggaggaactgcacacgctccggaggaactcaccaactgtatgacctcgatcacacgagaacgccagctcccaggttgaggaagaaatgaaagaaagcacttaaaacacctgccacctagcaggtgtgcaatactgttaatttacatccctctatcctgagcagaaagctctcctcttaaagggcccatcttcccatcaccctagccggaggctgtttttcttcttttttttccatccattcagctgtaaatccttcagaggtctccagtccactccaggacaaggactgtatcaggacctgagtgggtaggagggtatgaggcagggtgtacagaggctgcagggtcctgcgacttggggcggatccagggcagcgaggactaaggggaagagggcactaggagcgctagtcctggcagccaccatctggcagagctatcccagaaggaagccccccaagaggaatgtttggcactcttggtggttattaccctgtaagtctctccctgtcactctccactctagtctttagcctccgacgtcctcctggcgcccgccccttaccctgggtccgctccttctgcttctgggtctctggggaagcgttcaatccacggtcgcggctccggtgctcctcaaacggcggcgtttaccggttgcttggcaaccccggcctggctccggacgcgcggggcgacgcggaaggaccccggagcacgtgactcctttcctgccacgtcggaagcgcaggccatccctcttctttttggaggtctcctgagttaggagaagaattaaccaataggttggtaacatactaataatgatcatgaatatttgtaggggcgttgccaaggcgcttatccaagcctacgtttgtatgcatttgcatcgagcaaggcacccagaaaatgcaaggaagaatagtcagtgcttgggaagccctgatccctgggtggtgatggcgggctctgcttaccatcttggccgactgtgttgtcctgccttccttcagtttccgcatccattcagtgggaattataactctgccctcccctctgctaccatccttcctccactttctgtaataaagacatcttcccgcaccaccagaatggaaactccttgggagtagaagctggggaatttttttttttttgagacggagtctcgctctgtcgcccaggctagagtgcagtggcgcgatctcggctcactgcaagctccgcctcccgagttcacaccattctcctgcctcagcctcccgagtagctgggactacaggtgcccgccactacgcccggctaattttttgtatttttagtagagacggggtttctccgtgttagccaggatggtctcgatctcctgaccttgtgatccgcctgcctcggcctcccaaagtgctgggattacaggcgtgagccaccgcgcccggcaaagctggggatttttacagcttagctgggtgattggcacgaaatgtactgtgttcattgaatgaatggttgaatgaatgaaacgagtcatgtttctcagggagttaaggcaattgcgatcatgtaaattaaaacaagggaatttggggctagaaaaaaatgaatttgaatcccagattggctacctactaatctcatggccctgggcaagttcctttccttttctaagactcagctatcctcatctgcaaagtggcaggacagtggcggtgcttattagataatggggaggattaagtgagagacaacacaggggcgtgtccagcccccgtccagagctactggtgcctgaatgagtggcagctcggggaatgaggttatcccgagttcagatgctgacatcggaaatttggactgggacagaagaggagtgcgtcatccaagaagtgggattggggttggaactgggccttgaaaaatggttatgagttgcagggaagaggagtggggagggcgttccagattgggggagggcatggcgtgagcaaggaaggaaggggcagtcgtcatggaagaaaggcattttgcgaggatggtgggtggatcagtctggctggggttgagagtccctgcaggggaaaaatgagagaggaatttgcaaaggtcagccagggccagtctgtggggggtcccaagagaggcaggctgaggggcccagacagctttccatgggaagccctcagcgggtttgggatctgtgaaaggacaggaaggaagcaaacgtttctctcccacttcccaacttctccatatatgtgttgtcaccactacccacctgcctttagtggggcaggtgcaaggaaattcccaatgagacggcaccttgcagggccgcactaaccaaagacaagcacctaaatgactgctgccaccaatctctcctgatccgttctggctcgcaccagtttctcgggacaaagaactcttaggggtgggtgctgagggtcctgacaggggctgggtggaggagctcctgaaagacgcattgaaatggctttgtgtggtcagaggtgaatcagacccaaagtctccaagaataggaaacgatccactccatgatgaggtagtggctggctggggttgcaatcataatgcaaccctttccactccacctccagccctgggaagccgagggctctctgaagacacattattttgtgggtg

SEQ ID NO: 1243943 - DNA, 4001 bp, Homo sapiens
gacagggttctgccatgttggccatgctggtttcaaactcccgacctcagctgacccacctgcctcggcctcccaaagtgctgggattacaggtgtgagctactgcacccagcctaatgacacttaaattccatgaaataaggtagtttaccttattttgttgtactgctatcaaataccatgttttgtgtgatgtggtcacattacagcataacctattttattatatgtcttcaggttcatttactccaattttatgatagactatcctctaaggctgtgattgaagaaatgtatttgcttaagataggaggctatgaaatgaagtccaaaatagggacactctacatcagagatttacaatgagtagggtgagtttttaaaattacctatggccagcccggcacagtagctcacgcctgtaatcccagcactttgggaggccgaggtgggcggatcacgaggtcaggagatcgagaccatcgtggctaacagggtgaaaccccatctctactaaaaatacaaaaaaaaaacaacaattagccggatgtggtggtgggcacgtgtagtcccagcaactggtgaggctgaggcaggagaatggtgtgaactcaggaggcggagcttgcagtgagctgaggtcgcgccactacactccagcctgggcgacagagcgagattccgtctcaaaaaataaaaaataaataacctgtggccaaatccctatttacagtataaagaaccactgaactctttccaaatacaagtaaatctctacaattaatttaagctccgtctgcactgggaggaattttgtttcccattgtgcagctctttaatgatgtataagggttgatgatgcttagctttaaatatctaggaagaagtaggaacaacatgaaagctcaaaattaagaacagagactggactctggtgtcctggcttctctgatatcccaggggcctattacactttgtcaggcccctcagctcccagcagatcaggaacttgagatctggctgtggtaaccaccctcaagcttgataactattcattgcgtccgagtacttcttatatttcgaactcattagatagtaaaaatctcagaatcctgatttcagatctcatgaactaattctacatcaccgcctcaaattacccagcctgaagacacaacgggcttggtatgaagatataaagtatgttgcaaagagactgagggcactgtagatatcttgaacaaaagggtcagactaacccgcagctgataaggaaagggctccaaacttctagaaccttcttgtcaattctgctttaggattagaacaagtatgactacccacaactctgttccaaccccacttccaataatctggcctaactgttgccagaatctagagcgttctcgaaaaccactcactcagcagctcccttggctagtccgactggcaatctcgaaccactgcggctgcttcggagtgccaacagcgcccaagcagttgccctcttccttggtgcttaacttaagaaagaacagtgctgggaaggataaagatcacccaggaaggacaggggaagaggagtctgacgtagagaacacgagataagcccctcgctcttcctttttttctctgtcatctttgacttctgggataaccgggggcaaccaggtcaattatggagacacacaatcacttcgaacccagactagtgatcgctggggtataattacaagggaaaacggggtgaggagagcaaaggttttggagacggaaagtgcagacaggcaacaatgcacagaagttaacaagagaacgcgggggtcgggggcgatgtaaggaagtcgtcatcgacgccgcgccgcttcccccacctcgcaccagacctctgaaattgccctcggagactcggcctctcctataaggacgatcgtcctctcagctggagaacaaggccatgcctcagctcctacgccaggcggaagcgggagaggaaggccgacccccaagagcgccccttcagggggtccatccggccttgatctcagatgggggggtgtttgcggagggcggggcatcgcctcaacagctgggggctgcatcatggcaggaacgagtttccctgagccacggagctgcaggtcgcctcctctactaccctgctacccggttacctcttcgcctcttggtcgtcgagcagctccggctcggtcgccgccattaccacatcgcactccgcggcagccgccatcttaccgccgggaccagagagctgggtgggaggccggcggtgaagagcacttccggttggagcatagagcagctccgcggcgccgcgcccagaagggctccctcgggctcgtctaccagagagaggctccgcttggggccagagcggcctcccgcccccggatgtccacggtggtctccgcgccggggcgggagcccaggggctgtgccggtgcgtaggcggcgccactttacccgtgggtgggaaggcggggtgtaccggtggtagcctctctagggcttggctgctttcagtattccaagagcctcattgccatagcaacttccaatcctagagagtcttcctgaaaggctccgtggagtctgggttgcgtggggaccaggtgacccaagactctgtagggaaggagtccccactgctacctttccgaccttggagtgtgtccacagcttcttcccgggaaagtcaagagacactttgagctcagttcccccagctttcatcgttctctggaagccctgcccagtcaagccaggggaacgcagggcgtcttcaccctgcgcctttcatccactccggatctccaaacaccaactggttcatcaccctaatgacgctgacccttttacaaggctcctttcatgtcagccgcctgggagtgccatctcagcattaagcctaggaaagctgacacatggcgccccagaccctgccctggagtttataaggaagctcgcggggtgaggtccttgctcttgtgtccccagtactcccacctcttatataaactctctactcatcacgcttgccttgccgaatgcggtctggattgagaattcataggggacaagggcacagtttaactgtctttgttgttattccctcacccaaacgactatttgtggagctgaattaaattggagctttctggggttaaattggaggagtatgaggagtagctttacaatgtaaagctaagagtaaaataagaagagggcaaaggaattttaaaaggatttacctgtttgttccaggaaaacagcatgtgccaatgctcatactctgcctatcccagtgtggagggagctgaaaccacagcgaccactgagtagggagggataggacaagctcactaggttggaaaggaggggtcattcgttgagccaatcactcagccctttccaaaacgcctactctgtgctaggttgtgagggcacaagacttacagaccacctgccctgcctgccagtggctcatagtccagtctaatgctagccaacctgtctcaccatcttcccactttatgttctatctaaggcaactcatttattcccacagctttacttccatctgttgatgactctcaacttttcatatctccaacctagacctttcttcagcttccacagctgtatatccaactatctactggatatctcttgtatgtttcacaaatccccaaggcttaccatatttaaatttaactttttcattgtctacccacacctcaacaacagaaaaaacaaatgttggatgtaattattatctttcctaaattccgtatcttgttaaatggattaaaccattctcactcttggcttccaatttgttgccaagttttgttgattctcctaccaaatatttcccaaatctatctccacctttccatcccgattcaggcgctcatcattttttaaaatcttggaataggctgggtgtggtggcatgcatctgtagtcccagctatttg

SEQ ID NO: 1243944 - DNA, 4001 bp, Homo sapiens
acaacaattagccggatgtggtggtgggcacgtgtagtcccagcaactggtgaggctgaggcaggagaatggtgtgaactcaggaggcggagcttgcagtgagctgaggtcgcgccactacactccagcctgggcgacagagcgagattccgtctcaaaaaataaaaaataaataacctgtggccaaatccctatttacagtataaagaaccactgaactctttccaaatacaagtaaatctctacaattaatttaagctccgtctgcactgggaggaattttgtttcccattgtgcagctctttaatgatgtataagggttgatgatgcttagctttaaatatctaggaagaagtaggaacaacatgaaagctcaaaattaagaacagagactggactctggtgtcctggcttctctgatatcccaggggcctattacactttgtcaggcccctcagctcccagcagatcaggaacttgagatctggctgtggtaaccaccctcaagcttgataactattcattgcgtccgagtacttcttatatttcgaactcattagatagtaaaaatctcagaatcctgatttcagatctcatgaactaattctacatcaccgcctcaaattacccagcctgaagacacaacgggcttggtatgaagatataaagtatgttgcaaagagactgagggcactgtagatatcttgaacaaaagggtcagactaacccgcagctgataaggaaagggctccaaacttctagaaccttcttgtcaattctgctttaggattagaacaagtatgactacccacaactctgttccaaccccacttccaataatctggcctaactgttgccagaatctagagcgttctcgaaaaccactcactcagcagctcccttggctagtccgactggcaatctcgaaccactgcggctgcttcggagtgccaacagcgcccaagcagttgccctcttccttggtgcttaacttaagaaagaacagtgctgggaaggataaagatcacccaggaaggacaggggaagaggagtctgacgtagagaacacgagataagcccctcgctcttcctttttttctctgtcatctttgacttctgggataaccgggggcaaccaggtcaattatggagacacacaatcacttcgaacccagactagtgatcgctggggtataattacaagggaaaacggggtgaggagagcaaaggttttggagacggaaagtgcagacaggcaacaatgcacagaagttaacaagagaacgcgggggtcgggggcgatgtaaggaagtcgtcatcgacgccgcgccgcttcccccacctcgcaccagacctctgaaattgccctcggagactcggcctctcctataaggacgatcgtcctctcagctggagaacaaggccatgcctcagctcctacgccaggcggaagcgggagaggaaggccgacccccaagagcgccccttcagggggtccatccggccttgatctcagatgggggggtgtttgcggagggcggggcatcgcctcaacagctgggggctgcatcatggcaggaacgagtttccctgagccacggagctgcaggtcgcctcctctactaccctgctacccggttacctcttcgcctcttggtcgtcgagcagctccggctcggtcgccgccattaccacatcgcactccgcggcagccgccatcttaccgccgggaccagagagctgggtgggaggccggcggtgaagagcacttccggttggagcatagagcagctccgcggcgccgcgcccagaagggctccctcgggctcgtctaccagagagaggctccgcttggggccagagcggcctcccgcccccggatgtccacggtggtctccgcgccggggcgggagcccaggggctgtgccggtgcgtaggcggcgccactttacccgtgggtgggaaggcggggtgtaccggtggtagcctctctagggcttggctgctttcagtattccaagagcctcattgccatagcaacttccaatcctagagagtcttcctgaaaggctccgtggagtctgggttgcgtggggaccaggtgacccaagactctgtagggaaggagtccccactgctacctttccgaccttggagtgtgtccacagcttcttcccgggaaagtcaagagacactttgagctcagttcccccagctttcatcgttctctggaagccctgcccagtcaagccaggggaacgcagggcgtcttcaccctgcgcctttcatccactccggatctccaaacaccaactggttcatcaccctaatgacgctgacccttttacaaggctcctttcatgtcagccgcctgggagtgccatctcagcattaagcctaggaaagctgacacatggcgccccagaccctgccctggagtttataaggaagctcgcggggtgaggtccttgctcttgtgtccccagtactcccacctcttatataaactctctactcatcacgcttgccttgccgaatgcggtctggattgagaattcataggggacaagggcacagtttaactgtctttgttgttattccctcacccaaacgactatttgtggagctgaattaaattggagctttctggggttaaattggaggagtatgaggagtagctttacaatgtaaagctaagagtaaaataagaagagggcaaaggaattttaaaaggatttacctgtttgttccaggaaaacagcatgtgccaatgctcatactctgcctatcccagtgtggagggagctgaaaccacagcgaccactgagtagggagggataggacaagctcactaggttggaaaggaggggtcattcgttgagccaatcactcagccctttccaaaacgcctactctgtgctaggttgtgagggcacaagacttacagaccacctgccctgcctgccagtggctcatagtccagtctaatgctagccaacctgtctcaccatcttcccactttatgttctatctaaggcaactcatttattcccacagctttacttccatctgttgatgactctcaacttttcatatctccaacctagacctttcttcagcttccacagctgtatatccaactatctactggatatctcttgtatgtttcacaaatccccaaggcttaccatatttaaatttaactttttcattgtctacccacacctcaacaacagaaaaaacaaatgttggatgtaattattatctttcctaaattccgtatcttgttaaatggattaaaccattctcactcttggcttccaatttgttgccaagttttgttgattctcctaccaaatatttcccaaatctatctccacctttccatcccgattcaggcgctcatcattttttaaaatcttggaataggctgggtgtggtggcatgcatctgtagtcccagctatttgggaggctgaggcaggaggatcacttgagcccaggagttagaggctgcagtgagctatgatcacaccaatgtactccagcatggagaaaagagcaagaccctgtctcaaaaacggcaacaacaacaacaacaaaacaacagaaaaaaaaacttggaatacatcaatagtctcctaatcggtctctaatttcatctctgttcagtcttccctcttctgccagagtgaccttcctcagggactgatcatgtctcttcattggcaatggctttccattgccgtcaatttgatctctttggcctaccacacaaagcctttgattatctgtttctttttttaaataatttaatttgagtaccaatatttaggtcctttctaccaccaatattgaacccaagttctcatagtttcagaaaatgccatgacttgtagccgtttcctccaccctagaacaccctttcccccaggcccttcagtgtctgctgactcaacgttaaatgcccttttgctgtgctccacagcacctcagtagttg

SEQ ID NO: 1243945 - DNA, 4001 bp, Homo sapiens
gtccagggtgagcttcgcacagggtgccaggggcagaggggagggggggtggatctagggcacagccctgagggcaaaaaactcttccgacccaatctccccaagctggcaggaaagtggagggacaagactgctccccagcccccacgccccagggcagggccttcatgtgccaggcgctggcccgagggccgtggtccaggcctctagaaagtgcaaagcaggcagtttcccctacaggggccctgctctaaccggccactgctgatgggcctccccaggtggggcgatggggggtctgtgccccgggggcactggtaatccctaccttcagcttctggtggcacatttgatgcttgggaaactccaggcccgcagcccacaggccctggtgagtgcccaggccaggcgcagacatccctgctgcgcaggggaggggcagcaccagccctggagaagggccacatcccgggaagggctggggtttgacgagacgctggttttccaggtctcagtgacaagtctggagccacagctgagctaggagggggttctcacatgccatccccaccccgcgcaaaccgactcctcactggactgcgacctcttccggcctcggtttcccagccagtcccggctcgggccggacaggcaccctcggggacgggaaaaggcgccaggagcgcccaccggccgggcctcggtcccgggactccggcgcttgcctgctcccgggggctcagggctcagtccgggaggagggggagcgggctggggggccctctctgcccgggggccgcgggcgtaacaggtgggcgaaggtgcgcggccctggcgagggctgcggcggggtccatggacaccggaggaggaaacgccaaggtttttccaaaggacaagcggccccgcggtcctcctggtcctctgctcgcgcgccagcaaagcagctgcgctctgcgggccgccgggaccacgcgggaggccgggccgctcccagcctcgggcccctccccagctcgccccagccccgaccctcggccgcgaggccctcccggagcggctggcgagcggggagcgaccgcgcggccggcagcaactggtgtctccccgggacgcagctccgcccttcccgggaacaaaagcagccgcccgcgccggagctccgggagggcgggctggcagggagggggcgcggcgccggctccgaggaacccggccccggaaatgggacacccccagggggtgcccccgaacttccctcctgtccggcctgggtcgggggagggctcgaggccggtgggcagggcgcggagagcgcaccgagtgcgccaggggcccgcaagcccgcggcggggttgtgaaccgaggcagagcgcgagcgcgcgagggggaccggcggagggaagccgcgaggccgtgggggggccgagcccgagccaggggagggggcgcgaagtcggcgcgtgggaaacttactgcagtcgtccgactcgtagccgtcggcgtccggctcgtcctccggcggcttggctggcggccgcgcggggctgggacccgggctggggcccgggctggagccgtaggctccgaagagctggtccacatcctcgtcgtcctcgcgggcgccgtcggaggggctgcggcggccggcaccggccacagccgggcgcgcgggggcgtccgggggtgcagcggctcggggcccggcgtccgggggcaggccccgcgggaagcgggggaagtagtcggagatctgcttgatgggacggatggggccggggcacacgtcgatggccatatgctcctggatgctgatggtcgccttctccccgcgccgccggagggtcatgcaggcagcgccgccccgccccgggcgcggcccggcccggcgcgaccccggcccgggggcggctcagcaggcccggcggggcgcggcgggggctgcgggcatcgccggccgcgcccccggacggccctgacttggccgctgcccgctccgctgcggacggcgcgagcgagtgccagaggccggcaggcagggggcgggcccagcccgcgtcacccggcagcaaccaagcagggtgagtgtgcgggctgcgcgggcggcgcggagcggagggagccgcgcggcgccacactcactcgcactcgcactcacaccggcgtgcacgccggcccgggaccccgcgcgcgcacactcgcggccaggcagggccgccgggcgccttccgctcatgcacgcccgcggcacaagctgggagtcaacccggcagggacccgcaggacgcgcacccacacgttcccgcgcgtgccagcccacgctgggctccgctcgctctctcgggacacacgcaggtgtgcaagtgcacacatgcgtgtgcagagacacgtggtggaagcatccgctcgctcacaccgtaggtcacacacgcaaacgtctgcatgcgcacatggttgttttaggaagctgtgacacagtacacccccaatgcacaggcgcgcacacctgatggagcacacacacaggtgatcaagggcacccagggcacaggcttccctacccccaagcacccctaacaagatgcacaaacatgagcccatagaagtgatcaggggaccctgggcacaactccttctctcctccccctctagcaggacgtggagtcacactcctagcatgtagggacaggttgcctacacacgggcaggacatgtacacgctcaactgcacaaggacaccggggctcagtctgtgcacacatattctcaggtcacatacaacacagcactctaacctcgggtcagtccctcacttggtcagtgagtacagtctgaaggaccccccggggcagggtggctgagaacctgcacagggcctggtcaggagggagtgagggcagggcctgggcggtgagtgatgcaataaggctgggcggcacgctccccccacccccactcctactctaggcctcccacacggtcagatcactaaacaaatcccagagggcccagccctggctgtccggctttccgggaccagagctctgttgggaactgctgctgcttggacaggtgtgttcccggaaagccctgggcatggatggaatcctgtttaccctctggtttccactgatgtgtaagacacttagcttcttagtgggtgcctttggtgcatctgaatgaggggctccaagcctctcttgttcccccaccataacccctgcagagtgatggggagcagaggaaagagaggcaaagccttggcctgtggcttccagctgcacagttctggcaggctatttgacctctttgagcctcggtttcctcatctatgaagtgaggctatttccaactgcacagccttgtggcaaggccccatccagcacagacaggtaagaggtgctcagctggctttcccttctcccttcctttggaaagacaagactcatggtgagaagtgatgagaaattcatgttttgtggtgagttctgaactgggtggtggcgggcactaccggcctttgaaaacactggagaaacacatggcatatgttgtactgcgccaagaacattcacagctgtcatctcattgattccttaaaccaccccacgatgtaggcagggcctgctgttcccatttcacaggggaggaaattagcgctcaggcacaaggatgtgtccagggtgactgctggctggcggcagagctgcgatgagagcccagtgtcctgactgttcgatgcttccactttccctcccttctccctttcctcccctccactacagagctcaggggctcagagcagagttggaaacacaggtaaaacctcgttcccaaagctcatcctgaggcttcttggacaggggaagcccaaactgaggaggaggggaaggagggaaaaaaaggaggaggaagaggaggacgggaggaggccaagagcctcaggggttacagtgggaatgaaccagccggggttccctaaagatagtctgaggtcctgg

SEQ ID NO: 1243946 - DNA, 4001 bp, Homo sapiens
acttaaaagactgccctcctgactcagaaccccactgactgtggccacactgttcgttctttcacgcttacctctcctcatttaaaagggaaataaacatcatacatttaactgacttagctgtcccattgctcctccttactcttaaaccaggaaggatggaaagaacacttgagtcagggtggtggacgtaccagtaaggacagaaaagtgaccttgtcccttagagaccagcagtctagtgggggaaaagacaggtatacacataattacaactcctggagtaaaggggaaaccgtagcccttagcaaactgcaactcttactctggtctcatcctactcctaagtaggataaaaaataataagctgaataaacaattcatcttattattttttaaggcagggtctcactccatcacccaggctggagtgcaggggtgcaatcatggtccactgcggcctcgacgtcctgggctcaaacgataatcctcccacctcagcctccccagtagctaggaccacaggcatgtgccaagacgcagggctaatttttttttttttttttttttttgagacagagtctcactctgtctgttggccaggctggagtgcagtggtgcaatctcggctcactgcaacctcagcctctcggactcaagcaattctcctgcctcagcctcccgagtagctgggattacaggcgtgtgctaccacacgcggctaatttttgtatttttagtagagacagggtttccaccatgttggccaggctggtctcaaactcctgacctcaggtaatccgcccgcctcagcctcccagagtgctgggattacaggtgtaagccaccgtgcccggccacgcacggctattttttatttttttgtgcatacagggtccccctatgtttcccagactggtgtggaattcctgggctcacacaatcctccttagcctcccaaagtgctcagactaaaggtgtaagccactatgccctgccccgacaattaagcttagttcaaccccgttatctcttcaggagccacagagtctgaggatatgaaaaggcaagaaattaacttattcaacgaatatgtattgagactgtgctatgtgccacaacttctgctagggccccacactatgataggagggacccgcccagacatgaggcttcacccactgtgtgggcggcggtggggatggtccagcggaggctggggccctgagatcagatttgaacgttaccactgctatggtttttggccagttgtttcaaaagccttggacaatcagcctaggcttcctaggcccattacagatcctcctctgacaggtccctagtggtcgctggcgtgtaaggaactgctaacattagcccttcaatgtgtcccagggaccagtaggcacctcctcctttatcacgtggctatgatatgtttacattaacattcccccagtagactgagatctctgattctagtacctgcacccagcgcaggcctggcattcggtgggcgctcagttaatgcctggcgaatgaaaccttttgcctcttccctgaaagcattccctgagggcgcactcgtaaaatgcccgctgcatctggcctggccctttccctccccgtcgagtccattttatccgtctacccgccaagacaaggctgtagtttccgattggaggattaagggctgctctcggtcgtgccctaaagctgcaaaagactggtacccctgggctccggctgacagcgaccccgagctggtgacagcggcccaaggcgactaacagcgggatctagcggagaaaggcgccgccgccgttaaagggggttggtcctgtccctaacttgggggccccgccccgagatgcgaggtctggagggcgcagcgttccagcacccacctctgccagggccgtctcggccgccctgctccgctgccccggatacgaccagcgccgccatcacctgcctgcgcatgtggtactaaaaagacagcgctggaagaacgcggagagcgcagacattgcgatcgatcgccgatcggccagcgggggcgggggatacccgctgggcggggccataaaggaggagataggggcggggctgtagtgggctccaccccagcccagaatgccgggactcaggattccctagaggtccccgactatgcagttgcccttgccctgcgacttagtctcccactcctctccccggccgggcacgagcctggcactcccggaccggtgctctcctatgtgcgaactccctgcacgaactctgcaggccgagtcttgtgaaggggacacccaccagatgttccttgagccccccctgccagtctcccctcctggtaagcagtggtcggtcacccggccgccgtgtggggccacgttccctacctagggggactctactgtccggcaggacagaactcagggaccaccagcccagctccaagttgagagtcttggtgcaggtttgtggatcgcccttatcagctttttaaattattttttttgagacagggtcttggtctgtcgcccaggctggagtgcagtggtgcgatcatggttcacagcagtctcaaccttctgggctcaattcatcttcctgcctcagccccctgagtacccgggaccacaggcgtacgttcagctaatttttttttttttttttttttttttttttagtagagataaggtttcactattttgctcaggctggtcttgaacctctggactcaagcaatcctcccactttggcctcccaaagtgctgggattacaggcgcgagccactgcacccagcctttatcacctttagaatccactgcgtagaccctgtagaaactgcccctctggggaaggcccacagcctgagggtgctttcctgggaaggtgggcagtggaggactgtgatgtctaacccttctggaccctggccaacctttgccctgcccctcagggctggtctttctcctgatcactggccagagccccagagaccccaaagagaagacagccagtgagacggctttgacctgtggaagagcaaagtacctgcaggactggccctcagcagtctgtcccgtggaacaatggtcttccaggtctgacggtctacccagccccctggcatcctcctcctctctctgcggtggtgctgtgatcacagctggccctttaagtcagctctgtgtcctcgggctcccccagaggccctccctgcttggaaacccctaattaaggtgcagggagaagtaaaaacaagcagccagagacaggccctgcctgggaggctgcccagagaggaggaatggctggacaggcagggagtgagcagctgagggaccatcaccaagggtcagtgctgtgccccccaggccaccggcactcttaggacaggtagctctagacagaaaagtgaccaatgtgggtcccaggaacactcccctcaactcgataagcgtccggactagaccttcccatctccccccagcttctctggatccccagggtgcaagatctgaattctgggagctcagcccctcctctctcaggacactgctgcccagcctgtggacagccttagctgtgactgcagcatggagtttcaaggggaaaggactggctccaactgagcaatggcttctccctagcaggcgccatatcccttgggacctttccctcatcagaggtggggcctgtttgatggcaaaagtcccatccctctagtaacattgccccgcacccgctgtgcctaatgagctgctctggcccccattaggaagccggatgatgcctaggagaactggacatgaagaacagatgtgagaatgcttccccaagactccgtggtgcaggacattgggggctgccattcagcttgggctgagggcacctccatctgtctgtgggggtctccctgcctgagttactcagcagtctgagtaattactgcctgacaagaaggcgggcacagtgcacccccacagta

SEQ ID NO: 1243947 - DNA, 4001 bp, Homo sapiens
cccctcctgtcccatcactgcaccccagccccagtcctgttgacctgtaaacagccaagtttgttcctgcctcagggcctttgcactagctgctctttctgccaggaaccctcttcccccagatgtttgcgtgaccggttccttcttttcaatcaggtcttagttcaaatgccccatcctcatggtggtcttctctatcactccacctaagcagacccaatccccagtccctccccacccccaatattctgctgtatcaccctggtttgtcttcatagcacatattgctggctgacattatcttatttatttgatttctagttttcagaccgtcaactagaagatcagatccaagggctgggatatgcctgctgtgttcactgctttaaccacagtgcctagcacatagtaaaggctcaggaaagatcggccaggcacggtggctcatgcctgtaatcccagcactttgggaggccgaggcgggtggatcacctgaggtcaggagtttgagaccagcctggacgacatggcaaaaccccctctctactaaaaaaatacaaaaattagccgggtgtggtggcacgtgcctgtaatcccagctatttggaggctgaggcaggagaatcgcttgaacctgggaggcagaggttgcagtgagcccagatggcaccactgcactctagcctgggtgacagaacaagactgtctcaaacaaacaaacaaaaaagatttacagaaggaatgagtcatagagggccctcaactccttggccttcaaacctaaatggaaccaagggagggcagacactgggaccagctatctagtgttgcttgcttcctgctcccacaagcctgaatggctagccactagcctggccaattgcatctcccattactcttccataacccccttctgatctagattgttctcactgtcccatgaacataccatgctcactcccatgtctttgtctcagcagtggcccccacctgggatacccttccaacaaccagctcaagtcccactttgtcctggtgtcatcgttctctcctcacctctcttctgtgagctcctccagcccttacattctaaagtccagatttgaggcttcattatgtattatctatgttggggtgtttactttaaatactgagtgctcaccatgtgcccagtgctttgtaaaggccatctaatttaactcagctgtgtactaagatggagcaggggagtattaccccatttacagatgaggacactgagactccaagaaatgaagtgactttccaatgttttacagaaggtacgtggtggacctggggctcaaacccaggccttccagactccagagtcctgattcccttgctccaatgggctctcagctgctgggtgaggctgttcctgagaggtctcctcttgcacttcccaaaacaacagagtagacccaggccccaggcccagccatcaggagactgaggtttgaaccccagctccgcctctctctgggtcagatgcttgctctgtgagctgggactactctactcgggcacacggtctgggactgaccagatctcttggggtacgtttgcagtcagacctgggcgtgagacccgctcccgcctggccctgccttgggcgcgcagggcggcctcggcacttgtctggcaacttctccgcggcctcggatcttgccccagcattactgctggagttgttcccccattttacagacaggaaaactgaggcaggcagaaaggaaggccccgcccggccggccctcacccttgttcttctgtgtccgagcgatctccttctcgatctccgagatcttctctaagatccccatggtagcagcagaggtgggcgcacagacagcggtggcggcggcaccggcaattccggtctgacggcggcgacagagtagcgtgcgcccggaagccaaagagaacagcgttctcgtgggcgcctggtgctccaggattcagagtccgggcgagccaagtgccagacactatcggttccgcccgctgggccggccaggctgcggacctctggaaagagccggggcggggccgggccatgctgtactggcccacggctgcggctggcaggagcaagcaaggaagagagggaatctgcccgtgttgaactctgaactgcgggtccctgagcgcagctgactggcagtgtaaggaaaaggggctgagccgaaagcctagtggctttcattttatactataaatggaggtgtccaatcttttggcttctctgggccacattggaagaattgtcttgggccacacgtaaaatacaccaacactaacgatagctgatgagcttaaaaaaaaatcgccaaaaaaaccctcaatgttttggccgggcgcggtggctcacgcctgtaatcccagcactttggaaggccgagacgggcggatcacctgaggttgggagttcgagaccagcctgaccaacatggagaaacccatgtctactaaaaatacaaaattagccgggcgtggtggcgcgcgcctataatcccagctactgggaaggctgaggcaggagaattgcttgaacccgggaggcggaggttgcggtgagtggagattgcgcgccattgcactccagcctgggcaacaagagcgaaactccatctcaaaaaacaaacaaacaaaaaacctcagtttttttttctttgttttagttttgtttttttgagacggagtctcactttgtcatccaggctgtagttcagtggtgtgatcttggctcaccgcaacctccgactcctgggttcaagtgattctcctgcctcagcctcccaagtagttgggattacaggcgcgtgccaccacactcggctaatttttgtatttttagtagagacgaggtttcaccatgttggccaggctggtcacgaactcctgacctcaagtgatctgcctgcctcagcctcacaaagtgctgggattacaggcgtgagccgctgtgccctgcctaaatttcataatgttttaagaaagtttacgaatttgtgtttggccacattcaaagtggtcctgggccacatgtggctgcagacctcaggtgggacaagcttgaagaggttcaaaatggatccccaagatgctgccactgcactccagcatgggcaacagagcgagaacctgtctcaagaaaaaaaaagtggatccccataccacctttttttttttttttttttttttgagacagggtctcacttgatcacccaggctggtgtgcagtggcgtgatcacagctcactgcagcctcgacctcccaggctcaggtgatcctccctcctcagtctgggagaaaatcagccaccgcgcctggctgatttttgtattatgttgtagagatggagtttcaccattgttgcccagtctggtcttgaacttctgagctcaaggaatctgccagccttggcctcccagagttctgagattacaggcatgagccactgcacctgccccccataccaccttaacgcagtactccaactcaggatcacctaccatcagatgcctcctgatacgaagcagtgtaaagtagacagcatctcgtgacattttttcttagacaggctctccctctattgcctaggctagagtgcagtggcgtgactacagctcactgcaacctcaaccttccaggctcaagtgatcctcccacctcagcctcctgagtaattgtgactataggcccgaaccatcatgcctggctaattaaaaaaaatttttttttgtagagatggggtttcactatgttgcccaggctgctcctgaactcctggtctcaagcagtcctcccacctcggcctcccaaggtgctaggattacaggcatgagccacctcatctggctgacagcatctcttatgtagaattcttgccaaaaatactgtaactgagtttaggcatgaggaaacatcagataaatgtagaaagtggaacattttataaggcaattggccttggttc

SEQ ID NO: 1243948 - DNA, 4001 bp, Homo sapiens
gtagcaggctcagccccacacacagcagtgcaagggggtaatggggaccctgtatcagcaatcatgtttatgcagagggagctccctgagggaagagagagccagtagggctcggcccctagcccccaaggcctgaggacagccaccctccagaggcggagcacagaggacagctggctccagcctgagccactgtcacgacagaggcagggcctgccgtcctccaagctcaccacacctggggctgcactgagctggctctggcccctgccccaggtgcccccatgctccacatggagctcacctctcttggctatcatctgtgggcagcccaagttcaggtcaatggcgtcacagtaatcctgagccaggagagccgcctgaacaaacacctccgggtcattggcacagaactggagaagatgcaggagtcagccacgggcccagccaggccctagtcccttgctgcccagccctacgagaggtccagtgtgaccccatgagggtgtgggcccaggttcactgcaggagggtgctctgtcctgcggaggcttacaatatgacaaagccgggaggagtccccaagccacccggatttacagattttcttctgaactgtggcagaagccacaatcactgacttctgaagagcagagccatctccactggttctgaagagggagtgtgagtgtgagaggcagcaatccagaggccccagcagggctgcaaacctcacagcacccaggctgcctgagccactcctagagaatggggttggattctggcaggtgcacctggcagccctggctccaccacaggaatcactgctgtggctacgtggactctacatgcctggtgccaccttctccctctcctcctggaattgagctgtctctggaaaggctgaaagtgatgtcccgccacagagagaagggtttttccccaggcattccaggaccgggaacccaaccgcggccgcggccacagcccctcctgcgcacctgcacgatgaggggccggtcctcggggcacacctcgcagtacaggttctccttccggtagttggcgtcgcggacaaagacctgggcatgcagcatgggcgtgtagcagagctgtgccccgtggcgccggctcagcagcctccaggccagctcgctctggtccaccatgggggccacgacgtggcgggcccctcgcagggtgcggctccagaactcgaagccctgcagctttggcatcgtctccaggctgggggaaaggcgcagacccggggttcagccaggcccaacgaggggcttaagactcaactcagaggcagcggtcacccttctaaggccgctccagtaccaccgttgggtcacacgcgggggcactaaaggcgggggtcggtgcaggctggagaacggccactccagtgccgccacctcctagcggacctcgggggagccgctggacccctgggacttgaccctccctggggagcgggactcgatgtcggcctggtaggggactggcgtgaagggggaagaaaccttgacgccagcgtccccgcgggcctggccctgagcaggccgcccggcggtgaagttaggacccccggccccttcccgggagaatcggctccgcgccgggccaggggaagggcagagcttccttctccgcacccggccaggcggcccggctggcccgaaacgccacaggggcgcccctcgcgagactcctccggagccacgcggcgggcagcgtttgctgtgtgaagtgacaggagcccacacgcctccgcgtcctcaccgcgcgagggccccgccgtgtccgccgcgcgcctttggctccgagggcgccgggtgccggtgtcccgggcccgcccctctccggcctcgccgccgcccggggcccctgcagctcccggggcgccgcgaacgcccgcaccgcgccggggccgccgccgggccgcagccgggcccaaggctccgcgccgccaccggaaggtgcccggtcctgcgcggtccgggcggcccacggtgcggcgggaaacgcgttccccggaaaccgcgcccggctccgaggggaccggcgacgagaggtcgcggcgcggggtcggaggtcagaggctgaggtcaccaccgtacccgtcaggccgtggctagagaggggtcggggctcgccgggactcaccgacagctcgctggaaacgaggcatgtggaaattgggcctcgctgaggcgcacataaggcccgggccgcgggtagaccgtgggcgctgaggccctgcgctgcccagcccccaagttcgcattgggggcttcatcccgttatatcctaaagcggccccagagccctgcctcgaacccactcacctgccgcctctgaaagccactcactttccgccgctgcgttgcggaaaatcaccctccagggaccttccttgcccgccctgggtttccgcagccgccagccttcgatcgactttcctacccgccgtggaccctccttgggttatttcgagctgtggggacccactgggaaccccagagtggatgtgaaggttattttaaactgaaggcatttgagacccaacagatgtaaaaagcagctttgtcagagctttccatatctgagagcgaagcccgaagttgaaccaggacattcagtacctaaaacatgtgaaatctcttgggcccccggaatcactaaggaaaactcaggctggaagctgctcagggcaaacctgcctcccgctctattcagagtcaccctctgctcgctgagatagatggatatctgactgactcctttgaaaaggctcatcagaaggctgggcgcggtggcgcacattgagaccaggagttcgagaccagcctggccaacacggtgaaaccctgtctctactgaaaatacaaaattagccaggtgtggtggtgcgcccctgtagtcccagctactcgggaggctgaggcaggagaatcgcttgaacctgggaggcggaggttgcagtgagccgagatcaagccattgtactccagcctggcgacagagcaagactgatcaaaaaggaaaagaaaaaaaaaaaaggctaatcagaaactcaaaacaatgtaaccgtttgtgtatcacctatctgtgaccaggaagctccctccccgatggcttttgctttaaattgtcccgcctttccagactgaaccaatttttttttttgagacggagtcgctttctgacccaggctggagtgcggtggcgtgatctcggctcactgcaacctccatctcccaggttcaagcgattctcctccctcagcttcccaaataactgggattacaggcacccaccaacacacccagctaattttagtatttttagtagagatgggggtttcaccatgttggccaggctggtctcgaactcctgacatcaggtgatccgctggcctcccaaagtgctgggattacaggcgtgagccaccgcagctagccgctatgttcatcttacatatattgattgatgtctcatgtctccctaaaatgtataaaaccaagctgtgccccaaccacctcaggcacatgttgtcaggacctcctgaggctgtgccatgggcatgtcctcaaccttggcaaaataaaccttctaaattaactgagacctgtctcagattttctgcattcacagatagaacagccttggtggtcttcagaggtggccagatgtccctggtggactgcaaggttgggtgcacactaaggaaagacaggcgagggccccagctgtccaccgccctggctgaacgtgaggctttgtacaagcaaaaagtaaaagccaagtccaaattgtaaaaactacctgaattccaaatgcagccacaacccacacacagcgccatcagcagaggctggaggccctactggttcagaatatttaagcacagtatcgaaccagtaattgtaaaaggtaaaagattttttttttaagacagagtctcgctctgtcacccaggctggagggcg

SEQ ID NO: 1243949 - DNA, 4001 bp, Homo sapiens
taatgtatttcttgtgattttgggaaaagcatttttaatccattttgccttaaaatcccaattgcaaaggaacccatcaaacatagccctccctaaagcccactttttaaaaatgttaaagtattaaaggatttcctggacttacatacttggctagtcttttatgatatgaatatacatttatgccattctattaattattattacagaattcatacctgcagtcaaccgatatgaaagctttcagatgagaactcaggacacacacgttcaacagtgacattaaaacgacttggaatgaaggaaactgtctccagttttatggtggaaagccaaaaataccaagcaactacctctcctcccccaagcgtcagaagatgagtcagagctggaggcaggaatagggcccatgtgtcaagcctcctgtgcagggctccttcctacctcctcgtggcaaccctcgtccctccctcaggtcagggtctctgccccggcctgtccctgatgtgaagtgtccctgatgtgaattctcaggcgtctctggcgaagaagaggcgttcactgtgggggtgcctccttccctgcatttctcaagggaaccaagactgggggcctttatgagtccacaacaactaacaataaccaaatcgcagctcaagggagtggagcttccagacacacgcacaactctgcaaagaatacagcacctttgttcccctggttttagagagcaggaaggaaatgagcggagagaaactgtgacttgtccagtgttacttaactttgtggcagagctgagtctcaggcatggagctgccggctggcctcggcctctctgactcttaagtgatctgtagaatgtcagggaggacggtccaacattccatcatacttctgagtggccttagggactaggaattccaggagactctgggttaaatctcttggtccctattcttttaaggttactaaggatacccggagtttgctcttcgcctccgtttttacatctgtaaaacgggatggtaacgctctccacccccctctcttataaaacgataatgaacagctaacgagttaacacacactaaatgtccggaggtcctgctggatagaaagtacaaggtggttttaaaaaaaaaaaatctctgcatggtaaaactgcatttgtaagtcgctcctccttccctagcctctgggatgcccagttaccataacactggctggtaccactggcaacatccacctaaataaaatacagttatacaatccacttaaggcggccacagcacgcaccccctctttacaaacaacaactcaacttcgctccggagcaagggtacttaggagaaataaaaagacagatgttagcaccgcgcacacccatctaccaccgcagagaaagactcaagttggacacttggcatcgctgaaagtcaagttgcttctatccatgcaccagaaacctcggggagatgcaaaaagcggcggcgcgctccagagcgggtggatgccagcgagagtaggcggcctcagcggggtcggaaggcgacggaggaggcgcggccgaggctgctggagccccggggcacagggacagggtcgcgggggcggcgcggcgcggcgggggagcggcagggggcgcacgctcagggccggcgagggtgcgctgcggaaggtctcgggcctctcctccgcgggccgccccgaagagtcaaggaccgccagggagcaggtgggggcgccggcacaaagtttccagaggcggggtcgcgcgggcctctgggtccccctgcgcccagggacccgaagcgcgaagtcccgccctcccgccccaccccaacaccttccccacaacccccacccccgggcctgcgggtcccctaccggcgcggcgcggcgcggagcgggttgcggttagggctccgtcctcctgcgcggccaccggcttctgcgggctgggcgccgcgcgcgccgcctcctcctccctccgcccgcgcccggggcgggccgcgcgcacgctccctgcgcctggccgccctctcccgaggtggggggacgcgacgcggggcggggggacgcgcggggcggcaggcggcgcgcgtgcgcgctgggcttctgcgccgtgcggtgtggtccgggcgcgccctagctcccgaggcagcagcctcccctagagcgctcctccgtgcaggtcccctggtctcttaccctgcctcacacaccggcgacccctcgcttccccagtcagcgtctgcgtatgagccgggctcgaggcgggctgcgggggcgctctgctggggtgctttcgggattggagaggattaaaggcgagaaagcaaatccgatacaggtgtgaagccgccgcgggtggctcgggacggcctcgaccccaccccaccgcctccctagcccggagagcccgggggttgggacccaagagcgaagggaaaatcagtagcgcggcagttcctggctgacgcttgctggaacaggtacgggcagccgtggcgcccgagacccggaggtgaacatgcaacctccgtgcgcatctccacctgctctcgccacgccaaggtgccgtccgagtctcggagcccacacccacctcccgagtccccgaggcagggcaggggttctccggagcgcaggcgggacacgggcatttgagggctcatttgctgtgtgactctgagggtcttttaaaattcaggtctgcccatctgtaacataagtcggtgcgaaacggacgttttccagcacagccccgcctcccctccgcctctggcaggtgaagggagacacgtgggaggcaaagcgacttcctcaaggctctgccgtgagtcaaggcacctaagagtcctgactccatgcccagtccttgactcaccagcccctgctcctcgccgttgcaaatggttggcctcagaattgctgagcagtcaaaacgagtaggcatgggtttgcggggaggggtggaggggagaagtaaaacccgcgtttggggtttacatctcccgatgtcctcaaccaaaagctttgaagctttttcatgttcttcccgatctccactgcccaaccggcttcagagtcatccggtgcgtgctggactatctaaaagttagtgataattttaatcataatcctgggaaacgaaaaaggcccagactagagagatttattttcgtcttcgtaaaaagagaatcaaagctttaaaattaggcaaaattaatctaagagaaaacaaagcagcatactttgctagattcaggaaaccactgagttcaaatcgtgcctgggaaaagcatcttcctaaaactaaattgtgacgtcagttcacttagtgacttacttgtttacatgccaatacgaaaagagcaaatctctaacagaaaggattgtgtgttttcatttctgctcagcaccccctagtccttgaagcttcagtcaattcaatgactcagcaacacaaatagatgcatccctcttcacattccagcttgttacactgtaggcaggtttccaaaacaagctctagtgacaaggagctaggcattttcatggattatgggaactaaacctaccatgaagagtcagtgaagagggaggtgggctaaaatagagtttgtgttgtgtgcgatgtgcgtgtcaagatttagagatttagagattaagtagaaagaagtgctggagtcagaccatttaatgactgtacagacatgccctggggtagggaggcggtttatgcctttacagaatgtggaagtgcgggcttatacatgcctgtaccaaaaatgcaatttgaagttattctcttctggaccagcactgtccagtagaactttgtgtgatgatggacatgttctgtatctccactctccagtacagtagccactagcctcatgttgctactgaacacgaaatatggctagtgtaactaaggaagtgaatttaaaattttattttagtaaatttagatagccacatgtggctagtggcta

SEQ ID NO: 1243950 - DNA, 4001 bp, Homo sapiens
ttcgctcttgttgcccagttggagtgcaacggtacgatcttggctcactgtaacctccacctcccgtgttcaaacgattctcctgcctcagcctccggagtagctgggatcacaggcgccaggcaccatgcccagctaatttttgtatttttagtagagacagggtttcaccatgttggtcaggctggtctcgaactgctgacctcaggtgacccacccgcctcggcctcccaaagtgctgggattacaggcgtgagccatcgtgccaggcctctaatactattaataattcaacattcaaaaaatttacaattatcattattactatctctactatgaatgaacattgtacagtgcctgacataaagcaggtgctcagactggtgaatgaatgatggaatggatgagaactgtccccatgaggctggggcctgatggaccccttctagttccatgatgacccccatttccgtggcagtccttggcaggctaaacagcaggtcatagcggaggtcaggaaatacatacatgaacaagacattgaccctgtccttgtagtccctcacacactctgagccaccatttcctcctctgtaaaatgggaggagggttagttttgagttttcaacatgccatccttgggctgagccatgaagcttaggattttggtaactgggtcctcagagtatcgtgaaaatccaacttgaggctttccaaggctgtacaggcatgctaatatattctttcttgaggctcctatttcacatctcagaatgttaacactggttctttcctgctgattagacattcttactagaaaaaaaatttaaaatttaaattaaaaaaaatctcttactgtccgggtgcggtggctcacgcctgtaatcccagcacttttggaggccgaggtgggcggatcatgaggtcaggagtttgagaccagcctggccaagagaccagcctggccaatatggtgaaaccccgtctctactaaaaatacaaaaagtagccaggcgtggtggcgggcgcctgtaatcccagctactcgggaggctgaggcaggagaattgcttgaacccaggaggcagaggttgcagtgagccgagatctcgccattgcactccagcctgggtgacagagcctgggggtgaaaggtcaagagccttttctaggtggtggctcaggtccttaggggggttatcactggaccgttctagaatctcctgtaaatcaaatcacatctggaaggtgggggcctggaaatcccggcccagctccccggactcgctcatttggggtgtttaggttccctgatccgggactgccgggccgggaaaattccatgcccgaattgtgacgtcggcccgttgccatggcggcgaaggcagacattccgcggtgacctcactgcagaaccaggcagctgtcacatgacgcgcgggcaggagaccggccgggcgaccgagggtcacctgttaagtgaacatggtagccccgaccccgcccaaggccaagccccaagcgggtggcggctgggacccgggcaggcgccacccgggctccgtgcaccccgccacggggaagggccgcgcccggccaggcagggttccagttccttggccccacgcgcgggggtaggcgtcgactccaggcccctcccaagcccccgctgtggctcccggaggggccatcgcgcccgggctcccccaacccaagactcgcgacaccccgaccccagcctcgggtgggcggggcgtcccgagagggacggcggggccgggctcgcgaaagggactcacgcgttgcccacgtagatccgcggggtgacctcgttgcagggctggctcgggaggctgtagcagccgctgccgtccgagagcaggtcgttgagatcctgcaccgagagctcgaacgagcccgacatggcggcggcggggccctgcacgcccggcaggagcaagcgaggcggagagcggcggatcagctgggcgggggctcgcgccgggagccgccccgtcccgcccctggggcgggcccgccgggctccgggagctgcggagcgcgggcgccgtgacgcgggggccccgcgcgccactcctgggcgcgtcccggggggaagacgccaccgccctggagtctcaggggtcctcgccccatcccggtccaggccgtttgtgtatctttgtaaactggcaagcgcggtaacttccttccctgaattaaatgcagggcccaataaacatttcgtggcggaggtacacctaggggtcgcttcagtctttcatgattacagggaccgccgggttcggctcgtgagcggctccctgcagtggaggcaccacccgggcgcttgacagaatccccgccccagcccagccctgctggatcagagtggacattttacggaccccaggaggtccctacggtcaaagtctgagaagccctactctggggcgcatctgctttcaacattcattgagagtcatcgtcgtgcttaaaagcagtcaggtttggaattctgaggaattacttaacctgagcctgtttgcagggaaaaaaaaaaaaagcgggatagtaatggtacctaattctagggttgctggaagggttaaatgtgacattcaaagaaggcacccagcactgcatggcgagcactcaataggtgttagtccttcatcaacaaatgcgttgagcacccagtgggtgctataccctgtgctggggtggagataaatcagactcctgcagcccttcctggagcagatgccagcccaccataagccactcagcatttcctgaactcccactaagtacaaaagatagtctctgtactggaggaaagctgccctcccctactgccatgaaaaactggcagtttccttcctgcaaaagggcaaatttggccttgaattcaggaaccccacatcctgagcccagccctgccaccaacttggttcttgagtaacgttgctgctgctgtggtcttcagtttcctcatttgcaaaaggaattggatccgattatcattagggtcaactttctcctcctccaaaacttgtggtcttgcaccttcaggggagctattgcagtggagactacttagctgatagcccaagatgtgtaaccaaggctggaatttctgtatccctcaccccaccccgtgcctgcccacccctcccggtgcaccacttctttccttctggtgttggctggcagcatctgcattctaagcagcggggaaagctttcgagttccttgaccttcatcttgacttgagccgaggttagcattaaaaacacaagcccagaggcagccagccatgctctgctgctcctactcccttcccgggacctgtccctgatgtcataactgggtaactatgacagcttgtcatggggacagctaggcacctcacagaggagtctgggtacctcatttctgaagtgagactaggaagagaagatgaacaattccctggattatctggcctaccctgttatcgtctctaatcacaggcaaagcacaaccttcagaaagaaactggactttggccactacgtatctcacaagaatagaatacaaataggtatgtgggcagtttgggctggacactgctattagggattttggaatggtaccccataaagagatcaacaggaaaccagaccaggtcacagctttgggatgatatggccttatctgctgagtttggggaagagggcattagcaccaataacaaaatgtatcttccaccagggagttcactggatggaaatactcctttaaactccttaaagccgaagtacgttagaaaggggataagacttcagaagccaatagacaggctaataatattggaaaaagattggaagagaagctctttcattggattagaaggacatttatctctgtaaattttattttcactattcttttgtttctgctcaaaactctccagagatgttcatttgataaatcaaaccaaacttcttgagtcgcat

SEQ ID NO: 1243951 - DNA, 4001 bp, Homo sapiens
tgccacacacgtgaactaaccatttcattctgtgattttctccatgtcacagatgagatcaagacacaaaatttaaataaattgtccaagattacattgctgacaactagaaaaaccttgccttaaagccaagataactcccaagatagtatcagcatccccatgtcaaacaatctttctagctagagtccagtttgttcagttcttctaaaacccatgctatcccaacttaatccagcctgccttcaaaaaagcagaggttgggccgggcgcggtggctcacgcctgtaatcccagcactttgggaggctgaggcgggcgaatcacgaggtcagaagtcagagaccagtctggctaaaacggtgaaaccccgtctctactaaaaaatacaaaaaattagccgggtgtggtggcggacgcctgtagtcccagctacttgggaggctgaggcaggagaatggcgtggacccgggaggcagagcttgcagtgagctgagaatgcgccactgcactccagcctgggcgacagagcgagactgtctcaaaaaaaaaaaaaaaaaaaagcagaggttgaggacccagaaggctcagccccaaagaccataaacacaaaagggctttctctgcattatttacacgccaatctagtccaagatagccctgaatgtcccaaattaccctaggatagcccaatctattctagcacagcctacaatgcccccacacgcagctgtctgcaccagtctagattggaacatcccaatacggctgcctgtgctagcacaggccccaacagccttgtctgcccctataccgagtgctccaataaaaccaagtcttgccccaagagaaaccaggattaaccaatacaacccagtagagtccataatggcccaagtgttttttgttttttttctgagacggagtctcgcactgtcgcccaggctggagtgcagtggcgcgatctcggctcactgcaacctccgcctcccaggttcaagagattctccctgcttcagccacccaagtagctgggactacaggcgcgtgcccccacgcccggctaattttttgtatttttagttagtagagatggggtttcaccgtgttagccaggatggcctcgatctcctgacctcgtgatccgcccgcctcagcctcccaaagtgctgggattacaggcgttacaggactcctgagaacgtactaaacaaccagacaatggatcaatttactcagtacagactagaatactccaacataaaccagtatgcccccacctattccagtaaagcctaatcttgtctaatctggtttaggatatcctagtctgtccgtgtgcctcaatctatccaagcataaccttgtccatcctgggatagtcaacctacctcagcatagtacaatctgctccaccataggccagaaaatcccagtgtggcccaaagtagacgtgtgcccctccatgtcgcccaatccactctagcaaagcccccgccggtcctatctaggccttgcgctcacccgaaatcctgatccatagacttgaaaaagtacttggcgcccgcgggccgctgcaggacgctcttgaaatcgccgagggtgatgcgctcggcggggacagggatcttcaccaggtagggagtctcttcctcatccaggtggtaaatcaccttcgtctccccaaccccaccgcccccagtgctgctacccgccatggtctcgcccgcgcgctcccgggctccaccgcccacccaaagggctaatggcccctgccgcgcctgcgcacacccgcaaaccgacgcgcgagcgcggacaggactgacccagtacgggagagaagcaaaggggaaaaagcacggatctgcgagggtggcggcggggggcgggccgcggggtgcgactcaaagccccggtctcagcggccgccgcgcgccaccgccaccgacgccgcgagcttcctccaggtacccgcccacctctcctcatgtcacgtgacttaaaggcagccaccccgcgctcctcagccgccctccgtcacgtgatcccctcccaatcacgtgaccgtctgactccgcctagtgcccccgccacatgatcgctgccttcagcaacggtctcccagcccccaaacgtgtaccccagccgaggtcctctgagcacccaggctaagctggcctgtgccttcaggaaacggaccatcggctcccaccccgctttaccccacccacgatggagcacgaagcaactctgacccgcaggagtgtgcgtgcagggagtgaaggtggggactgtgggggttcctagactcgagtggggagggccaaatacaatgaaagctctaaggtggcttacttgtcttggggtgggaaaggcccagtgctgtgatatcttcagattggactttgagacgtgggtttcagccccacctccagctagtcttcagccaccaaagcctccctcccgagcaggacagtgagggctataaacacaaaagagcccactctgctttatttacaacacgcaggctgtctgtacaaacagcggccgatattattaaaaacaaaagaggtgagtgagaatcgtcacctttctgctttccttcctcacttggccaggctctagtactccacctttgagctgccatgcccaataggggaagtccaaaattaaaaatacaaccggtgtagaagaaaataaatggggagtgaaatagaagaaaagatgagggaggggagtgctaatatttacactagagttttatagacaactgtcccattccatcccaattccaatcctgacccagaaagtgatggtggcaggtccaagagacagagattatgtgtcgggacacagacagcctcccatccccaaccgtaatggattcaatttcaagtccacagagtggggaggaaggatagggtgggaaagtgagacactcattttcaaacaagtctcccttgagaattcctgccttgaagtgcagacagtatccaagctccaggggataggctgaggaccctgaggctcagttcccaaatcatgttgtcatttggaagttccaggctaaagttggtgccatcagggctctccagatttgggaggcccccctaaccgccgggcctctggcctcagttccttgcatttctggcaataaaagaagtcggggacgttggtcttcttaatcttagcacaggagaggtggatccacgtcccacacaggctgcactcaatcatgggccgccctgcaaagggctttcgacagtaacatgtgatcagatcccatgagtcatcacctggggaaaaaaaggtttgtttggtattctgcctgagctgttggatccacaacaccctcaaacccctcgccccagcccgaacctctcacctgattctaccatgatgtcctcgtccatgacccgcatctcgccttcactggagctggcatctccatcttggcttgtttcagtgctgcccacctccttgctttcactgtcagcaggagggactccttcagggtgcactgtggcagggggcctaggagcctcagggggtgttggcagcacagggactggggcttcaccccctaccactgttgccatctcttcttcttcttcctcttcctcctcttcctcctcctcttcagagtctgtatcactggggggtgcctggggaggcccaggaggtgggagtctatccccccgttctgccttttttaacttccgcttcttgctcttcttgattcgagatctcttttccccatccccaggagttggccgaggcctccgaagcaccccaaagccagccccagctcctggccccaactttcggttctttcggtccttctttcgaggaggatgggagaggtccccctgggaaaggggcacgggggtaagagcagcagggggccgggaggtatgtgtcagggatgtgggggacaaaggagatgccactttgggcccatccagatcaaagagagagtccttgagcttcatcttctcaag

SEQ ID NO: 1243952 - DNA, 4001 bp, Homo sapiens
aaggacatatccttggtatcattccaggccaccttgatctcggagttcacaatagcctgtgggctagatggctgaaagggaaaacagaactcaccaccaccatttcagcctgcaccacatgcagagaatgcacacatgccagctgccagccaggcagcccttgaccgcatccaaggccccttcatctagatagcactgccaaactaagcagggctggttccacttcggcagaaactggcagagcaaagaggtagtagaccagcaccctctgcccccacattctggagaggaaaagtcagagcctcaactggagtctgtgagcaccatgtggtgctgaggaaagattcggagaaccctgttcaaggaatgactagttacgtgaccttgggcaaatcaacatcttcattttaaatactaatggttgaaatgagataaatggggtaaactcaaatgggtctgagcaaaggtacaacagcagcacagggagaaaggttcttacattataaggctctgtataagtgaagaaaaactagtgtcacctggtggcctattccaggttaccactcagaagggggcactgtttacaaacccaggggtgggggtggggcctggttagacagcaaagtgaaagtatgaaattggcaccattttgcctgcaagctcacctgctccactgcctcattcccaaagtccaaaggagcaactttgttacagtaattaaaagccaccttactctccaggaaagagcctgcggttacataatattggtcttacgactacaatggccccccaggcatctgagagaggtgaagcccaacccctaccacccctgtccaaggtgccggtaagcaaagcacaggaaggtgtccagcctagcccctccctccttgggaaaaagcaagggacctgggcctccagataggaggaagatggccagagggccccaggccagcagcctcagtcacgagccaaggctcctgtgaaaagcacaaagggcaccccaggacagctcccatcctctattcctggttttgcaaccaaaaaaaaaggctaaatctccgaatgacacggaccaccatccccacccgccaatacacacacacttctacttccctcttcgggctctccaagtgggccgtatccctccactatcccatcctccagagcgctgcggtcccgaagggcagcacctggggaacgaggaagcatcctccttccccccgacctcccgcccgcgccgccggccaggtccgcaggccccggccggtcggccgccctcccccacccggcctggaacagcgccggagtgactgggcgtcctcgctgcaggaaggacgccccagagggtggcggtggcggcaggaggagccgcgtcacgcccgagccctctccaccccctcttccccggcccctgacatcaggggcctccacgcagcgcagagagactcccgggggcgggggcagcggcagctccgcagcccgggcctccagcagcgccacgagggtggccggggcaaagggtggcgcagcccgggctgcgccgagagggaggggcggcgggggcgcgctgcgctgcccggaccgtcaacgccaagggctgcggggccagccctgttccaggccttggggccggctaaggaggccgcagggccaccgcggcgagggccgggtcgtgtagagtcgcacgcgacggacacaggcccgccacccgggggacgcccccacccaccgctcaccttcacggaggcgagtccgcactgggccctggggaggagcgatggcccgaggcagagcacaggcaggggcggtgttccctgggctcctcctgcagctgcagcagccgccgccgccgcggtctccggctcccgcagcccgaggccgatcgctccctgccgcggtccgcccttggagtttcgccggccgcccgcgctccgcctcacgccgcccgcccgcccgcccgctccgcactggcgcctcacagctccgctccgctctgccgctgagcgcggccgacgcgcggcccccgctgaaatagtgccccgcccccgcccccccgccgcgcgcgccgccgtccgcgctccccattggctgagcccgcccggccccgcactgcgggcttctccccgcgccgctctcgccccacatcttgtttcctcccacaatgcctcggggcggagggagggggtggggaggaggagctggagcgggtgggggagggagccgtggccttaagaaaggagaggaatgcggacccctccccccggggctggagaggccaggcctgaaaaggaataaagagacatggtcctgagagaggaggagagggaagggtgtggagacccccagtcccaaggagaaaaaagggagagggggatggagatttcagacccagggaacagatggggctgaggtagagaccccaaccttagagaggggaggagatgaagtcaccagcctcagaggaaaagacaggacactccctcctcccgtatctgtgagaaagagagggacagccagccctatggagagggagaggcataggagccccaggactccctcccctcaccttccgggaaggtcccttcttcctcctttgttctttgaggctgaaggacctaaactcccagctgggcccccagccggtatttgtctacaggagcaatggagacagagccgaagcaaaattgatggggatgtgtctttggtacgcaggcctctgctgtccttgcacatttatggccttggggtcctgggatgggggtgagagtgagcgatttcttgtcgtctgtccctgcctgtccaggtagacaaggttggaggagagtgaatagaagcccccagaggtggtgcctgtcagagctgtgaggagccttcaaaaaccacccatccacacccctcactttataaaggagagaatccaagtacagagagccctgccagatcccgcaggtcaggcttgacttgcttctagctgaaaagaggtgcacccaggaagcagcccctctggaggctcaagagactacttctgggagagtgggtgtgaacgtgcgcgttgggagcctgcctgccctcactccatcccactcccaggaaagatcctcaggcctgcggttttctttctggtctgttttatacagaagtgtctacctcaagggctgacgagcctttattgggaaccaagcattttggccatacagtagggattaagaagctgccggggatagctcccactcccatcttttccccttcgcctctccaaaccatggtcaggaagtcagacttgccctggccctggcctgctctggtttgaagcatcaaaagttagtgttcgttatgtgtcaggggaaacctggaaaaatcattccctctggttactgctttccacagttctgtcctctaacaacctcagttgggggatttcagagaccagttaaggcctggggtatcccctcacactaagggttttctgatgtcagtctttgtgttcatgaatgggaggcgtggcctctatgggaggaagggagggagacgaggaaggatgatttatacacttagggcttgtgcggggctaatcgcctggactgcctggagaaagcgaagctagtaccccctttctccaacagtccttagtttccaggcccttccagggcctgaaggtcagatctgccacgtatggttgcacaggtcattcactgcgcaagagtatccaaccgatggagcaagcgggtgctaaaatacagccggcacactgcttgctagcctgtgtgtcacggtacaagccagtgtccaaccagaagatgacttctttcaagtgttcccaagggttactatgagctagcagtggcccttcaaaggccatgctgccagggcataaatcctccctctccctgctccccttccctgaagtataatagggataagagcttgctcatttccaggctgtggtgtggtggacagaagggcacgaagaacttcaactaacagaagtcagagccacgggt

SEQ ID NO: 1243953 - DNA, 4001 bp, Homo sapiens
atatatatatatatatatatatatatatatatatatattttgtttatatatatataaaatctgccctcatgaagcttatgttctagtcagggagtgaaataataaaatagaaaaataaaacatattgtatgttatctgcaataagtacaaaaaaaaaagtaaagcagggaggggaatatgaaatgtagtataggggaagagatgcagggaacagaatgggtggccaaggaagaccttactgagagggagacttttgagtacagacctgcaagaactgaagtagggagctgattaatatcttagggaagagcatttcagccagaaagaaaagtaagtacaaaagccccgaggcaagaagaatgttcaaggaatagtgggaaggccccaggaggctgaagcaggagagatcagagaggctaagtgaaagtggcatatcatggaggacccctagatgacagtaagaactgtggcttgtactctgaaggagtgacaagcattgaaagagttctgaggagaaggattacataatctgaagttctttctgaaaggatcactctggttactgtgaggagggaaatcaggtaggtctgggttcctgaatgccaagtgaagaaagtacttcaagagtgagcaatcaggctgtgcatggtggcttatgcaggtaatcccaacactttgatgcgggggtgggggtctaagcaggagggctgcttaaggccaggagttcaagaccagcctgggcaacagtgaaactcccacctctacagaattttttttttaatcagctggacatggcgaccttagtcccagctactccaaagactgagccaggaggatcttttgagcccaggagtttgaagctgcagtgggctatgattgcaccactgcactccagcctggacgacagagaccttgtctcaaaaaaaaaaaaggggggtggggtgggcggttaagatcagtactgaatggttcgctaggtttcacaacacggaggacactgacaaacttgaaaggagccatctgggtggggtggtaaggagacaatgtcgtcagagtgagtacaagagagaacggggtaaagaaattgaacccagccagtagggtaggctctttcaaggagttacgttgttaagagaaataaggcagtagctgagaggaaaatggggctgtgaggctttaagatgagaaaaacaaaggcgtcttcactgaagcatgactctgtatgacatcctttcacaaaataccttcctctttcctctcatgccacatttccctcacaagccgcccgactcgctcgcttttctctcgccagagggactgaaaacgtcattaataccaactgcatacacaactccattgcagctactgccattcatgaacgttcaaactttcgtcaccctgttttcatatttgtgtaacaaacgtcgagtgaacgaacctccacctcttccaagaacccacgctgaggaggcttcccatagaccctgctcttacgaagccaacgacttctacaggaagaaagaggacctgtaagctagcgagtgaacgacccgcaagatggaaatgagtgtgctaatagaggtctccgcctcccgctgaaggagcagggaagtgacaccacccccgggaccgccagccttctacaacaaccaccatttctgaggaaccacctgatcagtctcagtcacccttcaatctgcccctttgtcccactcagtcccctcactgttcctttctggaaccttccttcacccagccccaccactgttctccttcctccctcgcaccctactgcattctccaccctccacctcgaaggctcccctcccaactcctcagcgggtctcgcctcccctccccacctctgtcccccaagggtcccactaccggcccgagctgccctcccttcctctcggctggaggcccccgcgctctctgtggtcagcccctgccgcccctcgggcggcgctgctctagctctgcagccttcccaggatcccgcgccgcgcggccccgcccccgcggtcacctgaccgagcccgacgctccgcccaccgaccaccccgagcggagcgggcccaggaccctatcggctgtcgagccggtgctgccgcggccaccgccaccgcccaggggctccggggctgtggggagcggctgaactcaataccgcctccgcgctgactggaaggcactgcggccgcgcctgcctgccccacctcgtaagggcctgtgacctcacgaggccagccgccgggcgctgcattcgagcggtggggctcctgtccgtgcgctttcctcccgcagccccggccgggattccgccctccgtccttgccacccgctcgccactcttccctaatcgctgttcattctccggtgcgctgtcccgccatggtctgaccccacttcaatcttaccttcggtccgtcctttgaacaccccgacccccgacccctttcttccaaaacattccatccttcttggcttctgctactcaataatggacagcagctcgaaggccatgtgtcccacggctttgctgaaatttgtctcgggttgcctttaaggagactgtcgtttccttttgaaagagatactttggttggtttggttttcttctgtgtgtttgtttttcctatgtatttatcgtatgcagttgggcaaaatacttaacgctccctgagtctcgattttctcattcttccagggttgtgggaattcaaaaatatatacgtagtgctcaataaatgttacaatatttaatcccttccgtgatactactgtgttcatttacatcttaaaccttgctttgtaggcattctttaatattttatttagatttttattattattaaatatatgtacaaatcataattgtaaatatttaatggggtacaatgttatattttaatatatgtatacaatatggaacgactaagtcaagcttaacatatccatcaccttgtttaacgttttttatggtgagacatttgaaatttactcttagcagttttgagatatacgatatattattattagctatagtcaccacactatgcaatagatctcagaaacttgctgcttttgtctgactgaaccttgtaccctttgaacagcatctccccatcctgcatctcctacccgccccgtccctttccagcctctaacaactattctactgtctacttctatgagtttgactttttaagattccacatataagtgagatcatgtggtatgtgtctttctgtgcctggcttttttcacttagtatgtcctccaagttgattcatgttgtcacaaatgacagaaattcttttttaaggctgaatagtatccattgcatatgttgattcatgttgtcacaaatgacagaaattcttttttaaggctgaatagtatccattgcatatgtttactacattttctttatccattcatccatcgatggacacaggttgattccattatctcagcgattgtgcataatgctgaaatgaacatggaagtgcaaataagtctttgatatactgatttcagttactcaatatatgcccagaaatagcatcgctggatcatatggtagttctatttttaattttttgggaaacctccatatagttttccataatggctgtaataacactaacagtgtaaaaggtttctccacatcctcagcaacacatttttttcatcattttgataatagcaattctttttttttttttttttttttttttttgagattgagtcactctgttgcccaggctggagtgcagtggcacaatctcaaatcactgcaacctccattcctgggttcaagcaatcttcctgcctcagcctcccaagtagctgggattacaagcatgtgccaccacacttggctaatttctgtatttttagtagagatggcgtttcaccatgttggccagggtggtctcaaacgcctgaccctcaagtaatctgcccacctcagcctcccaaagtactgagattac

SEQ ID NO: 1243954 - DNA, 4001 bp, Homo sapiens
tgaaaaactagagagaacagaacatggagatatgtttgcaacggattggttcaaatttattgccataaaaccatgatttgagaaacctaatggttcagtgtctcatctcctactttcagttgggcttcgtagagaaagcgaagtatgtctcctttcttcatccttgtattcctagtacctagtatagggcctgacatattcagtgaccaataaatatttgttgcttgaataaatcaatatactcttttaaattcaaggccaggctgaatggaaactctctgacaacatcactgaagcattatagtaagaaacgttatcctccgatgcacttagaacatctttttctgggatatcagaacaaaaaagaaagtggtagaaataaaaaagtatttatatagcacaagggccagtgagtaagccatgtaaatagactcaataaacaataataaaatttcaataaacaaacaaccccaaattccccctccttcccctgtgtatctcttcctaatactcattttattttctagtttcactcgctgtaatatttttccttatttttcaggctggaatcataccatcaggcacaacttagcatattggttgtatttgtgatttaagaaatgaaagtcatgcacaatcttttgttttcattttttatttttgagacggagtctcactctgtcaccaggctggagtgcagtggcgcaatcttggctcactgcaacctccccctcctgggttcaagtgattctcctgcctcagcctcctgagtacctgggattacagacgtgtgccaccaagcccggctaattttttttttatttttagtagagacggggtttcaccatgttggtcaggctggtctcgacctcctgacctcaggtgatccacccgcctcagcctcccaaagtgttgggattacgggtgtgagccaccgcgcccggcaagtcaggcacaatcttaacatatcatgtctttttttcatcttttaggtctttgataggcaaaaggtggctcatgcaccagcatcattggcatcacctgagagcttgttaggaaggcagaatctcaggctctaccctattcttgaaccaaaatctgctcttttttttttttctttttttaaggagacagggtcttgccctgttgcccaggctggaatgcagcggtgcaatcatagctcattgcaatctcgaattcctgggctcaagtgattgtcctgcctcagcctcccaattagctaggactataggcatgtgccatcacgcctggataattaaatttttttttttttgtagagacagggtttcagtctattgctcagactgatcttgagcttttggcctcaagagatcctcttgcctcagccctccaaagcactggaattataggtgtgagccaccacgtctggcccccaaatctgcattttaacaagacgaccaagtgattcatatgcacgtttaagtttgggaagctatgttctaggtgttacaaagataaggatcatttctgaggatgttatgtacaggatgacaaaagtacacttcttcttttttttttttgagacagagtttcgctcttgttgcccaggctggagtgcaatggcacaatctcagctcactgcaacctccccctcctgggttcaagcgattctcttgcctcagcctcctgagtagctgggattacaggtgcccaccaccacgcccagttaattttttgtagttttagtaaagacgaggttccactgtgctgatcaggctagtctcgaactcctgacctcaggtgatccacctgccttggcatctcaaagtgctgggattacaggcgtgaatcaccatgcccagcccaaaaatacacttctaagaaggtaacataattataaaacatacacctcaccgttaaatgtcaaatgaggcatcaactccttcatttcttcttctgtgagctcaatcccttcgcttgctagaaattgtctaagttctggacatcaatcacctctccttagaaagggtgagaaatgaattgcaaaaatattacagaattatttgcaaaggacaaagaacactatctgtgcttatatacattatcatccagaataggagaatcagaaacaaaaatctttaattctgattgaaagaatcagaaagtggctacaaagaagaaagtaaccaggggttaggaattgactggtgggttgttgcaaaatccacagcacattaaagtacatatagggacttagttttatgtaacaacattacagattaatgtaacaggggaaagatagaattccatcactctaacacaggaaccatttttagtttttgatattccattttggtcttggcaataaggctttacttttacaatgtggaaatctaatacatgtacacttctgtattttgcttttccaacctaaaatcattccttcataaacatgtttccaagttgccatataatctttacagctagcattttaacatggtatcccattaaactgacataccatggtttatgtagtaattcctgtatggttagatatttctaatctgtttcaattttctcacaattatgagaatgaaactatttttaaaggataaatttctaagactggggttagtggggaaaagggtatgaatagttctgtggctcttgatatctattactactttgaagaactgttttgctgaaaattttggagactagtatgggcactgatatataaatacagattagttattgttttttttttaagttttttttcttttattattatactttaagttttagggtacatgtgcacattgtgcaggttagttacatatgtatacatgtgccatgctggtgcttactcaacttcagcagcatctacaaaaatggaacatacgttatatgaaaaatctgaacacttatgaatagaaaatattcttctccaacattaatagcaaatattaagatattacttacaacatctttccattatagcttgcaactcacccttgatgtaactgacagcatccattaagtcattcaggtcaactgctgtctcacctgtaaggcaagaaaagtataccccagagtcagatgaactgatgttactgagaccctcaacattaatgctgtgtgaagttctgaagttatgaagatcataagaattcagtaatctttttctttttttttatttttttgaggtggagtctcactctgttgcgtaggctagagtgcagtggtatgatcccagctcattgcaacctctgcctcccgggttcaagtgattctcctgccttagcctcccgagtagctgggattataggtgcacgtcacgacgcccaactaattttttatatttttagtagagatggggtttcaccatgttggcaggctggtcttgaactcctgacctcaagtgatccacccaccttggcctcccaaagtgctgggattacaggtgtgagccaccatgcccagccagaatttactaatctttaaatttttccttagaattgtatggacttatcctcagagataagagtgttatcttagaaacaaagaaagctttaattgtgacaaatctatcaaattttttgtttttctttgtgttagagaccaccagagtggtctaaattaagaagtgattggttacagttaagcatagagagaggataaacgactctgaccctatgtacttttatttagtcaattaatcaacagctatttatgtatcaccttctaggtgccaggcacttggataggctttggggatacaaaagtaggcaaggtgacagagttctggctcttaaggagtgtacaatgtagtgagagagacagataataaacataaaaacaaaaaggataatttgatgtactgttaagatgctatcaaaaataaaatagggcaacataataaacagtaatagaggatgggattgatttagacagggaggtcaggaaaggcctctcagagcagggtctatttgggttgaaggctgaatgatgagaaatga

SEQ ID NO: 1243955 - DNA, 4001 bp, Homo sapiens
tgaagatgaataaattctgaagatctaatgaacagcatggtgactacaggtaataatactactgtaatgtatacctgaaatttgctaagagattagatcctaagtgttctcactacacacacacacacacacaaatagtaactaagtgaagtgatgaatatgttaattagattgattgtggtgattgtttaacaatgtatacatatatcaaattatcaagttgtacaccttaaataataaaaatggtgccatgtgacacagataatgagcattctggaaatatatggaaaaagttatttaaagatgctattttattatgaaatcagtagagcatttcaagtcataattgacaaagaataaaatgtatttgcctacttgtttacatcttagatacctgcctagtagtaagtagattttcccagggtttcttttggggagactcatccctgccctgtcacttcttgggaccaactgttgtttgtttgtttgtttttgtttttggatgtgtaaaaggctttatttgcaggggagcaggaatttaataaaagagaccaaatcccatgtcatcgtctgactctttggacacctcctcctcctcctcatcttctcctctgctgcagcgggggtggaaccagcagcaggagctgcacagcctggggcagcagagacagccacagccccaccggcaggtacactggcaaccttgccaataccctgggcaatgacatcttcaatgctttttccattcagctcactgataacctcgttgagccggtcgtcgtccgcctcgatgcctacgctgtccaggatcctcttgatgtctttggctctgagggaggtgctgcccccgagggcagccagcaggagggaggtgaccgagcgcactgggggcgggcgtctacggaggcggtggcaaggcctccatgcgtgcgatcttggtggagtcagggaggaaaagcccaggtggtcttggttaacagtaggaatgggggtgggatacaatgcagttctgctaccctagaccccggaaggaacttgtgaattaccgtcgcctttccacttggcatagtttgagaaacagggcttatggaccagaagctgggttggtagggcttccccctctcttgttatttgaaccaagccaaatgtccaacaatgatagactggattaagaaaatgtggcacatatacaccatggaatactatgcagccataaaaaatgatgagttcatgtcctttgtaggcacatggatgaagctggaaaccatcattctcagcaaactatcgcaaggacaaaaaaccgaacaccgcgtgttctcactcataggtgggaattgaacaatgagaacacacggacacaggaaggggaacatcacacactggggcctgttgtggggtggggggaggggggagggatagcattaggagatatacctgatgttaaatgacgagttgatggatgcagcacaccaacatggcacatgtatacgtatgtaactaacctgcacgttgtgcacgtgtaccctaaaacttaaagtataataataataaaaaaatgtagagtgtatttgatagttcactgacaagaaaactaggttgctgacttaggaataatggataattgaatactatccaaccatgaggaaaaaaagtctctgaatgtttggttagaatttgatccattttcccaggtctccacctcagagcccagaaagcagttgtttctaaacaactcaattacaagtcctcaaaatctgaaaacctgccacagagctgggaacaccagaatggctcaacaattcaggcatttgaaaggtgctgtgaaatcatccccatacctcaaaataatcatttctttaaaaaaataccttcaattctcatagataatagattttttaaaaaggacttagcatagaatcctacaaaatcacgatatttacctacttttaagccgtgctacctaccacttctgggcttcaatcagatcaggaatccaataaagggtttgttccatcacacaactgtgacctcattcactgctcaggctcaagcctagggagagaatgacccaggagctccttccaaccttacagcaagtgtgttttcagtgtggttcattcagcacccttggtgtatatgagggtatgatttataaaatctgaacattttgacactgttggaatttcagggaagggggagaatttttgtttcaagttctatattaatatattttcatgttaatgtcttcatcaggctgggtgtggtggctcatgcctgtgatcccagcactttggggggccgaggcgggcagatcacctgaggtcaggagtttgaaaccagcctggccaaatgatgaaaccctcatctctattaaaaatacaaaaattagcttggtgtggtggtgcacacctgtaatcccagctactcaggaggctgaggcaggagaattgcttgaacttgggaggcagaggttgcagtgaactgagatcacgcccctgcactctagcctgggcgacagagcgagacttttgtctcagaaaaaaagagaaagtcttcatcagtcagttgaaagttgttcaattaaaacattttactcagctgccttcactgaatggtgattaagaatcatttcattaattgtttaagcctagaaagagaggcaaaaaaactctcataggctgtctttagtattattgggaaaagtgctttcaaaagaacaattacagaaaagattgttttaagcagaaaccaaggtattcatgatctgacatgtctcatggcattataaatactctagcgcaggagttaggagtgtctttagtctatcatggctaagtacagatatctctggcacccaaggcttagctagttatatagttgggcccctaaaagtgcttcaggtttcacttgcagcagttctagaggtttcctattcctgctcagggggatttgttcattatgagcataatttgactttaacctaatctttttaagcttggtacactgcctcccattctggacaggaacacacaaggaaagaaagggaaggcttaatttataaattaattcaacaattatttactaagagcctactatattaaaggctacttacttagatttttttttttttttttttggtgaggtctcactatgttgcccagggttgagtgcagtagcaggatcatggttcactacagtctcgacctcccaggctcaagtgagtcttccacctcagcctccccagtagccaggactacaaggtgcaggccaccatgcccagctacttttttgtatttttggtagagatgaggtttcactatgttgcccagactggtctcgaaatcctggcccccagcaatctccttggcctcccaaagtgctgggattacaggcgtgagctaccatgcccagccttattgttgtgttacagcattctttatatattttggagactagatccttatcaattacataattcacagatatttttccctattctgtgggttgtctttttactttattgataatgttctttcagccacagaagttagtcctggaattttaaagctgaaagataactaatagatcatcaacctaattctgcccccaacccaccacatttttttttttgttatactttaagttctgggacacatgtgcagaacgtgcaggtttgttatataggtatacacgtgccatgcgggtttgctgcacccatcaacctgtaatctacatgaggtatttctcctaatgctatctctcccctagccccccacccccctaccccccaacaggccctggtgtgtgatgttcccctccctgtgtccatgcccatttcattttttttaaaaaagagacaagttctttctttgttagctgaggctgaagtgcggtggtgcagtgatggctcaatgcagcctccaattcctgggctcaagtgatccttccactcagcctcccgagtagctaggactacagtaggcaagtgccactacaactga

SEQ ID NO: 1243956 - DNA, 4001 bp, Homo sapiens
tgagtcagagaatcaacatacaagtactaagacctacagatttgaatattactttttctagaatgatactttggttcataaagcacatatatttcatttatttgagttcattcagcttctagctatgtgtattttttggctatgtatctagtttcctctttggtctcccatgcattggttcaaagttcttacttctgaaacttgccttctcttttcctgtttactacggagctctggggaaaacacagtcagattgtttaatctgtgaaccatacatctttgtttaattttgtctcacaggcactcctgatcaccaccagggggcaaaagcctaccagctggcttctctgcactacactctacataggactgtacagtacagggaccctcagtgtctgattcttgatggaacctccctgctaattatttcaaccacagggccccagggagagaacaaaggctcagcacagaggactcttgtggcgtttaaccgtacagcagccagaaagagctcatgacagccctgtcagtttaaaagaagcaatgagatccaagagtgtttgagtgacaaacaggagggggtgggttttaataactgcaaactcccaagtgtgtgtgttttctacagctttgatatgtacggtggtatttaccagctcatccactcaagctgagaaatagccttgtcaactctctttctttgtgtaaataatcagtgatatttgcattgtgcaatttttttcctttttaatcttgattttccattacattctttgcttatgttctgcagacaatttacccctgagaaaaccattcccttaaaatatcttttaatctacatttttacataggtctatgaaagaatgacatttagagacgaaggagaagaaagcttaacgagcaaatcctgtttaattaaaagactgtcttcacagcaggaggcaagtgagaggtcaatagcaggctggaccctcacaaccggcttcctcggactcccaggcgcgctcagcttctcttctcctcaggaataatgaataagtctttagacaggcaatagaggaagcatgagggtaccacaaacctttccagggtatcaaacggaaaatggttttctttccagaagtctcatcataaaacatagacggaagggggggaaaagttaagaaaaagcccccgagagccggggtgaagggagtaaactggtctagcccagttctgtctgcgcccagtgagagggtttgaaactccgcggagccctttcccaatagaaaacgtgtttgcttcaggattttcatctcagctgcttttttttaaggttggttaagctgtgcgccgccccacctcataaaatggttgtctctcaggagtgaagactccagcggccccccgccctgggacccctcaccgggctggctcccttcggccccttcccccaccccactccacagcacccagtgctggcaaaccgcgcgattccagcacgaaggaggaaacccaggagggtgcggcggcccgaggcgcacgcactcggccagcttccggcaactcaagggttacgaccaggcggcggcgcgcgccgaggggagaggcggtagctgacaggtggcgcctgcgcactgggagcgctcattgtgccccgcagctgcggaaccgcccgcccgccgcccgttcggagcgtcagtcggcgacagtctggtggtgggtgcggagtctgcggccgttcccgcggcctcctcctcctccccgttcccttcacccccaccccgcacccctttccccatcccggctccgtcaccctcccgtcccccacactcaggacaagaatgccctgcccggaacaacccagcagcgcctagatggctttggtcacggtccagcggtcacctacccccagcaccacctccagcccctgcgcctcggtgagtccttcctggcggccgctccgcttgcttctgtcactgcggctccgctttgcctcagcgggtcccgccgaacgccactgcgcacgcgccgcgccgcttcccaggccttggcactcggctgccgcgaacccccccacacccccatgttaaagactagcagcaggaactacaagacgttgatttttgcccccatcaccctgagcacctagctcctcacaatcctcgccctgaaatcccctgtggcatgcctccctatggcttgagcacttccttttggtaatgagtcattcttgcttttcaccctcccccttcttttaccctctgttgctctgctgcagggaggggaccgtgagcctcctgcgttgccccttacccacacccacatctcttacccacaccatttcatagacctgttcagtatttgcacactgcacacccttcttcgtactcgccagggtgtgtgccttcccctagtcacttgctggctttcttttgctctgtactgttcaggctttgaactgcccaaccgtagttattccttggtttctcccgcctgccccccaccccagagggtagcaatgatctctgtttcctggacctcttacctttcctttatgaggtcccgaagcatctggtgctgcttagtgatcagtgtcaaattatttccgtcttacagatatttatgccttacactcattgctcgtgatcattcttgttctaaggtcgtgtttgtatggctcgttacctcagatgcctatgccaataaagcatgctctcagaaggaaaatacccagtaaccagcctttccccgctgggcccgtctttgccttctctcctcgccccacccccattcgtttacactccattctcttaggctccatttttgaaaatatttatttttaaaaacaatatattgcaccagtggggcaaatgggctttaaaaaaccaacatccagatgttttagagagaaataaactgagtgaaaatgcgagcaactgggaaaaccaccttgaacttcctacagaactgtaattttaaaaacggtgttggtggatttggtagtatcaggttgcaaaaaaaggtatttaataaacactgtaccactttccactgtaaaaaaatcatcaggttacccttaatatttgtatgttaactgaggtgtgagctttgatatcctgaaatttgctggcttgtcatttcagtataatttcctgaatttcaaagttttgttgtgtatggttgtggtttcttcttttctgagctttaattgcattttgtgtgatgaaattgacaactatatcttaataagtgattttatttcaaaggttatatatcttgtgttgtttcagagagcagaactgggattcttggttcagggaggcagatttccagtgattgtaaggaagaatttgtaacagtggagtgcactgccttgcaaaatagtgagtgcacattgctggaaatattcaagcaaaggctggagaacattttgcctgggaggtggtataaagaattcctgcagtgggggacttctaagactatttctaatctaagattttgtgatttgagaatacttgtacttcaaagctggtaaaacattttagggtcatctgaagacaagtatcataggaataaatctttaatataatttattcttatgtgtagtactttatgctagtttttggaaagtcattaacataccatcaaaccttcttaattcactccactagtaaactctttggtttgtggttactaggcctgattttgaagaaatcgattgaaagttagtagagtcatgcaaataaactagaaatcagtactatagtaacatttattttccttgggcactgttgaaaatagcttatgctatgataatatatgtatatcaagttgtcatcatactaatttacttgaagtgaatgattagtatacagtaagaccgtgtacacttgatatgacttcattagccaaaacttgagttactttagaatcttgaggtatgttaatagtcacttttgacataggtaattaaattgatcatgtaataagctcagttgttgagcaaaatcactaatatt

SEQ ID NO: 1243957 - DNA, 4001 bp, Homo sapiens
gtgtcctcttttacaggaacgtctggcacactctgtaaggtctttgaaaagaggaaaaaaatcaccaatttcaatgtgacttgattttcaacaaagttgtataaattattccaattaaaggaaagttaattgctttgtaagagttaaccaaacattcctagttaatttttctgggatctaatgctgtatattagaagcaaagaggtaatcacagtgtattttctgcatttacaagataaaatgtgttggttcaaaatgtcatcacatcttcctgttactaacaaagtaatatgctaggaatatcattttagatgtacattaattcttgaattatacaatagtttatagaaacatgatttgagaccatagcataaggaaatcagacctttggaaatgctactgttttactactagaatcactttctgtatttgtggcaaaaagaaaaagcatttaatcttaattgaggaaattaaagattaattttatgaatagcaacaaaatagtttttgtatacatgctaatgtactttaaaaatctgactatatatatatatatatatatattttggagatgcagtttcactctgttgcccaggctggagtgcagtggcatgatctcggctcactgcaacctccgcctcctgggttaaagtgattatcttgccttggcctttcaagttgctaggattacacgcatgcaccaccaagcccagataatttttgtattattagtagagatggagtttcgctatgttggccagtccggtcttgaactcctgacctcaagtgatccacctcggtctcccagagtgctgggattacaagtgtgagccatcgacaatcaataggatattttaaaaactcatattagtcaactcacttgtgaatctataggactatttttaattgcctccccttttctatgaaacgttcttctttattgtagccttgtatttatttaaacacaaagttacttaaatgattaacctggaaattacattttcagcatgatagtaaagtgaccctaaaagctggtggttacagtttttagggtaactttagaaagcagtctttatttatctgtaatttataacagttcttcacaaataatttacctgtccatggaagtttcctgcaacttactcaaatgaatcagcttaataatcaacatgagtttgtccttttccttttgcaattttagttatctttttgaatacccacatcttttcttttatcataagaaaattgatttatctagcttattctccagcattaatatctgatttattcatgccaactctacctcatgaagctctttcacttcagttaagttccatttcctctctttgtcttcttttctgttttcctgaaatgcaaacagtgttagtaaatggcatccaaaaagagctgtggattaaactactgtctcatactttaatacagtaagcttttaatttttaaaaatttcacataatgagtaaatatcatgtgaaataaaattacacaaagtagttgtatcaacaaattcaaacaataacagacttttatatatagtcaaggaatgccaaccaactagaagcaggtcgccatgactcaactgttattttgaccccttttacagcatttctgtcaaaacctgatgcagaatacttcaaccaaaaagagaaataattaaatgatagactgtgatattgcatctcaattttcccaagaatgttgaatctcaaatcttcccataaatgtgataaacctatgtaggacaagaacctgagcaggtctgagttcctcttgagatgctgactcattcatttggactccaaaagttatcaccaaatggtatagaagaatattactagaccagtattaataacaaaaagaaagaaaatattaataaacatcacaaagtactccagaagttaaaaaagctccctcactcctgccctcacctcaccccacaattctattgaatgataaattctcaactgctgaacttttccaactgtattactgttatgactgttgctactgaccaaagctagatcattgctcagggagacaagaaaactcaccatagtaatcattactactatcattaaaaaaaaaatacagcagcagtaatgcaattgcatttttaacgtgattgtcatcctcattaatttttgagataacaaggtgaggtaaagtgaaacttttatggctacctaattcatgcaagaaaggtagatagagaatagaataataatatctcaaaaggcatttttttgggaagggagaattccagaggaatgtgacttatctggtttattcatttatattgaggtattaaaataaataattaccagatccccactttactgcaaatgactgtagattcacagattatcaaatcactgccatgccaaaaatcatttaagagtttgtatatatatgagctaggtgttgtgtaaagagtaaattatattcacacagtctgcctccaggacagttacagtctagagactctaatttgaaatagtatgtatctaatgctctagcgtattcacttttctttcttttcttttttttttttacagagtctcattctgtcgcccgggctggagtacagtggtgcaatctcggctcactgcaacctccgcctcctgggttcaagtgattctcctgcctcagcctcccgagtagctgggactacaggtgctcaccaccatgcctggctaatttttgtacatttagtagagacagggtttcaccatgttggccaggctggtcttgaactcctgacctcaagtgatccaccctcctcagcctccgaaagtgctgggattacaggtgtgaggcaccgcacccggccattcccttttctttttatcaacataacacatgttctagctaaataaaccaaaagtactgcctttggagagaagagtttccaacatttaaaaatagctgcctcaaagtctttttgactcacttaataaataataaataatagaaaataaatttatgtgatagctcccaactgtatattctcaacagcctcatttctttgcttatggtgtccatctcctgaaattgctgagaagcttccttccatttcttttaaaatctatttggtttggatgcactcagataaattcaactcaataagactttattaggtgctttctatatgcaggcaaaggttaggtcttaaaaggatgaataagacctgccttaaagagttcccagtttagtccgggcgcaggggctcacgcttgtaatcccagcactttgggaggccaaggcgggtggatcacctgaggtcaggagttcgagacgagcctagccaacatagtgaaaccctgtctctactaaaaatacaaaaaagtagctgggtgtgttggcaggtgcctgtgatcccagctacgcaggaggctgaggcaggaaaatggcttgaacccgggaggcggaggttgcagcgagccaagatcatgccattgcactccagcctcggcaatgagcgaaactccatctcaaaaaaaaaaaaaagagttcccagttcagtgagggaaagagatgcaattcaatctgcaaagtgcaagagtagaggtacacacaaaatgttaaggaacagagaaataagcagttaattttcccagggtagttagggacattttcacaaaggaagctggatagtaaaagactagtaagaaatttgaagcagaaggaacaaacactcaaggttcaaaaagtgtttgaagaattcatatagcagatatgctgatatggacaaagtgttagtggtctggatagaagatcaaatcagctacaacattcccttaagccaaagcccaatccagagcaaggccctaacttctcttcaattctgtgaaggctgagagaggtgagaaagctgcagaggaaaagctgaaaattatcagaagttgattcatggggtttaaggaaagaagacatctccataacttaaaagtgcaaggtgaagctgcaagtgctgatgtagaagt

SEQ ID NO: 1243958 - DNA, 4001 bp, Homo sapiens
actgtcccagcacagccacaacttgccaacccctgcagccccttcctggacatcaatagctgctgagacagggtctcaggactgggtcccaggggactgctacttgatatcttcccagactcccaagtgtcccactcccaccccacatccgaaagagcccccaggacaccctaactcccttttctctaccctgtgaaaacaagcttatgttctcaagctacacacctgatactcacattgcagctgggagttggcaggtgggtgactgagtacagaaaagacattgagattatacccaaagagatccagggaaaagagagggagggatggcagagcagagaagtgtgagggaggctgggaagtaaagagaggaacaataatcctagctctcctttaatgagcacataatacattcaaacaccttaccgctaatcctcataatagctgtaaggattgaggatacaaactcagaaaggttaagtgacatgcccaaggccacacagctgaaagcggcagagctaggattaagaccaaagatttgatgagctccaaagcccacccccttcccatggcctcacacagtctccccagggaagtaggaatttttcaaaacacagaactcttttatgagcgggaagtgggatccgcatgtaggcaagggacccaggtgacctcccgaaggttctgtcctacccagcgtggcttgaagtttcatctgacccctggcctcttttcagagcaaagctggcatgccatggaacagagggtctgatggaagagtttgcagcaaagattgggggagggggcaatggagtcctccagatgcaaaagggaaggaaggagggttcagggggctccaggcttcttccagcaagatgccggcaagccaggaaggcaggaatatgttctggctgggaaatcgttcagccaacagttcactgaccctctggctgtggggaagagttgggagacagactgtgaagagagtcaaggagccttggggaagttgtccccagagcccccaaacggaacccccttgcctcccatctcggatgcgcagtccctctgggggagggaggcaccctgccctgccttcccctcagcgactcgcagcacctaatctgcagctctctcctgagagctgacagtaaccaggctccctccaagcccagcccccgacgcaggcctcccacagatccaaatacccacctcactgccctcccggctacccatgaactttcttctccttgcccctttggggtctccaaactcctgacatccatagcaccacccgcatccagctctgcgtgggacccggagtctggctcccaagatcacctgtctagtaacccatcacacatcagagcaccagcaccttccctcccgcctcctccctgcccacagaagcccgcctccaagcccccagagcttccctacccactgccctagggtctgggatctccccagccgcaggccactcacctcttattcgccgagttccagtagacaggctccaggctgagcccagacaccagccccaaaacccccagcagcagcagggccccgactcgcacgccccccggcccagaatgggggggccccatgaccccgccaaggcctggggggcggggcaccaactcccccaaagtcgcccaccccccggggtggctgccttggctgcctggctcttcagcccggaccaccccggtagctgatgcccccagcgcccacgcggacctgcttcctgctgtgcccgcgcccccgcggcagagcgctcagccccaccagagcccttccaggggccgtctgcaggcgccctacgcgcccccggcccacgcgccagcaccccgggatctgtgagcccgcctaagtgggggactgggggagccggggaccgggcgggggcggcatggggcgccggaccagggagcgaggaagggggcgccgagccggagccccagcctcgctgggattgagggcagcgggctaagggaggaaaccagtcccgagcccaggaggggggagttaaaggagaggcggggaggggcagaggatggtggagggaaaaaccggagctggagctcgaggcggagcgggcggcagcatcccgcggcccacgccccccacacctccctcacctcgcgcacctcccgcccgccgccccgcctcagcccccggcgcgggctgtcacgccccctttgtctctccgagcctctggctccggctgagttctgcccggctcccctcctgccctccgatcgcccaagctgctggaatcttcctctctcgaatccagaaaggctctcgccctctccaccccgaggaacccacccctttcgctcccgcagcctcctcctccatcccaaaacaacaccgctgctcccggcaggtttggagagaataataataaccttgaaggcttggcgctttacaaagtgcggcggagctgatcgtcacgactacctgtgtgaagtgggaggggcagagctaacgatcccattgcagagatgaggaaactgaggctcagggaggccccgtgacttgcccaaggtcacacaggaagtctgggataaagctagaaaccaaacccaggctgcgcacctcccactcttggggtctcttttgtcactgctccatggaccaagtgctgttgttacctgggggttagtgaaaaacaagagtttaggggatacacttgggtctttcctagatggctggggggagaagcggggctgggagaagaaggggcgtacctacaaccccaaaccggcgctgcgcaggaagggctgtttccaattatcctgggggaagggaggagttgccttttcgggtgtaagagccctggctttcagcacctctgggcaggggtgacattcctctccctctcaagcctccccaggcctttcgtcccttccctttgattgtgaggtccaaaatcacatcccctgctggcagtatttcttcaaagtccccccattctcagtgtttgggaaggtgttggggggaggagggaggagtcactgcttcaaatgacacactcgtcccccacccccaaagacagagcagacaaatggagaaacaagcccagcgacagccgctgaatgaataagaccctcgccgcgccccgcatggaacagcaatatcaaaggtgacgactgtatttttcaacacctttactcttttatgtgtgtccttgactctggcaactgggttgtctgcctcctggggagccccggggagcggaggagagtgctcctgctcccctcagagctgagtaatggtccccatgctgctggagaatggcaaacagtgtggagtgtgggcgacaggcgccctgtcactgtctgcacagtctcacacggtcacacccaacagtctgacccagctcctgctcagccccgctcaccctgacccctgccgcccccaccttgggagtgagatttcaaacaggtttcccccttcagtttaccaagttgcctagcaaccaaccagtcaatggcatgaagccccacccccacccacttgacttcacaccaagctcagccgccccattggctcctgcctggtcccacctctcaacgcctggtttcaggaccaatatgccatacccactgctgctggaccagggagcccgccagtccccctgcctggtcccccacctcactcatatgcccccccaaaacagacacgaagactctagtatcataaaaacctttttatatcagctcacccacacctccctccgttcctccctgccctttctcgccctggtgatcatcagggatgctggagtctggcgcccccccacaccaccagagctgaagccgacattcaaggtggacgtggcgcgtggagagcaagggaaggcccagctcctctccttcgtccccactctctgtgggctcaggaaacacacgctgaccggaggcagtggccaggagaggcaggctagggtgcaggctgagggagagatggggagggtctatcagtgccttcagtga

SEQ ID NO: 1243959 - DNA, 4001 bp, Homo sapiens
acgatctcgactcactgcaacctccgcctcacaggttcaagcgattctcctgcctcaacctcccaagtagctgggattacaggcacccgccatcacacttggctaatttttgtatttttagtagagacggggtttcaaccatgttggccaggcagtctcgaactcttgacctcaggtgattagcccacctcggcctcccaaagtgctgagattacaggtgtgagccaccgcacccggccacattttacatttttaaataattgagaaaaaagtaccaatgctaacacagccaatagccaagacagcaccttgcataagtaggaactggataaatgttaactgaatgggatgtttaattttaagatgctgatatttcttggattagactgatacctccaactccctcaatgccacctgctgggtgctgaatgtagagagagaattggagctccaaggaccaataattaaatgtaaattattatggaaactttcacatgcatattctttttacttctaaaaagctactatcgcatttatgcttatctcattctcccaagaccccagtcaagggattgaagaaattatttatttattttatatatattttttgagacagagttttgctcttgttgcccaggctggagtacaacggcacgatctcagttcactgcaacctccgcctcctggtttcaagcgattctcctgcctcagcctcccgagtagttgggactacaggagtgcaccactacgcctggctaatttttttgtattcttagtagagatgggttttcaccatgttggccaggctggtctcgaactcctgacctcaggtgatccgcccgcgtctttctcccaaagtgctgggattacaggcgtgagccaccgcgcccggccgattgaagaaactgttatagaaagctgttcatggaacaagccaagctcatttctgcctcagggccactgcacttgcctttctctttgtccaaaacgctctcccctttgatatttttcaccttgttcctttatttcaatcaagtctccactaaaatgtcatcttctctgtcactctaaaaagtcccccatacatactctccaacttcccactttcactgttttattgctattcacaaatgttatacatttatcactagctgacttgtatctagttgtttactgttcatttccccaactacaattgaagcaaagactttgttcacttagtactgtgcctagcatagactaagccctcaataagtatttactgaactaatgaatgactctaacaaggtacacagaatatagctgatttgcccacagttacacaaaactagcgactcatggtaacaaacctcactgccgcttcccgctacaatgcaggagctcagaggacttcggagggaacttggcaaagaacggctgaaagcggcacggatagaagaggaagtgagcgaggggactggacagttagagcaccactcctacctagcgatacgattttacggactgaggctatagaggcagccccgaaatcgaggtgtgtgcgtgtgtgcgcgcttcggaagccttgggaaggcacgaggacgacagggtcttccattctttttcccgctccaggcctcaatttaccgatccgtaaagcgaaaggggccaatagcatataaggccccttccagatctgacgctttttaatttcctatcccacctggagcaacccttccgtgccgctgacccgcttcaacttacctctcgcctgctcagctaagagttcccaggccgctgccggagatcgtgcttccgccccacgccgaggaaacgcctgcgcccgccgccaggaaggaccccgcagacgccgctgtcgcctttctgcccgggaggacaaccctctgcctgaggaccagttccgaggtatgcccgccgcggactggcaaggcggagtagcgggtccccaagacgagtagcccaagacgtgggctgctccaaagagggtgagagctgaggatgaacgaatctgatcaggcgcctcgggaccaccctgaaaatggggggaggggccttcgggcagatcacgtggtcaggctgttagcgcagttgctaggcaaccacagctgcgggcgtggtctgcgcggggttgccctcctgttctggtttatcaggggatccccaaagaaagcaaggggaccaaggccgggactgctggggtgaaggtccgggaggctgagtaaggggacggaagggttagttctatgtattaaatgcctggggagggctgagaactggacacctgatttcggttactggccaccccagccccttcttggcgttcagattccctacgttggggtagggtggctatgggattggttggggacttcctgcttccttgcgctagggctgttggtgatgaccccgccacaaaatctagctcaactcactaggagtttgcagttcagagaggtcccacaagtaaatgccagagccacgactagaacccacgtagagaatctctctgcagtggctcacgcctgtaatcccagcactttgggaggccgaggcgcgcggattacttgaggtcaggatcgaaaattgcttgaaccccggaggcagaggttgcaatgagccaagatcgcgccactgcactccagcctgggcaacagagccagaaaaaaaaaaaaagaaaagaatatctctgtagaaatgatcagtcagcctcagatatgcagaaactacagaagtacagtgatagaactaaaggcattgcccaggtacctagggacctctgttccagccctgggctggacagagggatttggggatggggtcattgagctccttcctttgccccttctacttgatttcctgctcagtcattgcatctggtttgggtgaaagtctccttcctcattaaagacattcaatgaagaatgaaactttatccccgagctcaagggtaactaacaagagttctgcctttgtgtgaggtcccctgtcgaaacgacttgctgtagaacaatcctatgggggaagagtgaagaaactgaattctgagatcccaatgcctcctcgactgaagcaccaaaattaaaaatatttttagaggcaaagagcaaaattaagacagaactccaaattgaaagtcaggactctgtattctattttcagggacaagtcttgtgtaagtcctcactgtgaaattcaacttgtctttgtaaaatagaaaaccagatttttgtaacacctcccaatctgagtgacatgatgtccagagtgctttggggtcattttgtgttctggtgaataattcagaggtaccctctttcccctgatattgactgtccactgacatgtattccctttgccttcccaggcacaggccatggaaaggaatgacatcatcaacttcaaggctttggagaaagagctgcaggctgcactcactgctgatgagaagtacaaacgggagaatgctgccaagttacgggcagtggaacagagggtggcttcctatgaggagttcaggttggctcactgccatttttctcaggccctcctgttatggtggattatagtagttaactctgaaatcaaaccattctgggcttcagtcctggccccaccgtctactgtttgatcttatgcaatttccttaacttctctgagtctcaattatttatctgtagaacagtaactgttataattaaatgagttcttgcacataagactgagcaagtgtctgacacatgtgaggtgcttgaaagcagtcagctatcgctgttgttattattatggtcatattggtccgtaacaggtttatcctataccatgcaaagtctagctgcctcacacccacagacacagcattaagtccattgcctaatttctgtcctttgcctacaggggtattgtccttgcatcacatctgaagccactggagcggaaggataagatgggaggaaagagaactgtgccctggaactgtcacactattcagggaaggaccttcc

SEQ ID NO: 1243960 - DNA, 4001 bp, Homo sapiens
aaataataccaaaaagtggcaagaacagtacaaataactttcttttccccaaatatttgacagtatgctgctgacacaatgcctcttcacctcctaatactttagagcaagagttgacaaactctgacctgtggccaaatctggcccctccaactgtttttgcatggtcctccagctaagaatgcattttacatttttatttttttatttttttgagacggagtcccgctctgttgcctaggctggagtgcagtggcacgatctcgactcactgcaacctccgcctcacaggttcaagcgattctcctgcctcaacctcccaagtagctgggattacaggcacccgccatcacacttggctaatttttgtatttttagtagagacggggtttcaaccatgttggccaggcagtctcgaactcttgacctcaggtgattagcccacctcggcctcccaaagtgctgagattacaggtgtgagccaccgcacccggccacattttacatttttaaataattgagaaaaaagtaccaatgctaacacagccaatagccaagacagcaccttgcataagtaggaactggataaatgttaactgaatgggatgtttaattttaagatgctgatatttcttggattagactgatacctccaactccctcaatgccacctgctgggtgctgaatgtagagagagaattggagctccaaggaccaataattaaatgtaaattattatggaaactttcacatgcatattctttttacttctaaaaagctactatcgcatttatgcttatctcattctcccaagaccccagtcaagggattgaagaaattatttatttattttatatatattttttgagacagagttttgctcttgttgcccaggctggagtacaacggcacgatctcagttcactgcaacctccgcctcctggtttcaagcgattctcctgcctcagcctcccgagtagttgggactacaggagtgcaccactacgcctggctaatttttttgtattcttagtagagatgggttttcaccatgttggccaggctggtctcgaactcctgacctcaggtgatccgcccgcgtctttctcccaaagtgctgggattacaggcgtgagccaccgcgcccggccgattgaagaaactgttatagaaagctgttcatggaacaagccaagctcatttctgcctcagggccactgcacttgcctttctctttgtccaaaacgctctcccctttgatatttttcaccttgttcctttatttcaatcaagtctccactaaaatgtcatcttctctgtcactctaaaaagtcccccatacatactctccaacttcccactttcactgttttattgctattcacaaatgttatacatttatcactagctgacttgtatctagttgtttactgttcatttccccaactacaattgaagcaaagactttgttcacttagtactgtgcctagcatagactaagccctcaataagtatttactgaactaatgaatgactctaacaaggtacacagaatatagctgatttgcccacagttacacaaaactagcgactcatggtaacaaacctcactgccgcttcccgctacaatgcaggagctcagaggacttcggagggaacttggcaaagaacggctgaaagcggcacggatagaagaggaagtgagcgaggggactggacagttagagcaccactcctacctagcgatacgattttacggactgaggctatagaggcagccccgaaatcgaggtgtgtgcgtgtgtgcgcgcttcggaagccttgggaaggcacgaggacgacagggtcttccattctttttcccgctccaggcctcaatttaccgatccgtaaagcgaaaggggccaatagcatataaggccccttccagatctgacgctttttaatttcctatcccacctggagcaacccttccgtgccgctgacccgcttcaacttacctctcgcctgctcagctaagagttcccaggccgctgccggagatcgtgcttccgccccacgccgaggaaacgcctgcgcccgccgccaggaaggaccccgcagacgccgctgtcgcctttctgcccgggaggacaaccctctgcctgaggaccagttccgaggtatgcccgccgcggactggcaaggcggagtagcgggtccccaagacgagtagcccaagacgtgggctgctccaaagagggtgagagctgaggatgaacgaatctgatcaggcgcctcgggaccaccctgaaaatggggggaggggccttcgggcagatcacgtggtcaggctgttagcgcagttgctaggcaaccacagctgcgggcgtggtctgcgcggggttgccctcctgttctggtttatcaggggatccccaaagaaagcaaggggaccaaggccgggactgctggggtgaaggtccgggaggctgagtaaggggacggaagggttagttctatgtattaaatgcctggggagggctgagaactggacacctgatttcggttactggccaccccagccccttcttggcgttcagattccctacgttggggtagggtggctatgggattggttggggacttcctgcttccttgcgctagggctgttggtgatgaccccgccacaaaatctagctcaactcactaggagtttgcagttcagagaggtcccacaagtaaatgccagagccacgactagaacccacgtagagaatctctctgcagtggctcacgcctgtaatcccagcactttgggaggccgaggcgcgcggattacttgaggtcaggatcgaaaattgcttgaaccccggaggcagaggttgcaatgagccaagatcgcgccactgcactccagcctgggcaacagagccagaaaaaaaaaaaaagaaaagaatatctctgtagaaatgatcagtcagcctcagatatgcagaaactacagaagtacagtgatagaactaaaggcattgcccaggtacctagggacctctgttccagccctgggctggacagagggatttggggatggggtcattgagctccttcctttgccccttctacttgatttcctgctcagtcattgcatctggtttgggtgaaagtctccttcctcattaaagacattcaatgaagaatgaaactttatccccgagctcaagggtaactaacaagagttctgcctttgtgtgaggtcccctgtcgaaacgacttgctgtagaacaatcctatgggggaagagtgaagaaactgaattctgagatcccaatgcctcctcgactgaagcaccaaaattaaaaatatttttagaggcaaagagcaaaattaagacagaactccaaattgaaagtcaggactctgtattctattttcagggacaagtcttgtgtaagtcctcactgtgaaattcaacttgtctttgtaaaatagaaaaccagatttttgtaacacctcccaatctgagtgacatgatgtccagagtgctttggggtcattttgtgttctggtgaataattcagaggtaccctctttcccctgatattgactgtccactgacatgtattccctttgccttcccaggcacaggccatggaaaggaatgacatcatcaacttcaaggctttggagaaagagctgcaggctgcactcactgctgatgagaagtacaaacgggagaatgctgccaagttacgggcagtggaacagagggtggcttcctatgaggagttcaggttggctcactgccatttttctcaggccctcctgttatggtggattatagtagttaactctgaaatcaaaccattctgggcttcagtcctggccccaccgtctactgtttgatcttatgcaatttccttaacttctctgagtctcaattatttatctgtagaacagtaactgttataattaaatgagttcttgcacataagactgagcaagtgtctgacacatgtgag

SEQ ID NO: 1243961 - DNA, 4001 bp, Homo sapiens
tactcattgcaaggaaatcctcacttaagcttcagtgagccacaagcacttaaaacccatgaaccttcagctgatcgtccttagccagtccaatctgaaaagacaaaagggcaaagttttaaatgggggacagggagagttaaagcctccatttctaatggcaacaaccctgtcttcctgctactacactgcccaagagccaggggtgcgcacaatggttcaacagagggtcctcagttaagagctaccttttttgaacactcagtgccttccaaggttctgaattagtgtgagaatgagactcatcaggtatctgaaatctcttcaattatatcaagagctgatcatgtaacagtattttagtattaatactcaggaaattcatttttaaaaactcatgtccttacaaatacaggaacaacccagcatttggcttattttacaatgcatctatatgctattcaaatttgcatctgtgaagtagatccacagaaacagtaaaccaaaggtagacaagtcccttctgctttttcctataaaacagaaataagtctatgtactttaaaacccaactgaggttttgctcagccttacaaagccaacttttatgtccccagcagaagctaacagacaggatctgagatttgccagcagagaggcacaaatcaagtagtgactgaactcacctctacgaggaactggcatatgttcttgcgttggtcaccctgtagctgaattacttctccatattccggatgctcaattacagtaccattgcaggcaaacttctgcaagcacaaaggaaaacgaattaggcctagcaagagcatgaacgcatttatcaccccttccgctaacaatacatacaacacagctggcacccccttgtggacaaatccattatgactttcccaaaatctcactgaagacctactttcttaaacgccttcactagtttctttttatcgtaatcatcagcgatcccttggacagtagtaagggtcttcctgccgtttctctgttgaattcttatatggatataatcctcagtgccagcaggaagcaggtcatcacccttacttgcatcagcaaaggggtctgaaaaaaaaggttaagctcgttcagagctgtcaaagataggatgccactgccatcccctcggtccccaggtgttttgcgcgtgcagaaaacaacactgaaatcgtcagggcttgggccaggccgaatgtgtcctttgctggctctccccgagcaggtcagtccgggacggccagcttccccaggctcggggaacgcccgggcctcccgccctccctgggaagccgatcacatgtcgggggagtccgggctgccaggcggtgccccacccagctgatgcaacccgccggaacccgagctcccgaggcggggctaagcctcccacccccattggtgcacccgcttgccacttagggctggcaccgcctttccctccggatccgtgacaacgggtggtgacgtaacggacgtgacgcaatggtgacgggaggggcgggtgtggcccgaggaggcccaggagccattagtaaatgcgccactgagacgccgggcccgcccaagggctgacctaccgcctgctccttccggtcgcgctcagggtccgaccccggggcccaggccttgatcccgctgccctgcgaccctggtcaagtttcccctgcccgagcttacgaaggcccggagcgcttggcaacttcccggaacacgtctccgggcccggaaggccccgctgccccacccgggcccgcgacctttcccatagcttaccgaaagagtggaggttctggatagcggacatacgatacgattccttttcctcggtggaaacggcctgcggaaggcggcggcggcggtggcgggagaaggcgggcaggggggaacggaacgtcgggaagcgagggggctcaagggggaggctgctgaatcctcggcggcggctcagtgactggggcagaggggcggtgcctgtgtttagttatatagccgcgcctctgacgccagcgcgctgccctcacgtcctgaccccacccacagcgtcgtgccccaagcgcccaggcggcgccgcttccaattggtttggaggcggggacatgggatggcgcttgcgcaggaagtctgcggcaggagggcgtcctcttgactctaggagagctgggagggggagggaaagcttgatctgtctcggagcctgcgcagtgcgagtggacggtgtctgggtgccgagaataccggcccaggtttcgagcgcgcctacgcactgtgtcctttggtacgttccaccttcttgaccctgttgcatccctgtcttctcgaaaaggggagtttcatatggtaaatgaacactccttagagaggatttagatgatgagcctcccaaacacgagaaatccccgttgtgtcaaacccacctacctacccaccctactacccacggagtcacagcgggatttagggcggcactttgattaatcaacatacaataatataatcaaaacggtaaccgcataatttagattgccatttagatttattctaaagtgggttaatccgatctaaaattttcatttagattagattaatccatctaaggaaaaagtgtgcccagctcattggcatgagttcaaggtatagtaactggttctgggcccccccgagaataattctggcaccagagggcgtccttcatgtggcacagcttgtgtggagtagagccttcctagagtttagatgaaatatttccttcaaaacagtcaacctttcttgctttcagtttatttatttcaacactcagttgtaggggtaagtagagtggtgaaaagagaccaggaattttagactcaaaggcctccggggataggcaggtaagtaggatcaaggagtgcaaacagccaagtgtgatgtaatggggtggactgggggctggagtaagaactacgggctgcagtggccgctcacctccagcccattgtgctagatctttttcaagagtgccaggaaatccaggtgtttacataaaatctcttgatttttaaatattgccaataaattgattttttttttgagacagagtctcactttgtcgccgaggctggagtgcagtggcactgtgtcggctcactgtaacctccgtctcctgggttcaagcaattcttctgcctcagcctcccgagtagttggggttacaggcatccaccaccacgcccggctagttttttaaaaatatttttagtagagatgggttttcaccatgttggccaggctggtcttgaactcctgacctcaggtgatctgcctgcctcggccttccaaagtgctgggattacaggaataaattgaatttttgatacaacactgcaagccaaacaaaaatatgcatgcccatggactgctggtttatgtccctgacagtcagggtcactgcccttgtggagttgaaggccagcgggagagagagccactaaacaaataataagataatgaggctgggcgctgtggcttatgcctgtaatcccagcactttgggaggctgaggtgggcggatcacccgaggtcaggagttcgagaccagcctggccaatatggtgaaaccctgtctctactaaaaatacaaaaattagctgggcgtggtggcgtgtgcctgtagtcccagctactcgggaggccgaggcacaataattatttgaacccgggaagaggagactgcagtgagccaagatggcgccattgcactccagcctgggcgacagagcaagactatgtctcaaaaaaaaaaaaaaaaggataatgacagattgtgagaggtgccaaaaaggaggtaaacagggtgatgtgaaagggccaggctccttcagatggggtggtcagagaaggcctctggggaggcagcattctggctgacagagggtaggaaggagtccactgtggggcagggcatgtgcccaccagaaaactcagaaaaactc

SEQ ID NO: 1243962 - DNA, 4001 bp, Homo sapiens
aatgtcttctgggactgagaggtctcacccttgatacaaggtagaatggctcgctgctggatggcagagggcttctcaaaaccatacgcgtagatgccacggagaagggactccgagaggttcatgtcatcaaagctgtcaacaatctcattccagttactctaggggatgcaaagaaattaaagcttgagtcatggaaaaggtggagctgagctgtagtctccgagcaaacagaatctggtgcctactaacaaaagcctcagagcttacaaccctcctccctttagggaaaccagctgcttctagatgatctgggaaatcaatcaagaggccactctaactctatacggctgaaagttgtaatgggggaggacagaattccatttctccagtctcacctcgatgacgccttcgggctccatcccatcggggccattgtctctggatctgttggtttaaagcataagttttgtcccctgcccgaccgaagcactcagaaatcctgacagccgggctctgtcaggagtggcctgcatgatgccatcaatctgctgtcccagatccaactcccaccagctcccaaaaaatacccaaaggaggagtttctataaaactgaggcatttgccccatgcaggcagcggctcaggccaggccacccccgacataagggggtgaccctttctgaagacaggccggcaggcgtgccgccgcgctcacggtgcccagaggtggtgcttgccgccgggtccacgtgggcccgacccagccgcttaaagcccaagcgcgtgcacctcccaccgcagcaccagcgcgctggaagtcccgcccttcacctcccagatcggagggtaggacatccccttccccccacgtcatcccgcccgcgccctcccccactccctccagccgaagcccccccctcgcgttgcccggatgtgggaggccgcgggcggtggcggcctcgcgcacaatgagcccaagccgagctagcaaagggggagattgcacaacacttagaagcgaagcagactgggggaggggaacgcctcaggccaccatgtgctcgctccctcgaccacccggcggcgtctcccacccctccatgaacaatccacatcccgcccgcccccgtcgcgaagtagcgtcgccctcccatacctcaggccgctcacccccgaaggaaggtggacctgcccatccgcagtttgccaatagcccggcttgtgcggcaaaatggacccgcccgcccggcgccgggtgggctcctggtgcctcacgcggccgctcctcggggttaggctcagtcctggccgtcaagaaaaccagcacactgaacggccggtttcttctccccgacccgtgttttagccgcgacgaagtgactggatctaaggaccaggcacccccgcctctcgcgagtggtaccgtcagaatgctccggaaccccgcgcgccgtccctcccccggcacagggaggcaaccggacctgccggctctgggccacacatagtggcggccgcctccacctttctttcccacgccaggtcgcgaccccgtctcgccactcagcgccggggcttcgcgcatggcaccgcctcgggtcgaggcctcgtaacagacctcgcacgcctgaccctagccgggctgtccctaccctccgcctcgacctggtggccgcgtcggccgtgggtcttccccctcgcccctccaagtcggaccctccccccacccggttcggtttctcccgcaaccctggtgggcctctcagctacccccggcgggcccgtcggaagggggcggcaaaataagcagccacaatctcttgcaaatgcctttcttaccgggaatcctggctcgcagacatgatccttagaaactagggcggagtgcccgcctatcgacaacttatagagcgcccgactccgccccggccatcgcattggtttggccgccccggccccgcctgccggcgctcagcaactcggcatgacgttagttcctagtcgctccggcccgcaggcaccattggataactcgagtgcctatcaaggtgaaggcccgccccgcagcctcattggctggagggcccgcctttctcgccggtacggaagtgacatagaagagtcaggcctcgaggcctggcagccatcttggggccctgcactctcacacgtgcggaggcgacagtgccttggtcatgtggctccgtaggccctatcacgcaaggggggcgaggtctcagcctccagaggcttccgggctctgggggttatcacttccctttacttctgctcccggtctccactggactcaaatgttatttgttttcccctgtagcagagatggattcgacactgcctggacgtgtgccagggatgaaggaatcaacagcgatatcgtagggatgggaggattcccctggctggatggtggagggatggaagaaaactgtaaagggctttggggtactatcatgaatcctggttggtcccctccccagtcccttgtgtccagttccccagcttccctctcggatgcccttattcttgaggcttatctactttccctccttcctgctctctgctcccatctcggggatttgtttgggtgaagacaaggtgttggcagtgcctgagccagggatggaaagctgaaccctttagtctcaagagactggctggaaggtctgagctaagcatatccactaatttgaagccccttaaggaagaccaccacttacgtatcaacaaaggatcctttattgaccagagcaggaccgtggcatttatatatttttatatatatatatatatatatatatatatatatatatatatatatatatatatatatatatatatatatataaaagtttgaagatctggcaggcagtgatcctattgtccgcccaccacccccagcactgatttcctgctccctgcacggggaagggggaggatgactgctccacccaggccacagggccacactcccctgcaaacagaggaagaaaggggcttttctgtagccaccccctgcacatcagaaatcaacaagtattctctcaaagaaaaaaaaatacagaaattgaaacatttaaatatgaaaaaccaaagggaagtgagtgggaagaggcaagagaggaaaggaactggagtttcttgggaagggactcccatgtctcccttcccatttatgggcttggggtctggggtacgaggctcacacagtgagtttgcagtgacacagctccttgtagatctgccgacgaagtttgggcatgtcctgctgggtgaagctgaatggctgagacagggccagatgcttgcagtactgggtgttaacaaagcaagccatgagaaaccccccgtgtcaggacctgtgctacacatttcatatgagatgtgtctccatccttcagagaacatccccaaagggagccagggtcccacagcctggggttcaaaaacagcctgactctaaagctagtgttcttacttgatagaatgttttagatggagaaaatacactgagttggaggttagcagggagctctatgaaggccagaggcccaagactagagacccagtcccaatgtgggatggagaagtccagaagagaaccagtgaagccagtgttttggtgttctaaaacagattacttcctgctccacaactgactatgagccaaatgaggggatgcataacagcctcccgaccctttaacccaactgacttcagagctaggggaggtggccccatcatctgcttacctgcaacacaaaagcaccacagtcactgtcattattctgcctggccacattctagagaagagaaagaaagcaggcccttcacatggagactcccaggggtaggacttcaatttctgccttctaccactgtccccaccaacaccctatacccctccctcaggaaactcaccattttgaagtaacctttccagccctggtggaaatccagtcggtctttctttaccgcct

SEQ ID NO: 1243963 - DNA, 4001 bp, Homo sapiens
ctcactgtgaggctgcctgagatgctttttcaccacgcatcctcagcaacttcgcttcactttgtccaaactgttgtggcatcaagaactacaggatacggccaggtggggtggctcacacctgtaatgccatcactttgggaggctgaggctggtggatcactgaggtcaggagttcaagaccagcctgggcaacatggcaaaatcccctccctactaaaaatacaaaaattagtaggacgtggtggcccacacctataatcccagctactcgggaggctgaggcaaaggaatcgcttgagccccagaagtggaagttgcaataagctgagatcatgccactacactccagccttggtgacaagagcaggactgtcagaaggaaaaggaagaaagaaaaggaagagaactacaggataaaaaatgtccctgtcccaagcattaaacacaggccatttatcccagatgctggtcattcccatctatgtgcccaacccaacctcttctccaggctctccctcaacttcctcacatctttcaaacataccaagagacagctcctgattctgactctctggagtgctgcctacctagccaaatgtttgcagcatcaaccaccggttactcaaaacactccaactctcctccttctgtcactcacgttcaatccatcagccaatgctgtcagctccctggtactccatctccaaggcagcacaatcctctcttccctgaactgcagcaaaagctcccaactctcttgtttcctctcctgccttgcctcgcctcacctcaaatctacagacacccagaagaatctttaaaactgtaaatgtgatcgtgtcacatagctacttaaaaccttccactggcttcccactagatttctaaatgaaattcaaattattcgtcaccctacacgtctttgctagatctgccccgactagctctccaaaatcccaccacaggggacttctttcagttcctggaatgcagctggctaagggctgcaaggccctggcaccagctgttccttctgccccaactgctcttccctcttctcataacagtctccttcatccagaactctgctcaaatggcaccccctcctgcgaacccccttacctctctgctttactaattctctcctccttcccagtcccactctattcaattaccccgcttcaggttcttcaggttgcctgggcaacctgacagtatgctttccccccaaacgaaattcaaaacccgtaaaggcgcaaacccttccggtttaccgccaaaaccccagtacctagaaaagctaataggtagaaatcagttatctgctgaatgaaggacgctgaggtgcctcgaagcggctgcagcccccgacagacccagcgccgagctctgcacgggggacacacaccgaaagcgccgacacagccaggcgtgagggcgaggacgggggtgggggtgggggtcggacgtcactggcccccgagcctcgaccctgaccacgacctccggagcgcagggccggcccgggagtcaccagtctggccctcagcccccggctcgcccccgactcgcccccggctggcccccgcggcccgcgcccgctcaccgtaagcgtagatgccccgcagcaggtcctcccgcaggcccatggtgtcgaacgtgggggtcacatccacctcctcgctggtctcgaattccactttagtcatgtcttcctctttgagcagccgctttcgcgccgagcccgaggtcgccatcgtggccgtggtcgccatgattcagagtccgcggaagagcacagcgcgcgccgctgccgacctcgctgccgctgccgacctcgctgtgccgctgccgacctcgctgccgctgccgacctcgctgtgccgctgccgacctcgctgtgccgctgccgacctcgctgtgccgctgccgacctcgctgtgccgctgccgagaacagacgccttaagtatgcgaaagcgagagacgtgcgtgcgtacgtgcgtacgtgcgtacgcgcgacgcggccacgcctctgggggacggggcactcttcgtcacgtgaaagggaactgggcgtttgccgcagggaaaagtaaggtgtttctgctctcgcgccatatgcagttcccgcgggatctcgttgagggcggggcacccagttccttacgaaagggatggagggggtggtacttctaaagttggcggtgtttcgtaccggccgcgggatttcgcggactggggcgctgaggttctttgagcggcgtgtggacctgaattccctggaaacaggctggggccgcgaggggcctccgctccgggcggggtccccagatagccccgcctcgaataaaaatgacgagcacgggtcctctctcgggcccgcagtgggtggactgcgtcgcagacccgtagtggaggcgcccagctcgccggggagattcgagtggaaaccctcacggccgccggtggtgggccccggcgcggcgctgggctccggcgggtctgcgctggggagggccagggcccctgaagccggcgtccctcttaggggacgcgcctgggtgtgtcttcaccgtttgcctggtgagttggagacagggtctcgctccgtcgcccaggctggagtgcagtggtaggatcagggttcattgtagcctccgcctcagcctctggagtagctgggacctcaggcgcgcgccaccacgcccggctaattttttaaatttttttgtagagacggggttgggggaggcgggggttagggttgtcctggctggtcttgaactgcggggcctcaggtgatccgcctgccttggcctcccaaagtgctgggattacaggcatgagccactgtgcccggcaagcagctgttataaataaaatacatgctgagcctgcaatttgctcttaatgaaggccacttgtcagtagacggtgctgctaatgcgtgtcctgcagcaaagataacccagacgggatcattttttaattgcccagcagaactttaaccagttgtgcatcttaacctgctttttgtttgttcgtttgtttgttttgagacagtctggccctgtcgcccaggctggagtgccatggcgcgatctcggttcactgcagcctccacctcccgagcacaggcgatcctcccgcctcagcctccagagcacctgggaccacaggtgtccacgcgcagccactaaccgctttcttatctgacactttaagtgcttcttcgtacccagctcctctaacgccttttgaagcagctccatcatctttgaagggcagttcatgctgttgagaatcatgtttttaactttgggaaaattgtatttccacgagcgccagctctgtccttttttttttttttttttttttttttttttgacggagtcttgctcggttcgcccaggctggagtgcagtgtcgcgatctcagctcactgcaagttctgtcgcccaggttcacgccattctcctgcctcagcctcccaaatagctgggactacagacacgcgccaccacgcccagctaattttctgtatttttagtatagaccgggtttcaccatgttggccaggatggtcttgatctcttgacctcatgatccgcccacctcggcttcccaaagtgctaggattacaggcgtgagccaccgcgccccgctattttgtgtgtgtgtgtgtgtgtgtgtgtgtgtgtgtgtgacagagtctcgctctgttccccaggctggagtgcagtggcgcaatcttggctcactgcaacctctgcctcccggttcaagcgactccccttcctcaccctcctgagtagctaggattacaggcatgcaccaccacgcccggctaatttttgtatttttagtagagatggggtttccccgtgttggtcaggctggtcttgaactcctgacctcatgatctgcccgcttcagcctcctaaaatgctgggattacaggcatgagcccggtcctgtcctttcttatggtcacaa

SEQ ID NO: 1243964 - DNA, 4001 bp, Homo sapiens
caaacacctcgatcttggttcccaaagagaacccaggaacccagcctctcctggaaggccctcccacttttcccaggatgcatctgtcctgtcggcttttcaggccgggccagtacagtcagtagaaagtgggagaggtggggggtggtgaatgacaataaaatgaaagcaaaaggttggtagtagtgagtagtagaaaatcatactaggctagtagagttaaggacttcgaaaccgtggaactcccaaaccagttacaacaggaagacagtgacaaggtgaagaacgcctatcacggtgggaaactcatctgcctgaggcttttaggcgctgtccacccaggccgacagaaaagttgggctcctgtccaaacgccctgtttccccatttctccggcctcccagctcgaaggggtgccacttacacctggctgaccgccacacttcacaggagggtttttcaggaaagctcctggggcccttgaggttgggaagcgctaacatatgcctgcagcaggccctccggggtgattaggacccgagcctccggcttccactcctcaaaatctcaggccccctcggaacccccgcgaggactagctccccgcgctaggggctgccggctcctgccgaccatgtggccgttccgggcttccggtggccgggacctggggggaggggtccccgcgctgccatgcggccccggtccacgcttggccatgcggcctgcgaccccgagggcagcctcccgtggggggcacttccggtgccgcggccgccccctcctcagagactgcgccaggccggagccacgccgcctcccctccccccggccgtccgccaaccccccccatcatgccctctcaccgaatagccccctcccccacctcacgtggccgcgctgagccgggtcctcaacggcccaggtacccttgccccggtgggccgatctggcccctggccctcgccccggcgtggccgcctggcggcctctcccgcgtggctgcctcgcggctcgccgtcccccgccctgcgtcgctccaacgtcaccgggccaaccccaaccgtcaccccgcgcgccaaccggggcgcgcgcccgcgcctctcctcacctcgcgccgctctctggccgaacccgtgcggcggcggccgccgctcccctctgccccctccccgacccccgcgcagttccatcttctcccgggcccaagccaaggtaccgcgcacacgcgccctgcccgctctcacctcgcgcgaacgcactgactcgaccccgtccgctcgccgcgagcccaaccgctgcctccgagcccgctgccgccgccgccgccgcctctaccgccgccgccgctgctgcacacgggtcttagtacgcaggcgccgactccccactgaccaaccaagcagccctatgacagccgcgcaagcgtgctatctatctcctccgccctccacccccgcactgcgcaagcgcacacaccctacccatctccaccctccctcccaccgacccgtccaatgacgcgcatacgtgaccccgcccctcacaaaccctgagcgttttcaactaatctgcaacgcgcaggcgcacccggttttttaatctcttcaacctcatcttccctccccttgatagaccgctcgtcctaccgggcagtccttgcgcctgcgcaataaggagccctgcactccacaccctctaaaggaaacgcctgggtctcagaacgcatgcgtgttcggaatcctaaacaaccccttccacctcagacgccgtcagtacgccaggcgttgaaaagaccacgccgctagatcacttgtctcgtctagaacgcatgcgtctcaggatacgccccacctcggctttaactggacttaaacgactcacacgtttcagaaaacttgctctgtggggtgggcgccttgtcttggaatcagtccccccagttccacacatgcgcgggagatgtctttccgccccactcttctagcgcgctagtgtggtcgggttcccacccatctcggcttcacttctctaaatcgaatgcctatgctctgccatagagttcacccgagaagatagagcggtcctgcggcggacaccatcttctttaaaccctcagtccgtattggtctctatggcatccatagaggccattcggctctgaggtcctcagtaaagaaacttagatggtattactgtgttttccccaactgtgctctgcggttccccaaagtattgtctacgaggtcccttagaaaaaattgtctataaaaatgagtggtgggccgggcgcggtggctgacacctgtaatctcagcactctgggaggccgaggcgggcggatcacctgaggtcgggagttcgagaccagcctgaccaacatggagaaaccccgtctctactaaaaatacaaaattagccgggcgtggcggcgcatgcctgtaatcccagctactcgggaggctgggacaggagaatcgcttctcctgtggaggttgccgtgagccgagattgcgccattgcactccagcctgggtaacaagagcgaaactcaagtctcaaaaacataaataaataatacataaataaaataaaatagtggtaggccgggagcggtggctcacgcctgtaatcccagcactttgggaggccgaggcgggcggatcacaaggtcaggagttcaagaccagcctggccaacgtagtgaaacccccgtctctactgaaaatacaaaaaaattagccgggcgtggaggtgggcgcctgtaccagctactcgggaggcagaggcaggagaatcgcttgaacccaggaggcggaggttgcagttagccgacatcgcaccactgcactccagcctaggagacacagcgagagactctgtctcaaaaaaaaaaaaaaaaaaaaaaaagtggtatgttagattacattgacattgtcttaatcataggagaccatgaagctggagacgagctatcttcccaactttattttctttgccctccctctctccgccccccatttcgcttttcctgaaacttcgtagtcttcttccaattcctgggtttcttgcactaccttcatggctgccttgttggataacaagactgaaacaagcggccaggcgcagtggctcacacctgtaatcccagcactttgggaggccaaggcgagcagatcacttgggtcaggagttccagaccaacctggccaacatggtgaaaccccgtccccactaaaaatacaaaaattagccgtgccgtggtggtgcgtgcctgtaatcccagctactcgggaggctgaggcaggagaatcgcttgaacccagaatgtggagattgcagtgagccgagatctcgccaatgcactccagcctgcacgacagagcaatacgccatctcaaaaaaaaaaaaaaaaaaaaaaagacagaaacaagcgaccaaagatcttgggatctcatccttcttttgtgtctttaaggaattacttcagatagctctgccttaattttcttcccataaaatgagaataataatgatgcctgaacttcccaatttttcaggacgttgcaaaaattctgcaacatgggttgggcatagtggctcatacctgtagtcttagctttttgggaggtcaaggtgggaggctcccgtgaggctagcagttacagaccagactgggcaacataacaacggcccatctctacaaataaaaaattaaaaaaacaaaaacaagaaaagctcagctcagtggctggtgcctgtagacctagctactctttcttgggaggctgaggtggagggatagcttgagtctaggagttcgaggcttcattgagctataatccccaccactgcacttgagcctgggcaacagagaacctgtttcttaaaaaagaaaaaaaaaaagtcttgtgacacgatacatgtgaactgcaaacactagattgaattactacatttgtgtagcctgttatgctaacccccagctacttcccctcaat

SEQ ID NO: 1243965 - DNA, 4001 bp, Homo sapiens
ggagcaggtgtagttgtctgaatgggtatgaaggctgagcgctaaacaaaaacaatcagacagtaaaagcagagttaaaggaaagtcagcactgttggcagcttgctgctgggagcgccaaagatactggaggcatggggaaggcaagatgcggaggtgaaattctaaccttggcgtggccgtgcttgccagtcttcgaagtagacatctcgacgatcttacatggccggcctttgagcaccacaaagccattcttacgtaatgctgagcactgcattgggaaggtggctgaggcccctgcatctcctgtctcgaagtccaagtcatctgccattttaagaggcttcgattccaactagagccaagaagagaactgaagtgaataagcatggaggtcaacaggacctccaatctatcccatttctctccagaaacattttcccaactctttattccattacccacctaaaataaagtcaaagttcctgaacttaaaatactgactgggctcaaatatactcaagaactggtgtgtgtatgggagggtggaatagctggtttctcccccataaatcaaagctaaagtggtggcttgggaaaggaaggctctagggagctggaatgtcaaatctcagagatgagaaaaggcctacttcctgggagtggggaggactcaggtgttacttgccactgaaaccaaccacccctcttccccacatatagccagggctataattaggtgagcagctatgatccagcaaaagggcagggctaattggggggggggagggtggagaccggaggacaaggccccacccatctgttacactgcccccccccatccacacacaaaccagtcactgctacaggaaaccacaaggcctctttgggggattcccgcctcgccaacatgcacttgcaacaagccaagggggagaaagcaaagttgtttccgaaatgatccccctgccaaacacctcgatcttggttcccaaagagaacccaggaacccagcctctcctggaaggccctcccacttttcccaggatgcatctgtcctgtcggcttttcaggccgggccagtacagtcagtagaaagtgggagaggtggggggtggtgaatgacaataaaatgaaagcaaaaggttggtagtagtgagtagtagaaaatcatactaggctagtagagttaaggacttcgaaaccgtggaactcccaaaccagttacaacaggaagacagtgacaaggtgaagaacgcctatcacggtgggaaactcatctgcctgaggcttttaggcgctgtccacccaggccgacagaaaagttgggctcctgtccaaacgccctgtttccccatttctccggcctcccagctcgaaggggtgccacttacacctggctgaccgccacacttcacaggagggtttttcaggaaagctcctggggcccttgaggttgggaagcgctaacatatgcctgcagcaggccctccggggtgattaggacccgagcctccggcttccactcctcaaaatctcaggccccctcggaacccccgcgaggactagctccccgcgctaggggctgccggctcctgccgaccatgtggccgttccgggcttccggtggccgggacctggggggaggggtccccgcgctgccatgcggccccggtccacgcttggccatgcggcctgcgaccccgagggcagcctcccgtggggggcacttccggtgccgcggccgccccctcctcagagactgcgccaggccggagccacgccgcctcccctccccccggccgtccgccaaccccccccatcatgccctctcaccgaatagccccctcccccacctcacgtggccgcgctgagccgggtcctcaacggcccaggtacccttgccccggtgggccgatctggcccctggccctcgccccggcgtggccgcctggcggcctctcccgcgtggctgcctcgcggctcgccgtcccccgccctgcgtcgctccaacgtcaccgggccaaccccaaccgtcaccccgcgcgccaaccggggcgcgcgcccgcgcctctcctcacctcgcgccgctctctggccgaacccgtgcggcggcggccgccgctcccctctgccccctccccgacccccgcgcagttccatcttctcccgggcccaagccaaggtaccgcgcacacgcgccctgcccgctctcacctcgcgcgaacgcactgactcgaccccgtccgctcgccgcgagcccaaccgctgcctccgagcccgctgccgccgccgccgccgcctctaccgccgccgccgctgctgcacacgggtcttagtacgcaggcgccgactccccactgaccaaccaagcagccctatgacagccgcgcaagcgtgctatctatctcctccgccctccacccccgcactgcgcaagcgcacacaccctacccatctccaccctccctcccaccgacccgtccaatgacgcgcatacgtgaccccgcccctcacaaaccctgagcgttttcaactaatctgcaacgcgcaggcgcacccggttttttaatctcttcaacctcatcttccctccccttgatagaccgctcgtcctaccgggcagtccttgcgcctgcgcaataaggagccctgcactccacaccctctaaaggaaacgcctgggtctcagaacgcatgcgtgttcggaatcctaaacaaccccttccacctcagacgccgtcagtacgccaggcgttgaaaagaccacgccgctagatcacttgtctcgtctagaacgcatgcgtctcaggatacgccccacctcggctttaactggacttaaacgactcacacgtttcagaaaacttgctctgtggggtgggcgccttgtcttggaatcagtccccccagttccacacatgcgcgggagatgtctttccgccccactcttctagcgcgctagtgtggtcgggttcccacccatctcggcttcacttctctaaatcgaatgcctatgctctgccatagagttcacccgagaagatagagcggtcctgcggcggacaccatcttctttaaaccctcagtccgtattggtctctatggcatccatagaggccattcggctctgaggtcctcagtaaagaaacttagatggtattactgtgttttccccaactgtgctctgcggttccccaaagtattgtctacgaggtcccttagaaaaaattgtctataaaaatgagtggtgggccgggcgcggtggctgacacctgtaatctcagcactctgggaggccgaggcgggcggatcacctgaggtcgggagttcgagaccagcctgaccaacatggagaaaccccgtctctactaaaaatacaaaattagccgggcgtggcggcgcatgcctgtaatcccagctactcgggaggctgggacaggagaatcgcttctcctgtggaggttgccgtgagccgagattgcgccattgcactccagcctgggtaacaagagcgaaactcaagtctcaaaaacataaataaataatacataaataaaataaaatagtggtaggccgggagcggtggctcacgcctgtaatcccagcactttgggaggccgaggcgggcggatcacaaggtcaggagttcaagaccagcctggccaacgtagtgaaacccccgtctctactgaaaatacaaaaaaattagccgggcgtggaggtgggcgcctgtaccagctactcgggaggcagaggcaggagaatcgcttgaacccaggaggcggaggttgcagttagccgacatcgcaccactgcactccagcctaggagacacagcgagagactctgtctcaaaaaaaaaaaaaaaaaaaaaaaagtggtatgttagattacattgacattgtcttaatcataggagaccatgaagctggagacgagctatcttcccaactttattttctttgccctccctctctccgccccccatttcgcttttc

SEQ ID NO: 1243966 - DNA, 4001 bp, Homo sapiens
gcaagaatgttaaaacccatgaaagcatggaggctcaaggaacccaaggagagtgggatggggcaggtaggggcagtttgatcctgcgtcagagttccaaagggaaagctagaactggggaacgaagcagcaaggtgacctgaaagctcagaattgacgcaggagtccctccaggggaaggcgtagaattggagaaaccctgggcaacgtgatggaagcaaccacttaacaacggctcaagggaagaaagaaaaagtgaaaaccaagaataaggaaggagcaactgaatagctagagcataaaggcctatgaattgaagagattggcacaaagctggagaaacggagggactgccagagaatgatgcggggacagaagggtaaccacagaagaggctgaagactggggagcaggtgtagttgtctgaatgggtatgaaggctgagcgctaaacaaaaacaatcagacagtaaaagcagagttaaaggaaagtcagcactgttggcagcttgctgctgggagcgccaaagatactggaggcatggggaaggcaagatgcggaggtgaaattctaaccttggcgtggccgtgcttgccagtcttcgaagtagacatctcgacgatcttacatggccggcctttgagcaccacaaagccattcttacgtaatgctgagcactgcattgggaaggtggctgaggcccctgcatctcctgtctcgaagtccaagtcatctgccattttaagaggcttcgattccaactagagccaagaagagaactgaagtgaataagcatggaggtcaacaggacctccaatctatcccatttctctccagaaacattttcccaactctttattccattacccacctaaaataaagtcaaagttcctgaacttaaaatactgactgggctcaaatatactcaagaactggtgtgtgtatgggagggtggaatagctggtttctcccccataaatcaaagctaaagtggtggcttgggaaaggaaggctctagggagctggaatgtcaaatctcagagatgagaaaaggcctacttcctgggagtggggaggactcaggtgttacttgccactgaaaccaaccacccctcttccccacatatagccagggctataattaggtgagcagctatgatccagcaaaagggcagggctaattggggggggggagggtggagaccggaggacaaggccccacccatctgttacactgcccccccccatccacacacaaaccagtcactgctacaggaaaccacaaggcctctttgggggattcccgcctcgccaacatgcacttgcaacaagccaagggggagaaagcaaagttgtttccgaaatgatccccctgccaaacacctcgatcttggttcccaaagagaacccaggaacccagcctctcctggaaggccctcccacttttcccaggatgcatctgtcctgtcggcttttcaggccgggccagtacagtcagtagaaagtgggagaggtggggggtggtgaatgacaataaaatgaaagcaaaaggttggtagtagtgagtagtagaaaatcatactaggctagtagagttaaggacttcgaaaccgtggaactcccaaaccagttacaacaggaagacagtgacaaggtgaagaacgcctatcacggtgggaaactcatctgcctgaggcttttaggcgctgtccacccaggccgacagaaaagttgggctcctgtccaaacgccctgtttccccatttctccggcctcccagctcgaaggggtgccacttacacctggctgaccgccacacttcacaggagggtttttcaggaaagctcctggggcccttgaggttgggaagcgctaacatatgcctgcagcaggccctccggggtgattaggacccgagcctccggcttccactcctcaaaatctcaggccccctcggaacccccgcgaggactagctccccgcgctaggggctgccggctcctgccgaccatgtggccgttccgggcttccggtggccgggacctggggggaggggtccccgcgctgccatgcggccccggtccacgcttggccatgcggcctgcgaccccgagggcagcctcccgtggggggcacttccggtgccgcggccgccccctcctcagagactgcgccaggccggagccacgccgcctcccctccccccggccgtccgccaaccccccccatcatgccctctcaccgaatagccccctcccccacctcacgtggccgcgctgagccgggtcctcaacggcccaggtacccttgccccggtgggccgatctggcccctggccctcgccccggcgtggccgcctggcggcctctcccgcgtggctgcctcgcggctcgccgtcccccgccctgcgtcgctccaacgtcaccgggccaaccccaaccgtcaccccgcgcgccaaccggggcgcgcgcccgcgcctctcctcacctcgcgccgctctctggccgaacccgtgcggcggcggccgccgctcccctctgccccctccccgacccccgcgcagttccatcttctcccgggcccaagccaaggtaccgcgcacacgcgccctgcccgctctcacctcgcgcgaacgcactgactcgaccccgtccgctcgccgcgagcccaaccgctgcctccgagcccgctgccgccgccgccgccgcctctaccgccgccgccgctgctgcacacgggtcttagtacgcaggcgccgactccccactgaccaaccaagcagccctatgacagccgcgcaagcgtgctatctatctcctccgccctccacccccgcactgcgcaagcgcacacaccctacccatctccaccctccctcccaccgacccgtccaatgacgcgcatacgtgaccccgcccctcacaaaccctgagcgttttcaactaatctgcaacgcgcaggcgcacccggttttttaatctcttcaacctcatcttccctccccttgatagaccgctcgtcctaccgggcagtccttgcgcctgcgcaataaggagccctgcactccacaccctctaaaggaaacgcctgggtctcagaacgcatgcgtgttcggaatcctaaacaaccccttccacctcagacgccgtcagtacgccaggcgttgaaaagaccacgccgctagatcacttgtctcgtctagaacgcatgcgtctcaggatacgccccacctcggctttaactggacttaaacgactcacacgtttcagaaaacttgctctgtggggtgggcgccttgtcttggaatcagtccccccagttccacacatgcgcgggagatgtctttccgccccactcttctagcgcgctagtgtggtcgggttcccacccatctcggcttcacttctctaaatcgaatgcctatgctctgccatagagttcacccgagaagatagagcggtcctgcggcggacaccatcttctttaaaccctcagtccgtattggtctctatggcatccatagaggccattcggctctgaggtcctcagtaaagaaacttagatggtattactgtgttttccccaactgtgctctgcggttccccaaagtattgtctacgaggtcccttagaaaaaattgtctataaaaatgagtggtgggccgggcgcggtggctgacacctgtaatctcagcactctgggaggccgaggcgggcggatcacctgaggtcgggagttcgagaccagcctgaccaacatggagaaaccccgtctctactaaaaatacaaaattagccgggcgtggcggcgcatgcctgtaatcccagctactcgggaggctgggacaggagaatcgcttctcctgtggaggttgccgtgagccgagattgcgccattgcactccagcctgggtaacaagagcgaaactcaagtctcaaaaacataaataaataatacataaataaaataaaatagtggtaggccgggagcggtggctcacg

SEQ ID NO: 1243967 - DNA, 4001 bp, Homo sapiens
aacattttcccaactctttattccattacccacctaaaataaagtcaaagttcctgaacttaaaatactgactgggctcaaatatactcaagaactggtgtgtgtatgggagggtggaatagctggtttctcccccataaatcaaagctaaagtggtggcttgggaaaggaaggctctagggagctggaatgtcaaatctcagagatgagaaaaggcctacttcctgggagtggggaggactcaggtgttacttgccactgaaaccaaccacccctcttccccacatatagccagggctataattaggtgagcagctatgatccagcaaaagggcagggctaattggggggggggagggtggagaccggaggacaaggccccacccatctgttacactgcccccccccatccacacacaaaccagtcactgctacaggaaaccacaaggcctctttgggggattcccgcctcgccaacatgcacttgcaacaagccaagggggagaaagcaaagttgtttccgaaatgatccccctgccaaacacctcgatcttggttcccaaagagaacccaggaacccagcctctcctggaaggccctcccacttttcccaggatgcatctgtcctgtcggcttttcaggccgggccagtacagtcagtagaaagtgggagaggtggggggtggtgaatgacaataaaatgaaagcaaaaggttggtagtagtgagtagtagaaaatcatactaggctagtagagttaaggacttcgaaaccgtggaactcccaaaccagttacaacaggaagacagtgacaaggtgaagaacgcctatcacggtgggaaactcatctgcctgaggcttttaggcgctgtccacccaggccgacagaaaagttgggctcctgtccaaacgccctgtttccccatttctccggcctcccagctcgaaggggtgccacttacacctggctgaccgccacacttcacaggagggtttttcaggaaagctcctggggcccttgaggttgggaagcgctaacatatgcctgcagcaggccctccggggtgattaggacccgagcctccggcttccactcctcaaaatctcaggccccctcggaacccccgcgaggactagctccccgcgctaggggctgccggctcctgccgaccatgtggccgttccgggcttccggtggccgggacctggggggaggggtccccgcgctgccatgcggccccggtccacgcttggccatgcggcctgcgaccccgagggcagcctcccgtggggggcacttccggtgccgcggccgccccctcctcagagactgcgccaggccggagccacgccgcctcccctccccccggccgtccgccaaccccccccatcatgccctctcaccgaatagccccctcccccacctcacgtggccgcgctgagccgggtcctcaacggcccaggtacccttgccccggtgggccgatctggcccctggccctcgccccggcgtggccgcctggcggcctctcccgcgtggctgcctcgcggctcgccgtcccccgccctgcgtcgctccaacgtcaccgggccaaccccaaccgtcaccccgcgcgccaaccggggcgcgcgcccgcgcctctcctcacctcgcgccgctctctggccgaacccgtgcggcggcggccgccgctcccctctgccccctccccgacccccgcgcagttccatcttctcccgggcccaagccaaggtaccgcgcacacgcgccctgcccgctctcacctcgcgcgaacgcactgactcgaccccgtccgctcgccgcgagcccaaccgctgcctccgagcccgctgccgccgccgccgccgcctctaccgccgccgccgctgctgcacacgggtcttagtacgcaggcgccgactccccactgaccaaccaagcagccctatgacagccgcgcaagcgtgctatctatctcctccgccctccacccccgcactgcgcaagcgcacacaccctacccatctccaccctccctcccaccgacccgtccaatgacgcgcatacgtgaccccgcccctcacaaaccctgagcgttttcaactaatctgcaacgcgcaggcgcacccggttttttaatctcttcaacctcatcttccctccccttgatagaccgctcgtcctaccgggcagtccttgcgcctgcgcaataaggagccctgcactccacaccctctaaaggaaacgcctgggtctcagaacgcatgcgtgttcggaatcctaaacaaccccttccacctcagacgccgtcagtacgccaggcgttgaaaagaccacgccgctagatcacttgtctcgtctagaacgcatgcgtctcaggatacgccccacctcggctttaactggacttaaacgactcacacgtttcagaaaacttgctctgtggggtgggcgccttgtcttggaatcagtccccccagttccacacatgcgcgggagatgtctttccgccccactcttctagcgcgctagtgtggtcgggttcccacccatctcggcttcacttctctaaatcgaatgcctatgctctgccatagagttcacccgagaagatagagcggtcctgcggcggacaccatcttctttaaaccctcagtccgtattggtctctatggcatccatagaggccattcggctctgaggtcctcagtaaagaaacttagatggtattactgtgttttccccaactgtgctctgcggttccccaaagtattgtctacgaggtcccttagaaaaaattgtctataaaaatgagtggtgggccgggcgcggtggctgacacctgtaatctcagcactctgggaggccgaggcgggcggatcacctgaggtcgggagttcgagaccagcctgaccaacatggagaaaccccgtctctactaaaaatacaaaattagccgggcgtggcggcgcatgcctgtaatcccagctactcgggaggctgggacaggagaatcgcttctcctgtggaggttgccgtgagccgagattgcgccattgcactccagcctgggtaacaagagcgaaactcaagtctcaaaaacataaataaataatacataaataaaataaaatagtggtaggccgggagcggtggctcacgcctgtaatcccagcactttgggaggccgaggcgggcggatcacaaggtcaggagttcaagaccagcctggccaacgtagtgaaacccccgtctctactgaaaatacaaaaaaattagccgggcgtggaggtgggcgcctgtaccagctactcgggaggcagaggcaggagaatcgcttgaacccaggaggcggaggttgcagttagccgacatcgcaccactgcactccagcctaggagacacagcgagagactctgtctcaaaaaaaaaaaaaaaaaaaaaaaagtggtatgttagattacattgacattgtcttaatcataggagaccatgaagctggagacgagctatcttcccaactttattttctttgccctccctctctccgccccccatttcgcttttcctgaaacttcgtagtcttcttccaattcctgggtttcttgcactaccttcatggctgccttgttggataacaagactgaaacaagcggccaggcgcagtggctcacacctgtaatcccagcactttgggaggccaaggcgagcagatcacttgggtcaggagttccagaccaacctggccaacatggtgaaaccccgtccccactaaaaatacaaaaattagccgtgccgtggtggtgcgtgcctgtaatcccagctactcgggaggctgaggcaggagaatcgcttgaacccagaatgtggagattgcagtgagccgagatctcgccaatgcactccagcctgcacgacagagcaatacgccatctcaaaaaaaaaaaaaaaaaaaaaaagacagaaacaagcgaccaaagatcttgggatctcatccttc

SEQ ID NO: 1243968 - DNA, 4001 bp, Homo sapiens
aggcacccagtgtgcaaaatgtaaggaatcatgcaagtgaagggctggcaccctaagtgcctcaccctagtctcagccctgagaagggagactggtctaacacttcactccttccggtccatgccaccaagcccacacaatttggctgcaacacaatcctgaccttccggttgatagacataaatgacagggtaatctggacagtgggtatgtgtgtggctgccaatgtgccaatggcgtctgcggtaaacatattaactgtaatcaccactgctagactctccagtttactgccacaaatctctgtccccgcaacgcaagaaactaagtggatggtaacacttaagaggtggtatccatattaaaatctgttctcctgagtcacagcttttaatgctctgtgctgctgctgactgggctggtataaaaagaattccaggccaggtgcggtggctcatgcctgtaatcccagcactctgggaggccgagacaggaggatcgcagaagtttgagaccagcctgggcaacatagcaaaaccccgtcgctacaaaacatacaaaaaaaattagccaggtgtgatggggcacacgtgtggtcccagctatttgggaggctgaggtgaggggatcacctgagcccagaaggcaaaggttgcagtgagccaagatcacgccactgacaaaaaaaaaaaaaaaaaaaaaagtagctgcccaccccagacttggaaaaatggtaaagccggttaaaatcccagagacttcccaccagcctctgacactgcaaagaatatactcaccacttaagcccccaacattagaccagtgcattcgtgtcaggaatatgttgtccaggcgagcaacctttaacctaagaatgaaaaaacatttaaacaggataacatgaacagaacaaggaccacttttgctataaaaaacaactggcctctcatttcggctttcaagccccgtaatcaactccccctccgaaagcaagagactgactcacttgtgctcctgcatgagtctctgaacgccttctccacagttgaagagatacctacaagacaaacattacacaagacattcagaaggttttattctgtaaactctctgacaccaattagatgttttattgtagactctggaaaaaaaaaaaagaaaaaaaaattaaaagtccacgttggactaccgagccacatttatgctggtgggttttgagccctccttagcagaggtggagaggagtgggggcctgtgtgtgtgggtgctaggacaaaatgagtcctttctccaccaccggctacacaccagatctgtccaccccacacgctaacaacgacacactggccttggggtgcacggaagagggtggagctccgaaagtgctgacagccaggccggggcccaagggttgggaaaaggacgctcagacccaggcctgaagttcttcacagatccgcagaaatcacatggatgcaaagaatctcggatttcccacccaccataactccacgaacccccgcaacagtgaaccacatgtgtgaagcagggaagccgaagccctgggaggtgccccgatgctcagaggctgcgccgcactgagggcccagcgggacggggcgtggctcgttgactgaccggttgaactcggagaagacgtagagcgcggcgcccgagtcccggctacccgctgccaccacctgcaggtacacggtgtttgggccgccggagcaccccgacggtccgcgcttctctcgcgtgcgcaggtgccgcagcgggtccttgcgcggccgctcgcggcgggcgggtgcctgcgatatggtgcgtccctgcgacatggtgcgtccggccgcggaccgcagcagcgagcaaagcgcccacatgcgcccgtctccaccaaaactgagaaagccgccggtcacctacgcccgcgtttcccgtgcaccacctagccgctccgcatggcggatccagccaatcagcgcgccgtgcaccgagcttcccgcctacgcgaggctgctcatccaatagaaaggagctttaccgctcgggacttgtcaattgacagtggccatagagtagaggaatactagagcgtctcaagcggccccgcccctagttctgttccggtttgccggccgcaattttttccggaagctgtttttctcctggggcgggacttccggaagcacagtgccaggaaaagccttcctggggaaggcgggacctaggagtttggagtttcgctaaaacgctcctgttctcaccagataagagctgtgtcctccgggcacgtcagtccctcagagcttgagttagaggtggttgtagtggttgtgaggattaaatgtgaggaaatcaattgtattgagcattagcataagcgctttgctaattttatttccattgtaattcgtatgcatacatgttagaacttgatcatttttacgtggtgtcccgagcttgtagtcccagctacttgggaggctgaggcaggagaatcgcttaagcgcggaggcggaggttgcggtgagtcgaaatcgcgccactgcactccagcctgggtgacacctcgagaccctgtctcaaaacaaaacaaaacaaaacaaaaattgtagtgttttttggaaagaaaagcaagaatagaggacaagctctaaagcaagagtcttggctcatttgttagctgcgtgatcttgacctctcagagcctcagctttcttatgtgtaaaatgtaataacagcaataacagtatctcctacttcagaatatagaattcagtcacctgataatatatcaatagacctttgagtggcactgtcacagaagaggcacccagtaaatgatagaaaattaatacaaaatgtttcaactcctagacaatatagctgaccagggacatcacagaggtagatgtcccaataccagctttttgaaaaaaacacccagtcccctcttatgtagctaatgaggatttctcactgaaagggatatcagttaaagccgctagaaatacagggagctcccttaaaagaggaagataatttacctggaagctccactcaaatatgattttttaaagataatttacctggaagctccactgacatatgatttttttaaataaatactgaaagatgtcacttttattcaggaagtaagggagattcaagtcatgtagattcctactcgaaaatcttgacacctgactttccaggatcacattttcatatggagaccagtttcctcttggtttcttcagttaagtcaaaactacacgttcctctttccccatatatttttgctcattagtgtatttcttgagctgttttcattcaaatatgaaattttttatggaagattatcacccacggtgtgaaaacgttttgtacttgaaataaccatcccagtgagggtcaggaaaacacttcagatctactttacacagttagagggcgttacaaactgaaaagattatcataccaccatctccataagtatttgaaataaaaatgatagtttttaaaagttgcttaaagcctgggcaccgtggcacatatctgtaatcccagcactttgggaggccaaggcgggagaatagcttcaggctagtagttcaaaacctgctctgtggccaggcatggtggcttatgcctgtaatcccagcactttgggaggccgaggcaggtggatcacctgaggtcaggagttcgagaccagcctggccaacatgatgaaaccccgtctctactaaaaacacaaaaattagccgggagtggttgcatgggcctgtaatcccagctactggggaggttgaggcaggagaatcacttgaaccccagagacagaggttgcagtgagccaagatcacaccattgcactccagcctgggtgacagagggagattccatctcaaaaacaaacaaacaaaccagctctggcaacaaagcgagacctcatctctaccaaaaaatactaaaaaatttaaaaataagtaaaa

SEQ ID NO: 1243969 - DNA, 4001 bp, Homo sapiens
ctgggtgaaaaaagagaaagcagaggacgtgagatttggtcctgcctgtagaacagcttaaagaaagtcaagaattaagtcaagaagtaacaactacagaaaaaacagctcaggaaagggagactggcataggtagcagaactttttttcccagatatctcttttctatcttctcttgtggagtgcccgcttttttttttttttttgagacagagtttcgctcgttgcccaggctggagtgcaatggcgtgatctccgctcactgcaacctctgcctcctgggttcaagcgattctcctgcctcagcctcctgagtagctggaattacaggcatgtgccaccatgcccaggtaattttttgtatttttagtagagatggggtttctccatgttggtcaggctggtctcgaactccagacctcaggtgatccacccgcctcagcctcccaaagtgctgggattacaggcgtgagccaccgcgcccagccatggaatgccatctgaacatacaccaccgcctctatcacaacaatggctgatgcaaaattggaggctcaacagataagatgtaaactactattatcatccactgagttgccgggactaggaagtagaaagcatcctactaatggttcttaatgtctcctgatcaggcatgccgctgggtttaggaacttccttatctcaatactttcttctcccccatattagtcaataaatcctggaaattctacccactaaagtcctttacatgtgttctaaactttccatctctactgccactgccttaaaccaggcctctatcacttcctaccattattccctaaaattcattaggtcaggaacaggtctcactcactgccgtctccagtatcttgcacagcacctggttgatagttggtgctcggtacatatgtaccttaaagagtgaagccggattaacggattactgcaatacccttcccacatgttctccctatttccaggctatttctctctcgacttctatgatctttgctttggactccccaaatactcatcactcctcttattaattcttgcctcctgaaagatccatatccaattcttcaatgaatatttaaggaactgctactacataccaggttctgcgcttgttgtaaagaaatttccttagcattataggtctcaaatttaatcaaatctcttccaactggtacttaccgattgttgatatcagagtcaaaaccttcacgaaactcttcctcgctcacttcacagcccaggatatgcacttgctccccactaaggcagagatgagaagggattgtcaaagagtgggcacaggtgccctatccagggtaggccggggagacactgtgggatactcaccacagtgcagatttcttgacaagcgccttcaagagactgcgcccctcccactccacggaatctgcagagcgagggacggataaagggtatgagagcgctgggattaccgccttcgcgaacccgtcgcgatttccacacctagcctgtgacccctggcccttcctgcccacttccgtcccctcagccaggcccgaaccgcaccccccgccccgccaccgtgcctctggctctcaccccgaagcagcaccaggccgcccaaggccaacagcgagtccaacatctccaactcgcgtccggtccctgctctggcgccctctgatggcgtcatgacccagtgtccttcctcctcggggtgaaacgggccgagcactcgggcgtcctcccaccattaagacctaacatagtctggaatgagaggtgattatgttcaatattcccaggggggcgctcacgcggagggcgcccctccccgagccctggcgcacagtcgtacggacaacgaccccgtctacattttcactgtgaccggggcgggaagagcagttggggcagttgtcagtgggagggggaggaggacccacaagccccccgcgagggccctaagcgcgggccaagtgacgtcactctccccgcccacgcagtttgaggcggggcctgcttcgcctcaggccccgccccgcggccaccttctgcgcgtgcgcaatactgcagcctcgcttggagtgcttttggctttccttatacctacccgccatagaccgcgcaggaggaacttagtcccggtgaagcgaatacacgtcaccaccggaagtagtgtcaaaggggaagaggagggggaaagacaggaagagggagtcctttggacggtaaaatggcgcctgtcagagtgggaaacccagctgcagaggctgcagccccggtccccagcggctaaaggacccccgagctcggggagggggaggccgctccggcccagcgctctgcgccctccggctccccctccccctccttccctgctccttcgctctgcaggcccgttctccgctgccgcggccctttgcgcgccgctgcccccgccctccccgttcctgcgagcagccccctagcgcgcctgcgcagcgggccactctctgctttccccccctccccttcccttttcccttcctcccttttccctagccccctcccccactgccccctcccccaattatccttccccttccctccaggtctcggaggaccccatcctagccctacctgtctcggcccgcaacctccccgaagccgtcggtgccactcccagcccatgtgggcccccgcgggctgcccacgcctgtcccccagctccccgttccgctgggctttaccctcgccaggggtggctttctgagccgcccgctccgtgcccctctctgcagcctctcctgccactcggggcccccgttccccctcccggcggcggggggctgcccccggggggctggcggagctgggccgcgggggccccggggccggcggtgccggggtcatcgggatgatgcggacgcagtgtctgctggggctgcgcacgttcgtggccttcgccgccaagctctggagcttcttcatttaccttctgcggaggcagatccgcacggtgagccagggtgggcgctggcggtgttggggacgtctggcggtgttggggacatctgtccgtggtgctcaggggttttcggagtgtcgggcctctgtttgggcctaggaagggaatcctggctggggcttttctcgccagagaattgggcaccctaagcggggcgaggtgggagacccttgtaatagaaccttgcccttgggggttttgatggggctagatgggacaggatttggcaactcttgggggctaaggtggtgggtggggcgctctttaagaaagctggagttgttgctaaagaaaccaagaggcggggaacacctgtttgatgacagccggatctgtggatgtgggcttgggaaagaccctatttggaacctcggtgtgtgtttggtcctataacaaggaagagacagacttgtgtgtcaagggtggaggtgggtgggagggcatacgttacaaacaaggacgggaacttgggaaagccctgggtgtgaaggagaaacgcctgcggttcccattaagagaattcctccaaaaaggctgtgaaaatttatttcatagtgtgagtgtaggtatctggatttattgaagactaaagcagatgcttttacgatgggcctctttaattgtgggagggagttcaaggtgggtgctgtgcccaccattgaagtttgggtgtccctgtcagaggacagcgctgggcagttgtagggcttgaaaatgaggacgtttgcttctccaggagagcctagcattctgagggaaactgtccggatggacccaagcatctctgggtcccctctcccttagcttttctccaaggtcagaggtccttcagctaacagcactttaaatgaatgtgctcttgtggtctcaccaccaccagggagaatcctcggaaggagtctggggagaatttagtaagcggagacacaggttctgggtctgtactgtggtctgtaccccttagcatacctcaatacaatttgaa

SEQ ID NO: 1243970 - DNA, 4001 bp, Homo sapiens
tcccagatatctcttttctatcttctcttgtggagtgcccgcttttttttttttttttgagacagagtttcgctcgttgcccaggctggagtgcaatggcgtgatctccgctcactgcaacctctgcctcctgggttcaagcgattctcctgcctcagcctcctgagtagctggaattacaggcatgtgccaccatgcccaggtaattttttgtatttttagtagagatggggtttctccatgttggtcaggctggtctcgaactccagacctcaggtgatccacccgcctcagcctcccaaagtgctgggattacaggcgtgagccaccgcgcccagccatggaatgccatctgaacatacaccaccgcctctatcacaacaatggctgatgcaaaattggaggctcaacagataagatgtaaactactattatcatccactgagttgccgggactaggaagtagaaagcatcctactaatggttcttaatgtctcctgatcaggcatgccgctgggtttaggaacttccttatctcaatactttcttctcccccatattagtcaataaatcctggaaattctacccactaaagtcctttacatgtgttctaaactttccatctctactgccactgccttaaaccaggcctctatcacttcctaccattattccctaaaattcattaggtcaggaacaggtctcactcactgccgtctccagtatcttgcacagcacctggttgatagttggtgctcggtacatatgtaccttaaagagtgaagccggattaacggattactgcaatacccttcccacatgttctccctatttccaggctatttctctctcgacttctatgatctttgctttggactccccaaatactcatcactcctcttattaattcttgcctcctgaaagatccatatccaattcttcaatgaatatttaaggaactgctactacataccaggttctgcgcttgttgtaaagaaatttccttagcattataggtctcaaatttaatcaaatctcttccaactggtacttaccgattgttgatatcagagtcaaaaccttcacgaaactcttcctcgctcacttcacagcccaggatatgcacttgctccccactaaggcagagatgagaagggattgtcaaagagtgggcacaggtgccctatccagggtaggccggggagacactgtgggatactcaccacagtgcagatttcttgacaagcgccttcaagagactgcgcccctcccactccacggaatctgcagagcgagggacggataaagggtatgagagcgctgggattaccgccttcgcgaacccgtcgcgatttccacacctagcctgtgacccctggcccttcctgcccacttccgtcccctcagccaggcccgaaccgcaccccccgccccgccaccgtgcctctggctctcaccccgaagcagcaccaggccgcccaaggccaacagcgagtccaacatctccaactcgcgtccggtccctgctctggcgccctctgatggcgtcatgacccagtgtccttcctcctcggggtgaaacgggccgagcactcgggcgtcctcccaccattaagacctaacatagtctggaatgagaggtgattatgttcaatattcccaggggggcgctcacgcggagggcgcccctccccgagccctggcgcacagtcgtacggacaacgaccccgtctacattttcactgtgaccggggcgggaagagcagttggggcagttgtcagtgggagggggaggaggacccacaagccccccgcgagggccctaagcgcgggccaagtgacgtcactctccccgcccacgcagtttgaggcggggcctgcttcgcctcaggccccgccccgcggccaccttctgcgcgtgcgcaatactgcagcctcgcttggagtgcttttggctttccttatacctacccgccatagaccgcgcaggaggaacttagtcccggtgaagcgaatacacgtcaccaccggaagtagtgtcaaaggggaagaggagggggaaagacaggaagagggagtcctttggacggtaaaatggcgcctgtcagagtgggaaacccagctgcagaggctgcagccccggtccccagcggctaaaggacccccgagctcggggagggggaggccgctccggcccagcgctctgcgccctccggctccccctccccctccttccctgctccttcgctctgcaggcccgttctccgctgccgcggccctttgcgcgccgctgcccccgccctccccgttcctgcgagcagccccctagcgcgcctgcgcagcgggccactctctgctttccccccctccccttcccttttcccttcctcccttttccctagccccctcccccactgccccctcccccaattatccttccccttccctccaggtctcggaggaccccatcctagccctacctgtctcggcccgcaacctccccgaagccgtcggtgccactcccagcccatgtgggcccccgcgggctgcccacgcctgtcccccagctccccgttccgctgggctttaccctcgccaggggtggctttctgagccgcccgctccgtgcccctctctgcagcctctcctgccactcggggcccccgttccccctcccggcggcggggggctgcccccggggggctggcggagctgggccgcgggggccccggggccggcggtgccggggtcatcgggatgatgcggacgcagtgtctgctggggctgcgcacgttcgtggccttcgccgccaagctctggagcttcttcatttaccttctgcggaggcagatccgcacggtgagccagggtgggcgctggcggtgttggggacgtctggcggtgttggggacatctgtccgtggtgctcaggggttttcggagtgtcgggcctctgtttgggcctaggaagggaatcctggctggggcttttctcgccagagaattgggcaccctaagcggggcgaggtgggagacccttgtaatagaaccttgcccttgggggttttgatggggctagatgggacaggatttggcaactcttgggggctaaggtggtgggtggggcgctctttaagaaagctggagttgttgctaaagaaaccaagaggcggggaacacctgtttgatgacagccggatctgtggatgtgggcttgggaaagaccctatttggaacctcggtgtgtgtttggtcctataacaaggaagagacagacttgtgtgtcaagggtggaggtgggtgggagggcatacgttacaaacaaggacgggaacttgggaaagccctgggtgtgaaggagaaacgcctgcggttcccattaagagaattcctccaaaaaggctgtgaaaatttatttcatagtgtgagtgtaggtatctggatttattgaagactaaagcagatgcttttacgatgggcctctttaattgtgggagggagttcaaggtgggtgctgtgcccaccattgaagtttgggtgtccctgtcagaggacagcgctgggcagttgtagggcttgaaaatgaggacgtttgcttctccaggagagcctagcattctgagggaaactgtccggatggacccaagcatctctgggtcccctctcccttagcttttctccaaggtcagaggtccttcagctaacagcactttaaatgaatgtgctcttgtggtctcaccaccaccagggagaatcctcggaaggagtctggggagaatttagtaagcggagacacaggttctgggtctgtactgtggtctgtaccccttagcatacctcaatacaatttgaaagaataaacccaggttggggtgacctggggtccagagaatttccagaaagccctcagtggtagtggtggttgatttaactgatttgggagaatgggtctggccttgggttcattctgtcctttaccagtctgcttccacttcctgatt

SEQ ID NO: 1243971 - DNA, 4001 bp, Homo sapiens
atttttgcatcttatttttagtagagatggggtttcgccatgttggccaggcttgtctcaaactcctgacctcaggtgatctgcctgccgtcggactcccaaagtgctaggattacaggcgtgagccactgtgcccagcctaaatgtccaaacaatgtttaatcttccctagacatattctaaaaaatacagcttgactttattttttcttatggaaaggactgtcactaaatgaaatggaactaaaatgacaccatatatacctgaaagtagtggttagtgggagggaacgctggcctgtgaaaggtacacccagcaaacatatcaagagcaaattaagagacctgcatttgaatcctggctctgtctcttcctagctgtatctcctctgggagaagtatttaacctctctgagcctcaggttccttacgagggagctaacaataacatctaccctgtaaggttattgctaaaattaaatgagaggatcggtgtagagtagaagtcacaatgccagcatatagggaactcttttttttttttttttccctgagagacagacggagtcttgctccatcacccaggctggaatgcagtggcacgatctcggctcgctgcaacctctgcctccagggttcaagcgattctctttcctcagcctcccgagtacctggcattgcaggcgcgcgccaccacacccggctaatatttatatttttagtagagacggagttttgccatgttggccaggttggtcttgaactcctgacctcaggtgatccgcccacctcggcctcccaaagtgctgggattacagacatgagccaccgtgcccggcccagggagctcttaatacatattaactgttactgcttcttaggatgttaataagttctttccttatgtaggcccttagggcccgtttctgaatggcctatgtgtaaatacaaggacttaacacaaggctatggcccattccttgctctccaggagtcaaatctcggcgattttgcatcagtggcagcctaagcgttacagcaggaaagaactccacaaagtgtctcacgcttcatttaatctgaagaatattacaggctctccgtcttcagatataaattatttataacgttacagaacaagcagcgaattcaaccacttaagaactaaggaagtctacatggtgttaattgctggccacagtcctcccgatctggttttttaaaaaagtcccccgggcccccatttcagtagacgtgcaccatgccgtagaggaacgtccagaacaggacgtaggtgaagaggcccccgatgaggcctcctgtaaagagaggtctccgtgatttgaaatatttgttccacctccttcccgccttgagaatgaggagcagggagagcaggacggaggcgagcaggtagaagatgaagccgtagaggccggtgaggccgaggatgccggccgtggcccccgacagcgctgacaccgaggtccggcaataatccaggacggcggcgttgccccgcacggccgcctcgctgatgaacggcggcccttcccgcttggccaccaccgcggccatcgcaccagcccgggctcggcctctcgctttctcgcggaacaacgcggagctgcggagaaaaccaagttacaagtggcgcccggagctcggtgagttgggttcacgccgccccctccccctggagcttccgagacctggcaccagtcctgggcctcggatcttccaaagacgccgaggagattgagggtccgggccggccgggaggtggtggcgcgtctgcgttccccggccacggtggcccagttacctggaacacggcgccggacacactacttagcgttccctcagacgggcagtggaagaaatgcccgcggcgccatcttgctcggaagactgccgggaggtctcgggctgcgcacgcgcccagatcccgccccgccctccgcgcctgcgccgtgggcgccccggacacgctccgccctctgcccgcttttctgcgcacgcgcagggacttccgaaagcggagtggcgctccggccagtgattggctggaggtttgttaactattcatgagggggcgggccgagcggggcggcctttgttaagcagcgagggcgcgaccgcgggtactctgctgccggcttctcggagcggcgctgggcgaccagagcagggtcgagatgtcctacatcccgggccagccggtcaccgccgtggtggtgagtgcgcttgcgcgggctcctcctcgtcttggcctgaccccacctcgcagagcgggaaacggacaccccaagcaggttgacagagcatcgaacccggggctcctgcgaaccggcggcaagggctcgggtccccgctttgccggagcgggccgcagttcccccagccacgaaacagggatggccgggacccgagagcctcccgagaccctggacagagcccagactgcgtgcgcagggcggggagggccacggggaaaggcctggctgcaggagcctggaaaagcgcccccttcccgggcctccgtgtccccagacggggagctgctgggggcgggcgccgatcccgacgtccatgagtcgcagcctctggaatgaggaaatgcttcctccgctgcagcctgcgccgccgcccggagggagatctgggggtggggctctcccgagcctgccgtggcagcccctgcccccttcctgtccagccttgctcctccaacccactcgccgcctggtccagggtggacgctcgtatagctgcgatgagcgtttcctcttcgaacttttcctgggtctccagcccttaaggcaaaaaagtccaggcctccctcctggcacttgagtcctgagtagaccctccgggggctagcctaggcccctggccgccctctggcttgttttaggtgctgggtgctattagactaggcagagggaggaaggaaggctgggacgttagactcagacgccggtgtcacagagggacacaaccctatgacagaggtggggagtcccagagagaagtgctcagccagaaaagaccacctcaggaaagactcaggtctcctgcctacctcccgacagcgttcagagaatgagaagaaatgcctgcccggtgggcagtaggtcaagcgaaagtccccgccctggagccatagggactgggtgtgttatctcagttgggtgtgctggagaagctccagcaatcaggtgggtggaggcagagaagccactgataaaggcgacaagtgaggctgagcttagagcactggctcaggcctgggccaggaggaaacattgctggaccagctgacagctgtcctaagcttcaccctccctgcaccagcttgactttttttttttttttttttttgagacagtcttgctctgtcgcccaggctggagtacagtggcgcgatctcggttcattgcaacctccgcctcctgggttcaagcgattctcctgcctcagcctcccgagtagctgggattacaggcatgcaccagcatgcccagctaatttttgtatttttagtagaacggggtttcaccatgttggccaggcttgtcttgaactcctgacctctggtgatccacctgcctcagcctcccaaagtgctgggattacaggcgtgaggcaccacacccggcccagcctggcttttttagatccctacctgccccagagagaaggcaccaggtttgctctttaggtagaaggggggcagggacaggtgaggagctacagcaagccaccttctgcgtgacctcacccagcaaatcagtgacagccctgtctcccaacccaagggcctgtaatcttctgaccgtgccggcagagcaggcctggaggagctcagtttggggcatgaggacccaggcacagtaggcctcatgcttcctgcccccctccctcacgccataactggtcccagggccttccccaaaactgcaggcccatgccccctaattctggtaacaccaggaacgt

SEQ ID NO: 1243972 - DNA, 4001 bp, Homo sapiens
ctttagagccatcagtatgtgctatcaaataattccctaaaaggaaaagagacatatgacacagactggagcattcaattcagtccactagctgtgttccatagccaggctttatgacataaatataagatatagagaatacagaaacagagaaatatgacatggccccaacacattcaatctggaactctaactcctggtaatctaacaggaatcctcctcaaattctttccaggtcaagctgaagtataaacaaagtagagttaccattacaaaattttaatggggggaggtggtaacaagatttaacacctccaaccccttgtttatcttcacgtttgaaatggagatgtcaaaagttcttcttttttttttttgagatggagtctcactctggcacccacgttggagtgcagtggcacaatcttggctcactgcaacctcactcccaggttcaagtgattctcctgcctcagcctagctgggattacaggcgccccaccaccacacctggctaatttttgtatttttagtagagatgcgttttcatcatgttcgccaggctagtcttgaactcctgacctcaagtgatccgcccgccttggcctcccaaagtgctgagattacaggtgtgaaccactgcacctggccaaaaactgttctttttaaaaattgagatataggctgggcatggtagctcatgcgtataatcccagcactttgggaggccaaagcagaaggatcacttgagcccaggagttcgagaacagcctgggcaacatagtgagaactcgtctctacaaaaaaatacaaaaattagctgggtatggtggctcacacctgtagtcccagatactcaggaggctgaggtgggaggattgcttgagcctgggaggtcaaggctgcagtgagctgtgattgtacgactgcactccagcccgggtgacagagtgagaccctgcttcaaaagaaaaataaaataaaaataaaaatagagatataatttgcacagcataatatccttttaaaagtgtacattcagtagattttagtatattcacaatgttgtgcaaccatcatcactattttatcacctcaaaaagaattcctgcagccattaagccgtcactgtcctttccctccctccccagctcctggcaaccataaatctgtctctatgcatttgcctattctggatatttcatataaatagaatcatacactatgtggccttttgtgattgacttttttcactcagcttgttttcaaggtttatctatgatgtagcctgtatcagtagttaattgcttttcatgactgaataatattccactgtatggatatgctacattttgtttatccattcatcacttggacatttaatttgtttcctttttttgcctgttatgaataatgctgctatgaacactgacatacaagtttttgtgggggtatgttttcaaatccctttcgtgtatatacctaggagtagaattgctgggtcatatgcaaagctaatcatttcttgaacatttactaacactgtaggtatgacccagaaggagacatgtaacctgcctaggcctcagtttcttccttagtaaaacagggatggtaacagcacccattttataaggtagtgagaattaaataaaataatgcatccaccgcgcttagtacagcatctggcacacagctggctaagtagagtaagttgaatgactagggagggggcctcatctctgacccttcgctgggcctccgttgacatctgcaaatcaggggagtgggacaagcgggcccctgcccgacaagctctgcgcctctcaggctggcggtccgctgcagaggctcctggacaccttagccaccaagattctgcagagcggtgttcaggagggaagccctgcccaatccgcaggcctgcgaccggggacgctcacctgcaacttctcccgccactctttcaactgccacgcagggcccggaagtagatctcctgatagcggaagtagaaacttttcgagaccggaagtgagtgatcgaaagcatggcgtcggtggtgttggcgctgaggacccggacagccggtaatgggacgcagtagtcagagcggggtgaggcggggaggcagagtggagctccagcagggagggaaggaggtgacactgatccccgcggaggaccttggatgcgaggggaagtgtgtggggtactccaggtttgagggacggtgtcgctggtcacgtgacacatcctgggtggagccgtgagtgagggcgtttgaagagcacttgtctttctcctgcctcagcagcacggacgggttccttggcggttggggatttgggtgggtcctttctctgtagaagtattagtaacattggcatattggggttgaaaaaattaatctattgattcagcagattgaggtcttactttgtgctagacacggcggtaggtgttcggaaaatcagcagaaaacgtgaagacttggcttctagcccccgaacggttctctctggtgcataaggcaataaatgaacatataaagtagatgtagactggcaagtgctgtgaagaaggataatgtgtgtctgtgtgtgtgtctttttttagattggacggtgaaggaaggcttctgaggagataacatttaaaacctaaagaatgacaggcggggcgtgatggctcacgcctgtagtcccaacactttgggaggcctaggtgggcggatcgcttgagcccaggagttcaagaccgactgggcaacatggcaaaaccccatctctacaaaaaatacaaaaattagctgggtgtagtggcgcttgcctgtggtctcagatactcaggaggctgaggtgggaggatcacctgagctcgggaggtcgaggttgcagtgagctatgttcataccactgcactccagcctgggtgacagaatggggccctatcccccccccccaaaaaaaaaagaatgacaggagacctagacctgtgtagagtgagggacaggagagtgacttgagccagttttacattttgagaagcaaactattgctcttatgtaaatttaaaggggataggagtggaaatgaggaaatcaaatggaaagtcgtaatagccctgaggagagatgatttagccaagatgtttgtggtggcagtgaacttggaggaaaacggatgaatttgagatctgttttggagttagcatccacagagcttgctggtgaacaatatgtgaggacagcaaagagaaggaatctgcaatgactctggtttctgcctaagcaactggatgaatggtggtaccatttactttgaggaggaggatggggagtagggtgaagagcaaagatttgtgagtgagataatgtaagtaaagtaaaagcccagctcctgagcttagtaagtatgtaaatgaatgaatagatgtttaaaggtaggtagatcctggcgccgggcatgttttaacatgttgtctttctgagtccttatctctggtcctttgccccagctagtctctggtgtcatggaaatgtcagaaacccaggcttcaggaactctgaacttataggctccagagacccacaaggcttctctaaagacactggcatggaccttaaatcatggctgtgtctggagacctgcaggcaaggagttgcacccctaggcttgtcatacagcaagggactaccatcttagtatgaattttagttcattttacttctgcaaatgaatgctattgagcactttggaatgagtatggagaggtcagattaacaagggcagtgtgtgggtcatggttggacctctgcttgatgtgctttgagaagaaagggcccagccttctgaaatggccaggaccctgtgggagccacttttaggccagccatccttttggtttactagtatttggtgagcagtggatgagtggacagctgagaaagtcatgggtgaggcctgtaatcccaacactttgggatcacctgaggtcag

SEQ ID NO: 1243973 - DNA, 4001 bp, Homo sapiens
taaattacgcaggggacaggtcatgacgggccttgaagccatgccaaccagagtgaactttattcaccatgaggtcatgagaagggcacttcaatgttctaagaggacttgtgggctgggtgtggtggttcccacctgtaatctcagcacttggggaggccaaggtaggaggatcccttgagcccaggagctggagaccaccctgggcaacatagtgagatcctgtctctacaaaaaataaaaaaataagccgggtgtagtggctcacacctgtggtcctagctactcaggctaaggtgggaggatcacttgagtccaggaggttgagatcagatcttgacagtgagccaagattatgccactgcacttcagcctgggcacagagtgggggaaggggaaaggaaggaaagagagacagagagaggaaggaagggaggaaggaaggaaggaaggaagggagggagggagggagggaggggacttgttgcttttgaggaaaatacttgctttttaggaaaattggtctgctggcagtatggaaaagaaaccactgaggaggaacatttgagccagggcacccatgaaaatgctgctcaggaacccacaggagtgatggtggcacagccagggaaggagcagaggggaaacagacaaggggacagattccagcgacatttaagaggcagaataaaagcgagctagtgtgcaactggacgcgagaggaacggaggggcccaggaggatgcagatctccagcttgggcaactgggagcgtggtggacaggtcactgagatgaagaacccaagataacaatcagacttgaagataaagctcatgagctgattcttaatagtcacagaattcccttaatttttgcctttttttcccttccaagactccccagactttttttttttttttttttttttgagatggagtttcgctcttgttgccgaggctggagtgcaatggcgtgatgttggctcaccgcaacctccgcctcccgggttcaagcgattctcccgcctcagccttccgagtagctgggattacaggtatatgccaccacacccgtctaattttgtatttttagtagagaccgggtttctccatgttggtcaggctggtctcgaactcccgacctcaggtgattcccccgcctcagcctcccaaagtgctgggattgcaggcgtgagccaccgcgcccggccaactccccagactattaatgacatcctacaaaacgagaagccgggttctacgcttgcactgctccctgtcccggagaccgcacgcccgagcccaccgaggggcccgcctcgagctcggcgtcctcccaggttacctcgagctcagggaagctgagcaccaccagggaagcacaagcgcggacactgtcccctttcacgaaggacacgtcaacgcccccgaccctctgcagacccgagaaggcggggtctcgctgccacgcctcggtgtcccggtctacgacgtgggccttcagccgagcttgctccctaggaggacagaagcgtcaaacttggtcggggtcacacctcagactctgcctcctccacccgcgcggctgcagcggacagagcgcctctgccgggtcttctcccgcttcaagggaaagcaagggacataccgccgaggccacagtccctaggagcccaggcggcggagacccgcgcaagcgcaggccagacaaactggccggaagcgagaaccgcgcccaccccgcggactacaattcctgagatccctccgcttccgcgccggaaactgggctttgctttggagtctcgggcggtggcagctccgattccacagcctgaagactatgagctcggagggtccgcgaagggccgcccggcctcggcccccgcctcctgcgcgtcgcctgacagcattaccgtttccacagtgacagcgtttcctccggcggccctcccgccgcctccagggccatggcttcgtcccgggcaccccttccgcacgtcacttccggaagcgactcgctctgacgccgtccgccctcgttgccatggagacgcttgcgctttcccgggccgcacttcccacccgggtcttcagaagcccgtggccgctgggtgagcccctgcgtgaacgcacacgcacgcacacggcttcaggttgccccgcggcgccgcgcgcgatatcggctcggatcccgggaggccgtccgcccctttttcagcggatagctgaggccaggtaagtgaccgcgcgaggacccgggaactccgtgacgcccgtcccgcctctgctgtccccgccgcaagcgctgcgctctgcacggcgagaggggcctcttgccctgttgagagccggcgggcacggcacttctgcgcttggaaaagggtggtccagcactgcaggtcccactccttggcccggtcagcgtccgcctttgctgaaccccgaaaggattcaccaggtccaggacagcccggcagttgcctcaggagcacttactgagcgcctgtcgttgacgcccccacctcgatggcagctcaggggtgccctcaagcttttgagggcaggtgtcgtgtatttaaattcttcacagtttagcgggctggactcacgggggtgctgcagacttggacggggtttcatctgggtcggaccttgctgggcagaaagcttctcctaccagacaaagtacggcgaccttggggggtcttggttcttacctcgtgttcctcattgaatgagtgttggttcagtgctctcgctgtgccaggtgttgtgcgaagtactgtgagggagaatatgtatttatttgtggggagccgactttaaaccggtggttgggaaaggcctgagaggcgatattgaagacacctgaagggtgagtgaaagagcacggcgggtgagtggagcagctttctcgtgcaggtcccggggtgggaaagaggttggtgtatttgaagcactgaaaggcagccactgaagctgaagtgtagcagtttaacccatggttttatattctcctgggaggattcagaagggtgtatgtgtgtatgtatatataatagcctgaatataaacgtcaagggtgttaggttttgaagggaaggtgaaggttaaagaatgacgcacagtgagattgccggcgcgcgggcggctctacagcaacacaggtgtattgcaaacacctgtcgggggccagcttaatgccagagcccaccagcgattacaggctggggtactcataggcctgggcaggagggatctaggcagtatggcttgctgtccgggaagatgttaacgtgttcccaggatgaggtggttccggcagaatgtggtgttcctggcgctttgtcccagcagaatatgttaagaggcaggctgtttctcatggctcgaacccccgtggaatgtttcactttgaccaaggtctacaaaatggaaaggggcttacaaaatgacgcagtttggactaacaaaggggaaaatacagaggatgaaattagactctagaggttgaggctcaggaaaggcttcatacagctttgggaactgacaaggctttgaaagcagggtcagttttcagcgaatgagcgtcacccactgcaccctgcgcaccctgctcccctgctgcggtgtctttcccaccagagtgtagcaggacaagccgcagacaaaacccctcagacaccgagttaaagaagggctttattcagctgggagcttcggcaagactcacgtctccaacaaccgagctccccgagtgagcaattcctgtcccttttaagggctcacaactcttcaggggtctgcgtgagagggtcgtgattgattgagcaagcagggggtacgtgactgggggctgcatgcacccgtaattagaacggaacagaacaggacagggattttcacggtgcttttctatataacgtctgtaatctatagatagcatcactgattaggtcaggcgtcgatctttaactaccaggcccagggtgtggtg

SEQ ID NO: 1243974 - DNA, 4001 bp, Homo sapiens
ctgtgccactacactccaacttgggcaacagaacgagactccatctcaaaaaaataaataaatagaataaaccttaccctctaaagcagccaccccaataccacaaagaccagacataaatacttcacagggtccccaggattttctatggccaaggggcaatatccaaatacccaaagcaccagaaagtttcaggtcctaagagagcagagaccaggcttcctctataggccacacttccctaagtgccttccgcgctgttcatggatgtatgttacagggagaaagagttccttcgttccttcggtacattaacatggaaagctcctaaatacatctcaaaccactttcttttaaaaattgattgattaattgagacagagtctcgctctgtcgcccaggctggagtaaggtggtgaaatctcagctcactgcaacctccagttcctgggttcaagtgagtctcctgcctcagcctcccaagtagctgggattacaggcatctgccaccacgcctgactaattttgtacttttagtagagactgagtttcaccatgttggccaggctggtctcaaactcccgaactcaggtgatcacacgcctcagcctcccaagtgctgagattacaggcataagccaccatgcctggcctaaaaaatcattattattttaggagcagtaagaagacaccgcagtggctatttagaggccatggcaccaacgttgagattccctaaatctaccaacgcccaaggccacttctttgttcactgagttgtcatctgccatcactccactgccattcagaggcctgttgcaaagagtcctctgtagcatctgccatcaccaaacactgacccagggcctccagaatgacattgggagaccctgagaactgcaggggtcggggacggattcaagcagagatgccgcagttgttcctctccaccttccttttccaaagcccccttcctcgttgatgtccttattatacttcagccaccccctcccagaccttctcagaacaatcccacaccaggtcacctttgtcacctgtcattcctccactaggagggaaagagccatctccacattcctcctgtccaaaaatatctttcccagcagccagccttcatcccatcttcatgaggtctgaaatgctcagcagtctcactgctttgggtttagaaacaaagctacggctgctgtttccggaagccatgtctgtgctcctaacttctccccctgcaacctactgagggggagtttaccgggtgggcaagtgccccccaaaggaaggaagcccagcccagaggggcatgttcgtccctttctgtctctgtgctttggccctttctgttccccgccagttggataccctactccctattctccacctactgaaggcttcctcctccccaaagactcagttctagtgtcacccctacagaaggccaccccttccaccagccggcatccactgagccaggcatgagcaccgccgccgggatcttccgcatagaccagcgacgtgggaagcaggggtctggccggggcgtcgggattcccgctgggccccgcggccactcgggtttgcacccgtatttctgagataggcaggggtcacgcacgggggccggaggccgctgcccggcagtggcgcgaggacggcggggcggaccggggcggaggggcgctgccaccctctgtcccttactgtgcacggagcggacacaggcgccggccccccgcccctcggcgcgcccgtgccgggaaacctcgggccccggggccacggactctcagccccgcggatcggggttcacgcgggccccgcagccccacctccttcccggccgccgccgccgcggccgcggctcctgatcctcctgctcctcctgcgtccccgcctccggggccgccagcccctgcagctgccgccgccgccgccgtgtagccgaccgggtgaccgtcaccgccgcggcctccatgacactgtccgcgcacgccgagaggcaatcgcaggcccgggcccgcccccgcgccgcgctcggccaatgggaagtgcgcagcgctgacgccgcgctgggacgggactccgagctgactcccggccagcggccgcgcggcggggactttgttgaggcgacaggccgggggcggggccgaggacggggcggggctgtgaggggcggggcctgggcgagttccgagcccagggttcgtcgtcgttcttgttgttgcccatcattggctatgagtccagggtgctagaaggctctagaaggcttcggaacgccccaatcttagagttctctctttagcctcaccagcttcctttgtcaagcaaaccgaggtttatcccagagagattaagcaatctcccagagggcacaaagtcagcaaatggtggcaatgagattttaactcatgcagctaacccctattaaaagataattttcagaccgggcgcggtgactcacgtctgcgattccagcactttgggaggccgaggcgggcggatcacctgaagtcaggagttcgagactaccctggccaacatggtgaaaccccgtctctacttaaaatacaaaaattagccgggcgtggtggtgcatgcctgtaatcccagctacctgagaggctgagactggagaatcgctggaacccgggaggcagaggctgcaatgagccgagacggtgccattgcactccagcctgggcgacagagggagactccgtctcaaaaaaaaaaaaaaaaagatgaaaggttagtaggttagtatcgggccatgtggaagctggtgtcctatgtaggatgcatagttttccagtgaaacacggatttctttctacagccccacgcctgtgcccaacagtagtagttgctctacccctaagcgtgcagggcctggagtggcacctctgcaagagtggcactgcccagcgtcttaggcacaaaaggagttcacaggaaacatgatagaacagagccctgagaagccagaactcaaggctgggccccacagggcaaaccaaggctctcctccctccaggccccaacgcccctccacagctaggagcttccagtgctgggctgcagctgccgcccaagccaagttgactgggcctttattattgttgcagactttgaactttatgaggctccaagcttccataaacgccaatggtgggaactatgactaaggttgttgaatatgggccatggtgcaggccagccagttaggcaggaaggacgggccactcagaagcaggacacgctgacccatggggaggacagagaaggcagagggctcctctttggggcttcagtcctgggaagcttacagtgagcgagggcagtggatccccaagttccctcctgctgtgttcaggggtgcaccggacgtggacagtcttgatctggggtgcatgtaaccaggtgttcccaagccctcacctgcagcttagcaataaaaatagataaactttcatcctacccaggttagaacacagttctaagggatactttgaacagcctttgggtaatgctcagtctctgggagaaaatatgcccaaacctcccttttcttctctcctttccaaagagtaggcacctggtctagaagagcaagaaagtgaaggcagccttgcacgcccctgaggacagaaaggacttaggccttgtggcctcttgttagcccctgtggctcgtggtctctctggatgtcaggccaagcctggaggggccctgtctgccttgagctcacattggctcatactggggctctggatccgtttgaggcctgagtgggccctctaaaaccctaaccttctggtgttttcagataacatacagagcaatcagttaaatttgaattccaaataaatgatgcctgggacataggacaagcttatattaaaaagttattgcatatttatctaaaattcaaactgaactaggatgctgtctatgcatttgctaaatctggcatccct

SEQ ID NO: 1243975 - DNA, 4001 bp, Homo sapiens
ccagagtattgttgatgttctccacagccttcaggactcctagacaggccagaggatgagttttggagctcaatcaactgggcccctttctgtggaccccagctcctcaagagccttgggggttccagtcctctacccattgtgcacccatgtcctaaagccgcccacacaggctccttctgcgctggtgtctcctcacctttccccaggtagcggcctttgtctccgtctcttagttccagagcctcatagatacccgtggaagccccactgggcacagctgctcggaatcggcctgggacaggaggaattggaagatcacagggatggctgggcgcggtggcccatgcctgtaatcccagcactttgagaggcctaggcaggtggatcacttgagatcaggagttcaagaccagcctggctaacatggcgaaaccgtctctgctaaaaatacaaaaattagctgaggccgggcgcggtggctcacgcctgtaatcccagcactttgggaggccaaggcgggcggatcacgagatcaggagatcgagacaatcctggctgacaccgtgaaaccccatctctactaaaaatacaaaaaattagctgtagtcccagctactcgggaggctgaggcaggagaatggcgtgaacccgggaggcggagcttgcagtgagcctagatcgcgccactgcactccagcctgggcgacagagtgagactccatctcaaaaaaaaaaaaaaaaaattagctgggcgtgatggcacaggcctgtaatcccagctacttgggaggctgaggcacaagaatcacttaaacccgggaggcagaggttgcagtgagctgagattgcaccactgcactccagcccgggccacagagcgagactccatctcaaaacaaaacaaaacaaaaaaaaggacctcacagggagtctctctacctctcaaagggctgaggtgtcctctctgagctcagggacaggaggcagtgcagagagagactcctgcttctcctagcttccagctctggttccacgttggaagaagggggcttgggaagaagtctgggaaagggaacccgagagaaaggagaggatatggcacagaactggggggcaaaggccaaagggttggggtcttcggaggcgagcctatccaatgggccttgtgttacccttggccgtgtgcaggtccacctccaccgtggggttgcccctggagtccaagatttcccgggcaaagattttctgcatggccatggctgcaggacaggaggtgtgagtgagtgtagacagttgatctcttaaggaaccagaaatcccttgccctttaagattcttccccactccaagaaggcaggtgctggagctaaaaataccctacaaaaaggtcacagaccaaagaggcaggcgcagccccctcccccactcagaacagctcttattccaccctcccatcctaagaatccaggggcctcttatctatagctcctgggatgccaccgctcaccaagcccccacctcccccaagcctccacttaggccttctccttccacccctctggtcaagcagtctgttctccatggctggtggccttcaaatcctttctggttctcattttcctgctccgaaatctccttgggcccccaattccctatcaggttccagctctagctgcccttttctatccatccctgctgccctcctcacagcctcctttccctagatccttcggtgttcccagagtttgtcccatctgcttgctccagccgccccttcccccagctttttcaagcatctccagtcccaggaggaaaaaaagcagaaatgtcccccacttcctccaagccaataccatgctcaccctttactacctccacccccagggctggaagattcacccgacctgggatgtcttcgctggaggtttggatggagctccgagtctaggtggcagctgggacagtgtcagctcaccccctctcaggctgcgcatttatccctgagccactcggtccccagccagccccgcctctctttctctccatcctccccccttcacactgggctggcagccaagtgcccactacagcctgaagcagaagcctctggccctgggcacctgcccccttaccaaaggtcaactactatcccccactttctgtctcccaataacagtccctgttctaattccaccctttgggaggagcaagggaggggctacagatgaggggtctccccccaccccaggattacattccccttttgcaaacgtcaagaggaatgagtgacctttaggaaaggccaggggtaacctgagccctgcaaggctggggagggggcctggaagaggggctgcaagattgacgtccacacatgctcagatcgctgggcgggcctctgtcctcagtgggggaaaggacgggaccccccaccccagaaggcgagagggtctcacctcttagggtcctcataacggccattctcggcgccgccccatcctaccctctccaggccagccagcgccgggatgagttaggggacaggaaacgaatttagacaggccctttcggctggcaaggcgcccgactgataacgctgggacagcacttgtcgcccggcgtggggactgtcggtcagagcccctttccccatcgactgtgggcgctcagcgcacggccccagcccatcaatgaatggggctgaatcaacagtgaacaaaaatgaatggaccgaggacgggtggccttttgtgagcttctgcacgcctggggctcttccggcgccccacttgtagcactgcggggaggtaggtctctgccctcggtagagatctccactttgccggctctggggccagtgcggggtctgccccgagctcctctgcagccataccagccgaccggcgggggacacacggcgcctcggcccgactcggaggcccttcccgtcggcgccggggcagcgcgcgcccggtgactcacccccgccgccctctccccacccctgctccccgccccgccggcccgcgcggcctcccagcccccaccccaggccacctgccccgccacccgtccagtctcccctctcgccccgccccctcatctcaggccgctcctcccgggatttttccaccctggggtaggggtgcggtgggccaggggtcaggagatggcgggcggggagcgccgccacgtgcccgggtgcggccccgcccgagcccgccagtgactcagccgcgcggctgtcgaggaacacggactcgaggggcgtcggggactgtgggattcggcgtggacgccagggatgcgcgccgcgctcgggaggagagagaaaaccaaccccctttccgcccgggccgcgctcggtgaccccttgcccctagcccaggctccggaagccgcccagccctcggcggcgggtcggaggaggcggtttcaccgcggccgccgcacggccgtcccgcccgtcccgccctccccaggtggctgtgagcgcacatctgactgcgaagaaacccaaagggcccgaagtgggactttccccttcttgaaaaagttgccactcttgcaacttgagtattcttccgcctcgaaaaatagccccgcctgttaagccccgcgggtgtccgcgctctgtgacctctgcagacacaggccaaggggcacggccggtgatccagacattgcctgcctggggcgggcggggctgggatgtggggtgaggccctgggctagagccgatccagagaagggacaatcctctagactgagaatgggccctggtgaacccaacctgcacgacccgagaagacgctggggacagaagtggccccggtgggtgccttcagctatgagagcgactagaggatttggccaaactcttctttgctttcttattacttgaataagtaaaatcaagggtggtgaggcggcagcgcgcacggcttcgcccccgccccttccgccaggcgggagacacgtccccagcccgccttcct

SEQ ID NO: 1243976 - DNA, 4001 bp, Homo sapiens
gagatcccaggcaggaatttcagtgaactacgtggagctccaggagattttttgaatttatttttgtacaggaaacacgtgcacatggtactaagtccaaaaggtgcaaaaggagagatgatgtggagaaggtccctcccgtcctcatctgcgatacagagagcaaaagaggcgctgcgcagacgggagacccgcacacctccgtttgcggttagaaggggcagaaaggctggtgtggggatgagctgcctgtgttggggtggatggtgtcccaccacattcatgctcacttggaaccttagaacgtggccttatttagaaatagggtctttgcagatgtgattagctagggtaaggggatgtataccagagaagtgtggacccgaaattcagcgactggtgtactagtgagaagaggaaagtttgaatacagacacacacacacaggggaaaggccctggggagacgtggggagaggtcggagtgatgctgccgccagcccaggaatgccaaggattgccgaggccccaggagccagaagaggtgaggagggagcctctgctggaaccttccgggtgggtgcagccctgcaatgccctgggtttggccttctggcctccagaagcatgcggatccgtttctgtgggtttaagccagtctgcagatctttgttgcaggcgccctgggacacccacgcagggtctttggaggatgacgcaggtttgggaggtggctgagcccctagggagggccaattgcttttcaattctctaacaccttttttgtggtacttggctttttattattttattattgtttgtttttttgacacagggtcttgctctgtcacccaggctggagtgcagtggtgtgattgcagctcactgcagcctctacctcctggactccagcaatcctcctgccttggcctcatatatatatatatgtgtgtgtatatatatatatatatacatatatatatgtatatatatatgtatatatatattatatgcagtcttgctttgtcacccaggctggagtgcagtggtgcgatctcagctcactgcaacttccacctcctgggttcatgcaattctcctgtctcagcctcccaagtagctgggattacaagcatgcaccatcatgcctggctaatgtttgtatttttagtagagatggggtttcgccatgttggccaggcaggtctcgaactcctgacctccagtgatccgcccgcctcagcctctcaaagtgctgggattacaggcgtgggccactgagcctggccccatatttggctttttaaaaacctatgtctgtattgtctacagcctgggcagatctgtcagggaggtgttgggtggaaaatggaaaggatggaagggagagggagaggctgacacagccagctggaggggcgggcaggggaggggagccatgggagccagcggggagcccgccacactcccctcctcctgaagccttctggggttgctgccctggctgtggccacgggtttaaggacccccctggtcatttttctttgtcccggatctgttgctaccaacggtgaggattcctaatggtccccttggctctgtcctgtgcctggagcaaggacctctcccctttatcctgcacgacacggctctgtgccatctggtttctcaggccctcccacccccaggccccgtcacagggcagtactcaccggtgaccagggtgaagtggcaggggctggtcatggtgacaaaggcgggggtcatgtagcgtgccttcaccccgtctcgggccatggcgtccaggttgggggtgtccacgtcctggtcgtagttccagcggaagccgtcgaaggacaccaggagcagcttgttctgggagccctgactttgtaccggtgctccggccccgggagccaggagcgtggccagagccacagtgaggaggacggccgggcctctcatgctgggccttccagatggacaggcacacagggtgcacagggctggctcctgccgaggaggacaaagtcccagggtcacccgggctgatctcatcccgtgcgcctttggaatgtggctgtgcacatccccgggtcgaacctcgggagtgggctccccagccgtgtcagtgccacccctggtcccagcctcacgtgcgtggggtggcatcaacttgagcatctgcctttattgccagccgcgcccttggtgctccaggctcctcccctccctccccagagtggggacagtgacccagggctcagagcacagcaggagcccattccactgggaaagtcgtgccctctccctctcccatagcaacaggtggtccctctgtcccagctcaccctgaccccaggggacccaggtgaggctggggtgggaccccctctccaggcctttagtggtgcatgggcctcaggcctgcctgggtgagggcctgtggggtgggcttcccatggtcagggccaggaccaagcctgggtcacagcatggccttgtccggggggaaccccaggctgggtgcctgttctcctcctggtcctgttaaggggctccttgagcgtggtgagcagaccgggaaccggatggctccagaccagcgtcctgtgggccttccttcttgggatgcttccttcttgggatgcttccttcttgggaatttcagagggtgcctggggctcggacgttcttgcttgatgacaacaaggggtcagaagagggggactcccttgttaccataggcacatgaagggtgggagaggaacccctggattcagtgtgcggttctccctccctctcccccatctctccttccccttctcttattttctctctctttctctgtctctctccctctttccttccctgtatgtctctgtctcagttcctattaagcacgttctgtgtgccaggcatggttctaggttctggggacacagaagtgaatgagacagacaatgttcctcgtggcctccattcgagttggggacacagaagataaaatgaacaaacaagaaaaaaagagtttcccaaaagaagggaaggcaggaagacgtgatggagaggctggcggggtgggtgggcggcacgcagtggtggctggtggggtttcgctgagaggatggtggaggccagtgactctgggggaccatgagctaggggagcgggcatggggcaggtggcaggggtggcagggccagtcccgtagggcaggtggcggtgattctcatgccaggcagtggaagccaggcgggggttttaagcaagagagtgacatgaactgatctaatgctaaaatatactctccatttgtgggtgaaggatagaccagaacgagggcagaatggacactgggtgctccctggagaggtgactgcctgtgtctgagcaagagctattggtggcccggaccagggtggtggctgtgggatggggctgggtttgaggcggatcctggaggttttgctgggaggtggtgcgctggattgcatggtgggaggtggtgcactggattgcgcggtgggaagacggaagggcatggttggaggtattgtcacaatttcaatctggagccacacacctgccgacagtggccccggccttccttaagacctttggctggctgcagcaagcagacgccgtctcgaagcgatggccgtggcactcagatgacaccgcagacgccgtccacagcctccccaggccagccagcctttcctaacccaggtgggcagggaccactggtacggatccccggctgcccctgcctggccgactggaacacactctcaaggaggactccgtgccagtgacccctcttcttcatgcttctgtgcaccaaaagctgaaaaccaggatggagcgactgcccggtgcctgcaaccaccgcgtggggtgcctgctctgcagggctggggctcagggcacccagaggtttggctcctccctggggagcacagaccttggggagggtaaggatccctgtgagtcagggac

SEQ ID NO: 1243977 - DNA, 4001 bp, Homo sapiens
ggaagggcgagatgatgagggctgcgccaggccgcagggagaccaggccatggggcctctcagttcacgctccctggaggcgcctactggaggctctgccatcaggagcacctgggcttctagggtcccctgtgtcatcagtattgcagccttcagaccccacccatgcctggttacaataataaaggagccgtgcatccccctagggacagcagaatccccaggaaccctttgcaccactctgggaccctgccatccgctctttccactacacggggacatcaaggaaggatactagcaatctcttcaaacaggtagcccggacacgggacatcatcatcggacgtccccttcaggagaatcgggagctgaaagggaacaagagcccctaccatgatgaggtgccatttcccacaggggtgaatccgcagccccccaaaggggatggaaacgacccacctctcactgttgacatggccggagagaggactgggaagggatgagaactgtgctactggccacagggaggctgcagcagggtcctctctcaacagtcagggatgaacagcctcggagaagaggcaaatcaatggtggttctccacggaggagctgcgccacttgggttaagaagggacacagcccccagcctccctgcacttaccagcatgtaaggctatttgaaggtacctctcctgtacctacctactgactagcaaagccaaacaaggcccaggcaagccccttttccacacaggggactatgaatcgttccacctccccagaggccggaatggcagagtgacagccgctcagcgtgactagctccatcgctccccgagaaccgactgatgtcgtgtgttttacgttcgcttagcgcagacgtacttatttgtttcatgcttacttactggcacaaagatgtacggtttatagggatgaaaactggaaccacccattcttgcattattcagtatcaggacagaatagagttcaagagtatttaacaggacaagcatgggacccaccgcgtgaggtgccgaagcctttcggtcggaagggccgagatctagtgacaacatacgaaaacgtggacctgaagtgtttcccgaggctgtggacacgcatcactgacactgtttgcccaccacgccctaaggggagctgctgaggtttgcaggtgacagctgacaactgcagaacgcagcacagaacgactatgtcgaaaccttgcactgagagccttgaccaaccctagcgtggcttctggcagcccaaggtcgcgccctgggaccacccagccccctctgaggtccagcccaggaaagctcagggctgacaaaagagggcagtttgctcaggacgacacctgggaactcgccccggcctctacttctcagagggtttactaagaggggcttacaatggtgcgtccttctctgtcccttcgagacgtctgtgttctctgcaacccaggggtgcctctccaggaccggagtcctctgaaacgccaccgtcagggaggacggcgggctgccagcccacctgggcgccagcagcacggacacagcggctccacgtccaccgggtccgccgctccttccctcccgtcggaggccactgaatgctggccgaggcctgttcgttcccccagggtctggctgtgcccatcgcccttgcgctcggcgggtccggcttggaaggcccggcttggaaggccccgggacggcgcggcgggcgggcagctcaggggcgtcggcgcgggcgaaggggccaggagcagctacccggcgcggagacgcaaggtcaatggctccggcccggggcgagtccggggaatgcggcgctcgagaggagccgtgggaccggggcccgggcggaccgccctcactcacccggtgtagaaagctcaggcggtcccgtagcggcggcgcggcagccatgatccaggtcccctcccggtctgccccgcttccgccaggcccgggccctccaatcactgcgcgggtctgggtccgccggccaatccctcacggtagggcgggccctgaggttggcttcgtaaacaattggagcctaggccaatccgaagtcccagagcacagacagactaggacaagagccaattgcgggggctcgaggccaggcaaagcctggccaattaagaagttcaggaaaggttatgggcggaagcgccgacctatcaagctgtttgacaccggaagaggacggacctaagatggcggcctccagggggctgggaatagccgctcatgtcggctaacggagcggtgtggggccgcgtgcgaagccgcctccgcgccttccccgagcggctggccgcctgcggggccgaggtgaggagccgcgggcgggccagtgctgcggggcaggaggagccgcgcggggaggtggctgggagggaggacggtgacggggtcaggggaccccacgacccacgcccgtcctttccgcaggccgcggcgtacggcaggtgcgtgcaggcctccacggccccgggcggccgcctgagtaaggacttctgcgcgcgggagttcgaggccctgcggagctgcttcgccgctgcggtaggtgggcgcgggccccttccccccttcccagcccttcccctccaagagccagcgggccccggctttcctttgctttcccgttggttcaaggtttgagcgcctgccgcgtgctttagacgccggctgacaaaatcaccgagccatcgacgagcccgcgaaacctcggccgtcctgggcttgtccctgcatgtttgtaaagcgggactggcaccaacctcagaaaggatgggagatgtgtgcaaaaaagcgccttgtaaaacgcgtaagctttcgtgttagcactgccgccggggggtgtcatgccaggattgacccaacacaggactcccggaaagtgcccagcaccttccgggtcttcacctccctggcacttgcagcccctgtgcacctgcagtggtggattccttcagcacgtgtcctgcggggaacccccagccaccctcacaactggcacgatagggcttcttgcccgtggggctttaagtcattctgaggctggttccctaagtgtcagccgcaccgggtaccacctcagtgtatctgggtaggccttgatgccagtgctgactctgtttactgggagctgttaatccggagatttggaccagagaaagggtatttgaacaagagttccacggccttcatccctacccggccccagcagccttggatccaggggtggacaactcatcagaagttgcactttttgctgggtgtggtggcgcgtgcctgtaatcctaccgctttgggaggctgaggtgggtggattgcttaggcctagaagtttgagaccagcctgggcaacatatggagaccccgtctctacaaaaaaaaagaaaaaaaaaattagccaggcatggtggtgtagtcccagttacttgggaggctgaggtgggaagatcacttgaacctgggaggtggaggttgcagtgagccgagatcacgctgctgtactccagcctaggcaacaaagtgagactgcatctcaaaaaaaaaaaaagggggggggctcctgctttccctctatgagagcttgagaccaaatgtggcatctcgtgggggctcagaggagggggcagcagtgagttctgtgatagtgtcatgaggcccttgtcccgtggacaagtgacccagagaacctgcccatggggccccaggctccaaccagtcgagcccccaccatatgccagcacccaagttctctgtaaggtatttggtagaacacaacgtgtggtgtggtagcttgcttttgaggcgtatctaacttggaagcaagccattcagacaaaacactttatcttgcaggccaagaagacgctggagggaggctgttaggagggactctgagcttcacacctgtctgctgccatgggtgcagagccctagtcctgatggcccctggtggcacata

SEQ ID NO: 1243978 - DNA, 4001 bp, Homo sapiens
gagttcgagaccagcctggccaacgtggcgaaatcccgtctctactaaaaatacaaagattagccgggcgtggtggatggcgtgcgcctgtaatcccagctactccggaggctgaggcaggagaatcgcttgaacccaggaggcggaggtttcggtgagccgagatcgtgccactgcactctagcctgggtgacagagactccgtctcaaaaaaataaataaataaaaaatttaaaagtttaggtgcgcttccccaacacaatcacttgtcccaaaaacaagcaccgaacaagtaccattcagaagcaaattgtagtcccttttgatgttcatttaaatacagatgaaaacttaattatcaatgctaactcaatcactgctgtgccagattcagcataagattttgtcagcacctaaaattctgtatctagagctacaagaggcacgttttctgccaaatcttcgttatattacataatgagaggaagcttggattcttaaaattcaccttttcccatcattttaacaccctgttccaatcccttctttcacaggatattttctggaggtgaaaaggaataactcattacttctcatattttcctgcccactttcttgcataaatattaaaaataaaggggaaggtagggtcctgaacatctccctaaaagataaaaaagttattaaatgtggtaaacagagcctggagacctagcttctagttctgcactgacacagtatcactgcgtgaccttgggcaaattactgcagttctgggcctcagtttccctcatctgaaccctaatgatggttaagccctctccgctcttaaagcacagattttagatacgtccccagggaagcacaactgtgaaggagtcgcccagacggactccttgggcggagaaacggccttccacaagctccggcggggggattcacagggagctcaagctgccccagggaaagccactgggcaaacttcaggtcgcaaacaaaaacctgttggcaccgactcctctagcaaaggccagcctcccaacgcgctcggctctcggctctaggggagccgccccacagggagagagaggaagtctctcctggaagaggccagaccccacgcacccattcacccacccggatcagccgagcaggaccgccgggccgggtgggtctctgccatcccacgcggaacaaaaggcagctggagcctggctcttccgcccccgtccccgctgttccgtgggagtgggggctggggagtggggagcctggtccccaaggacggaagggggccctgctacagcccccaggaaaggtgagacgggcgggatcccggacagagataaggacccctcccccgattcccggagggcgcccggaccgggctctgcacgggggctggcgggagaccaggctgggctcaggaggaaggggcgccgggctcggggagaggaggaacgtgctctggggagggggcggggttgttccaagatgaacggggctccaggatccgaggtaggagtaaggggcgccctggactctggggacataaaaggagatgctcggtgatagggacgggtaaggggggagatccttgcagcggaaagctggatccagatgggaagggggccatgctccagtccgtggggcggggcctggttggaaagaaggggatcccccagagcctggcgtagggaccagcggggcggcaggggcgcatgccctggcggggctggtgaggtaggggagcctgtgctctgggggcgtccgcgccctggagagggggagggtcctcgccccggggactcgctctggccttggagccccacgggctgtggctcacctctgctcctccgggccggcgtgggtgcgccgctgcggccaccggcagcgctcgagaggcgggagcgaccgtagcccgcggagccgccgccaccgccgcgtctggctcagtttgacacccacacaccagccaacatggcggccgggagggggcgcgccggacgcgtgcgcgcgccctcaggccccgcccccgaggccccgaggtcccgcccccacgcccgcagaccacgcccctgcgaccccgccagagcccctccctagtggcccctgcgcggcttcccctccgcctcctgcgctccaggaccccacgcggacgacccacccttccgcagcgccccacagtcgacgcccgagcccccaaaaaacccccaatcccgagcgccacacaaaccctggcaaattaatacccgaacgcgcgcactctaatccccttcaggccactccaccccgtacacactcacggcccccccacactcacggccgggcagcacgcgcagaccccgccccgtcaagcagaaactcacgctccggcctgccggtttcactcaaaaaccttgttcagtaggagagactggaagggggccagggcctgccgggcgctggtagggttgggttcttaggctacaagtgtgttcactttatgaagatgcgcggaagtacactttggatttgtgcgcttttccgtgcgtgtatttcacgtcaataaaatatactcaaaaacggagaagtctctaggcttctttaggctgctcaaggggttacctaagggcacgaatggcaaggggttacctacatggcacgaaaacggaaacccttgactggcgggcacccacaaagcacctcctctgtgccaagccctgtgctgggcacagaaatgagacagccccaaatgcctcgaatgagagtcccggaactggaggggccagaactggaggctgcacctcaaagctgactaacctgctccaatcagggtgggagtcagcagagacttctcacagcaggggcgcggagcatgagtcagggcttgctaggtgggcagagggcaccatccctgttgcctgggtgacatcaacactctgcctagccttggcttcagggaagctgtggccagaagtcttcctctgccctaactcactgagggaccttaaacaagtcactgtacttctctgagcctcagattcctcctccctgtacaggaaccaggggatgaaagtatcccttaaggttctaacaacccaggatctggaattccattctctggcaaaaaaaaaaaaggttgtatctttccaggaattcatctatttattgtaagttttttagtgtgtgtgcatagacgtgttcataatagtttttgagggcttttttgtgtttgtatggggtcggtggtaatgtcctctttgccctttctgattatgtttacttgtatcttctcttttttctttattagtctagctagtgatacaataaatacgataaaaatggagagagcttgtaacacgtttgcaaaaccacatagccacttttcctttgaaaagtcaaacactggtagctctagatgctagaaacactctccagttaaccacccttcccactgcttggtgccccttctccaccagcagagggaattatgccctatgtgcctgccttgcagcagaagccggagctccccgttttgaacttggtccaccctcatcccagagaatgccctcaaccagtccaacattccttgtgagcctcacctctttaccccatctccaaggaaagcagaactttacactgcaatcatgcttctgccctgagtttacaatgtcagatgagttataacacagagctgatgcacagcacgggcgtgatgcttctaaatcagcactgttcagcagaatttccctccacgatggaaatgttctttctgcgtgctgtccgtaggatagctacgagtcacaggaggccagcgagcacttgaaatgtggctagtgagactgaggggctgaattttttaaacttcattaaacttttattaatttaaatgtaaatagccatatgtggctagatgctaccatgctgaccagtgctggtctaaaaccttaccacaattccacaagtgcacattctttttttatttatttgttttgagacggagtctcactctattgccc

SEQ ID NO: 1243979 - DNA, 4001 bp, Homo sapiens
gaggtggagagtgcctggcccacagcgcagcctaccttttgtctgctatctctttccttccagcgggtcgtgggccttctgtgggaatgccacggccacaacttgtttaactcctgccctcccccttgctagtgactcagacctgccttcacctccccaacccgtggctgggggtggcagagtcaagatgggaaataatgtgcaccaaagcccgcccagcacacgcccctaccggctggccgctggaactagcagaaccagtcgggcactgtgactgcaccagagccctacctggacctggctgccctggccctccggcctggcctgtgtgggggcaccagcctctgggaggggactctcggtgtgggcccagcggccctgcctggacctttctcacagaaggtgggcattctctgcacacccctgcaggggctggggggaagggcggggccagaaacatggggaggcaccttgattttccttctctggagtttgaggggacaaggtgaggctgcccaagcacagagaagggaggaggaaaggaagaagcctgcccaagcgcagagaagggaggaggaaaggaagaagcctgcccaagcgcagagaagggaggaggaaaggaaggaacgcgggaacgcgggagggagcagctgggagcgctgccagcagtgttacaagcaaagggttttatcgaacacgatatgcccagaaataaaagggagtgtaacagaaacccagcggccgataaggcggtggcggtagcagcagcagccctgggcagctgggtatggaattactgcagtgaccttgagccagaccctgtcaggtggagggaagggcacagagagggcagggcctgagaattcagagatgacgagagggcagaggagggaggaagctgaggggatgggagcagggccagcaggcggtgggatgggccacggggcacggagtatcagctctctcctgcatacagggtcccaaggagaactgcgcagtagggaggggctgctcttctcagggcctgcaggatggggggatctggagagtttcccaaaagtcaggaccgaaaaatgcagatcgctcatccccagcaagggtttcggagagatggagagaacccagatctgtccagtcacacgtgcatgagtttgcgtaaagtctgtgcacccaccagcccagcccacaccctcttcccgtcctctgctaaggtgggctccagcccctgcctccaagtcagatccagcctgagcagtggggaatgacagtgcccttcttgatgctgtaagggacagggggtgagcttgaactctaagcttctggccactgtaatagctgcatcccgggagcacagaagatgggggaggggggactgccctgaggctagaggtgtgcatgaggggctgaagaagaggaaacagcagagatgtgcagaaggagtctgtggggaatgccaccaaagatgctaagatgccaccaaagatgctaagtcccaggatggttggggagggggccctgagtccctttttgggggcggcagggagggaggggtggcaggaaagaagcctttaggtcctctacagctcagccttctccctcgcacctggaaaagagactaagccccagaaccactgtttgctccccaccaacccccgccttccatgccgccactgccagggagggggccagggaggaagcttacctccagtgcgggctccctcggccccagccccagcccgagtagcctctgcggtgaccctccgacctgtgcagcagcgggacggcacagcctcgggagcgtctccagagccatccaccatggaccctcgtcccagagacccacctgctcccaggaggtgcagacccctcagaggggcagcggcagggtccctggaatgggtagcagctcttcccgcgtgcgtttgcctcctagccagcgccaggcagcactccgaggaaagttgctcagctggcccggcaggtctgcctcagcagtaacaggacacaggaggaagtgcagggcaggttaaccccttcctgctggccaggcaagtggtgcattgagaggtggggggcctgcctgttggccgcccccaggaagtgcacatctggagccagtgctggcgacctgatcccctctgctttgagttaacccttcccctgcctcttcaacaggaaaggaggggggctccaacacccccaccacacccctccccttcctcctctgggccgggaggacattaaaggagagggcagggacattccctggggctggctctttggtggagcccccgtcttctcgtcttcttggggaggagagcatcaggactccagcacagccccctccctgcctttcccacacggagtcagatccttctgtccatcctccccctcctgcatctcagctggaggatgcctgaggcccacttaaggatgcccacccacccaaaaaccaaagttgttcttcaaactctgggagcctggagtgctcttcacacagggagcccagccccaaatggttatgactgacagaagacaatgaggggcctgagtttgagctgacaatacctttttttctgagagccatttctagcctgtttcatgttcccctgagcaagggaggtagcatgaagatcagcagctgtttttaaggcagaaagatggctcaaggccagatagtttgagatgaggagggggataaggcagactagaccccgaaataacaaggtgatgtggcctctagagctgaagaggtgtggtgagcatgatcttcagggactgaattggggccctgggacccagctgaagaggggagatggcagggagccaggtcccatgggtctagttctactcctcatctcacactttgtcatacttggtgatgacacttcgggaagacctggctccaggaagcacgaccctgaaagtgtgggccaaggaagccagaggcagggactaccagaggtgacacactgtcctgtcacctgactccttgtcttgctaccaatctgctcctctgcttggcatcccacacatcacttccccagctatgtctgtctgtcctcctgcaggagggctctggcagctggcaggaggggatctgagggcaggtggaacatgggaggacctggatcaggagctgacctagccaagatccatcatgcaagacacagaggcacacggaagtagtagaaacttgaaggttctttattgatttatttattaacccgttttccagaaggttgcttgggcccgagagtcacctgcagaggcgcaaagcctcctcgacattctttatggggctgagctcatcagccaggaccatcaggtcagtcaccagggtgtccagcagcccacggacctggaagaacgggacaacatcacaggcagagtttactctgtgggaagcacctatatatgaactatgctgtgagagaatagctggagaggggaaagaaaccagttgtttgtgaaagaatttcacaagttcaaagttcttgtgaaataatttttggttttgcagattttttttttttttgacaggatctcactctgtcacccaggctggagtccagtggtgtgatcatggctcactgcagccttgacttccctggctcaggtgattctcccatctcagcctcccaagtagctgggactacaggcgtgcaccaccagacctggctacttttttctattttttgtagagatggggtttcaccacattgcccaggctagtctcgaactcctgggctcaagcaatccacctgcttttgcagttttacttttcaaaccagtctggggaggtggccctgcgctggtacctttgacatatggagatactagagctaagttgttcaaggggcaactccagggagcccatggagcggtgcccatttagccgtttggggtgggcctgggctcagccccagttctactctggcctcctggaggccaattttccttcctgtatccacagactgaaaggtctctgggactgaccc

SEQ ID NO: 1243980 - DNA, 4001 bp, Homo sapiens
taggttgactggctcagacctcaccagctctcccagaggggaagggagatcaaatagatagatcaatttgtacactgatagctaaccagatgatagcacggattcacaggtgcatgggctggttgccaggtgatggataatacacgtagggagtacggggtcagcagatggaagggtggatagaagaaaattaattaatagatgttgatagatgggtagatgatagactgctctatcgatatatcaatagaaaactgatgagttgataaatgtgaaatagatcaatagataaagccagattaaggtatagagctgtttatatttagcaagactttgacactaattttctcagaaaaaaccgtacaacaccgtaatggttagcatgaatagatcatgtcctctatagctatttataccaaggacttcaatatccacacaggctctacgaggtaggttttagggccattttacagatgaggaaactaagcctcagaaagctgtgttatttgcctcaagtcactgcactggtcagtggaagggcctgggttcaagccctgcctgcgtgactctgggctgtgttttactccccgcatttaagagatcaagcaacctcccaaaccctcagccccaactcacaagagggagaaggaagccattgcgcctcctgctgggggtccagccgaaggggagcgacagcccatcctcatactcggcgggcagccagcgagccagagcctggttggaggcccctagcaagggtctcctcctgcagccatgggtgggataggttagcagggggcagggcctggagatggctcagcatggagggagagggtgggtgcaggaagggagaggtcccccaggcaggggcagcccctcctgccgccccgcacgcacttgttgttgcaccgtccagtgatggtgcggtacttgtcgctgcagcgctcggcctggtcccggagagcacagccactggcctgggacagcagccgcagctgtggttctgttagcacatctgtgggaaggcaaatgggcagacctgagctggcctgctctgtacctcccatccctttaccctctctcctcccagcaccccaaacctgtgcaccctgcctccctctcctggattccttctactccaggccagggtaggcccagcgggctcagtggggatcagagtaccagtgacattgaagggtccggaccgctggggttgtaacttctcttcaagcagccccaaagccacatgcatataatctgcggcccgaacaactgtcctggtggctgctaccggttgtttgaagtaggacaggaggtccatggggctggctgaaccgctgcgaagccgctgcttgatgctgcccaggagaggaggagtgagggctggagagagggtgcagacccacccagcagagacccagtcctggggcacagtcaggacagggcaagcggacagaaggatggatggaagggaggctctaccaacaggaaatgttcatggggtccagaggtggctgatgagtgagatgaacttggctggggcccatgcccctcactgatcctcccaggcccatgcagcccccagacccaagtccacctcttctgggtccaattgtaggcagcatccaccagcaacttggcctctgctatgcagtctcgcaggaccgaggtctccactgccccaggggaggctgttcaaagagatggggactcagggttcagcaagccacaagaccccctccaagacccaagtgcttccccttccatttcccctccctcctccttgcctgtctaggggactattacctgggtcagtgccctcacagggctgggcgaggacgagtgtggccaggacccctgccagggctgggagcagatgcatctctgcagcgaggcttcaccagctgggaagtgagtgacatccacagcctgcacgggaggatcctctgctcccctctcactttgaggacccccagccgacctctcacttcctccagctcttctctggacgtagctgggaagggacttttatagcccattctagggtgggggagggcagctctgggccctagaaacccagcctcttgggtggagttctgaaacttctctctggttttcatgggagttttgagactgaaaccccccaccccacctcctaccagcctggggacattcttcctgcctacccttcactccatccctaccctctactaccaagcccactgatgcacttctcccagggcccagagcagcacctgggacacaggtgtcgctcaatggatatttgttggctgacaggagcggtgcacctcagtcgccaccgcctggctgcatggccttgggcaagccactttccctctccaggcctcagttttcacatccctagaatgagagttgggccagatgattggaagggtgcctctcctcctgcaacagggcagaaactgaatctgccttactgttatacacaccccccatacccagctcaaagcccagcatttagtatgtgcttagcaggtgtttgttgagtgaatgaatgatctgtgatgaatgatttggcccctctccttatcccctagccctactcactccctccaaggtgccagggagagtgtgaggctgtgactgaggcagggcctggcagtgaaatccctcatggggccattttggggacatggcgagatgtcacaggtaaaacacccagcccagtgagctgctgcagagcctaaaagtaagcgcccgccatgggctttattctcttggagtttcttaggtgccaatcagtagtaggtttactctgagaagtagatttcaattatgagttcctattgggcttggtgagaagtagcttctttagaggcagtgtgctgcaccagggtctgattggcctggattgaatccagccctgtcactagcttcgtgaccttgggtgagcctccatttccaccttaagtgcgcctccatttccaccttaagtgcagagtgcatcccagtcggccttctgccagggcccaccctctctgcacctaagccttcctcctgtagttccctgccctggatgagccaggttcatcctttgcctctgacctcatcccggctgcctggagagcacatgctcatccctgagacagttccagagtcaccaccactgtggccagcagcctgcgtgtcctcgccccttcttcaggaggacacgtccattccttcttcagtgtggaccccgtgcctgctccagactcccagggaggctgttccaagtgtcctttctcctcccccacccccacaccctaccgaaaccctgcccggtgccttccacagcctcctcctcccacagcaatgttaccagcccaaccgttgctcttgaaacaaccacctctcttcggcaacccctttcacaagctccagttgatggcctgagccctcctaatcttatctccttatctttagcggaggcccctctcctgtgacggggggcctgggtagaagtcactgtgtaggagctgaaagcacactgggttccttgatgctgacccactgagtgactgggtaaatcacacccctccatggacctgtttccaaacctgtgagatggggacagggagcctcatggaggagagagattatataaatcacacagcactcctcagctgtgtgtcacctcccggccctcagggagccaggtgctccccgggtggagccaggtggaatgcatgtaccccaggttggagctggatggggtgtatgtaccacagcttggagccagggtggggtgtatataacccaggttggagttggagtagggtgtatgtaccctaggttggagccagggtggggtgtatgtaccatagcttggagccagagtagggtgtatgtaacccaggttggagttggggtgggctgtatgtaccctaggttggaggcagggtggggtgcatgtaccccaggttggagttggggtggggtgtatgtaacccaggatagaattggggtgggatgtatgt

SEQ ID NO: 1243981 - DNA, 4001 bp, Homo sapiens
gaaaccccctttcctggccaggcgcagtggctcacacctgtaatcccagcactttgggatgctgaggcaggcggatcacgcggtcaggagatcgagaccatcctggctaacacagtgagaccccatctctactaaaaatacaaaaaattagctgggtgtggtggcaggcgcctgtagtcccagctactcaggaggctgaggcaggagaatggcgtcaacctgggaggtggagcttgcagtgagccaagatcgcgtcactgcactccagcctgggagacagagtgagactccatctcaaaaaaaaaaaaaaagaaaaagaaaagaaaccccctttcctcacataaatgaatgtgaccatcattttcttcaaggctgatggtaagggagaccctcttagcttcaccctctgtcctgtttcaaggactccctttgtaggtacccaccacctgggtctccttctctgtgatgacccccagagcttggcagcgagtagtatgcaccttcctggaaacagggaacacctgccaggaacaaaggagtctcagtgaggtcccagatccctccaagaccatccttgaaggcatggcaagaagtaaaagatgtaaagggtaggatggtcaagggtgtagcatacctttcggcccagtagctggttggagagtgttgacttccctgcattcggggctcccaggaggaccactcgtaggacccgggaattctcaggcatatcagggtgatggaccaagaggacatcctgctcatctatgtgcaagtgggaagaagcatgagacacagtggaatctggatttcctgtcaagtgcttgttcctgcccacccacaaagggagcaggggtacaaaattagtgcaccaggttgaagtcacctagagctgactttgagactttggcccttaatttacattaatttataaagtaactccctgagccctttagttttctcatatgtaaaagtgagttgatattaacagtacctacttaccagcttataatttttttgatgactagcaattgtgtaaaacaactcagcacaatacctggcacttaataattactgcatgtaattataatgtatagctgtgcctgagaagtgaatgtacatgaaagcaagctggattacacaaagccagatatttcctcagctctcattctctcaccctactaagggtgctatgaaggccctgcaagctttcccagtctttttttttttttttcctgaaggagggacgggaggaagggctaagggtcaagaagggagagggcccagtctttttatattatcttcttatgacaccattttgcaatgaccagtttgtgtccagtctccaataccggacactgtttgaagaataaagtgtgctgttttccaggtgtaactgtgtcttaacaagaagatgaggcccaacatgcatttactggatcaaatttgcttcccatgtcggggtgcagagccatagttccactttgtggcccttcaatctcatgctctttagtgagcgtctctggttgtgaccagatcgtttccttctcccactcaaactgttatttctctcctgagagatttttcactgctcctccctgtcagggcctcaaaattgttttctataaaatagaatcaaagacagtatccccagaaacctttcaatactaaaaacatgacagttccgagcaaacctatcagggcgctttacctctgttcatggacaccgcggggacgcaaggagtcaccgaactgtcgggctgagagaatccgaggaagtggtccagggcagagccctggccattactgcgagaagccgaggccaagcggggaccagagaaagcggaccccgcgacgcaggacacgcacctccgttggaagcctaagagtgaggaaaaagggatcacccgctccctcgcgacatgagggcccacctgccagactcttaacaccgattgaacaagcctagccccgcgccagctgggggcagccattacagccgcaaggcactgcgggaaccgaccaggagcgctcctacgattgaacagagcggctgacgaaccagcgagtaggagagaggtaggtctgcccaaattgaaagccgagacacatgggatgtgggcgggaggaggaattgctctggagactggtggaggctaaggaaaggggaaaatgtgtatttagagtctgtgcaagcatgacggtagttttggactcccatacacaacgtatttttttcttctgccaaagttttgtaaacggcccttctggccatgtctcctaaaagactacatttcccatgaggccaaatagcagaaatcgtcctcccatcgagggaggaatggttgtgggagtgggagggggcactgttccgcctgtccccgtaagggttttgttgttgtttgttcctagtcctttccatcctttggcctgcaggatcctctcccagccttaatttggcttgccctagaggtcagcggtggccccgggctgtctgcacctttgctttaggctaggttcctggaaggagtggtccttgggtcggtgtttgggatgaagagcaggtctggatttccctcctgtaagccttggctactgtctactatctgaggtcattcctttatggagaacaaccagagggtttgcaaaggaggaagaagtggcttagccacctaaggtctcctagaccgctctagcagccggagaaactcatttaccttgctctgtttgaggccttgagccctcttcatcctttgtagcctctaaatcaaacacttgaaacagagagctgggcgcggtggctcacgcctgtaatcccagcactttgggaggccgaggcgggcggatcacgaggtcaggagatcgagaccatcctggctaatacggtgaaacccggtctctactaaaaatacaaaaaattagccgggcgtggtggcgggcgcctgtagtcccagctactcaggaggctgaggcaggagaatggcgtgaacctgggaggcggagcttgcagtgagctgagattgcaccactgcactccagcctgggcgatagagcgagactccatctcaaaaaaaaaaaaaaaaaaaagaaacagagataaactttggtagagggggtgttgaggaaggaaggttcttagagtcagtgctcattctgtcacccaggctggagtgcagtggcatgatcatagctcactggagcctgaaactcttgggttcaagcgatcttccagtttcagccctcttgagtagctaggactacaggcacatgctaacatgcctgactatggaggaagatgtataaagcatccactagcaagctctgtcctgtgctgggaatacatcagtgaacaaaacagacagaaatctctatcacgggatttcagggaccccatctctaaaataacaatagcaacaaaaatacaacacaatacagtataacaactatttatatagcacttacattgtattagatattataagtaatctagagactttaagatgacttaaagtcatctcttactacaagagaatcagcagattttggtatccataggatgggagggtggaaattatggtatctaaattccctgggaagacaccactgtatattctggctatcctcaatttctcttctcccattctttcttttatttttatttttttgagacagggtcttgctctctcacccagactggagtgcagtggtgcaatcatggctcactacagcctcgacctcccagtctcaagcgttcctcccacctcagccctgctagtagctgtgactacagacctgccgctgccatgcctagtaattcttttttttttttttttttgagacagagtttcactcttgttgcccaggcttcagtgcaatggtgcaatcttggctcactgcaacctctacttcccgggttgaagtgattttcctgcctcagcctcccgagtagctgggatcacaggcatacaccaccatgcccggctaattttgtattttcagtagag

SEQ ID NO: 1243982 - DNA, 4001 bp, Homo sapiens
actaaatgtatataaatgtagcaatatgtcaactattaacagcaattagattgaattatatatatgtatagttatttataaatcttatttaatgtggggcgttactgcatttcagtatgtttgacataatataggatgaggccttcaaaattggaattttctttttctttttttttttttttttgagtttcgctcttgttgcccaggctggagtgcgatggcgcaatcttggctcaccacaacctctgcctccctgggttcaagcgattctcctgcctcagcctcctgagtagctgggattacaggcatgcaccaccacacccaactaattttgtatttttagtagagatggggtttctccatgttggtcaggctggtctcaaactcctaacctcaggtgatccgtccgcctcggcctcccaaagtgctgggattacaggcgtgagccaccacccccagccttacttaggaattttctaaaggggagactccctattttgtcaggatttcatcctctttaatcctaaatgtccatctttatatgaggatcctcataaaaagactcatcccagagtcacagaaaggacaaaatgaaatgaaaaaagaaaaaaaaacagtattgtaaaagaactaatctgtaagatgcaaagtagtattagcactggatttccggtcagctcctggagggctaaggggttgttttgttcatttcagcttctcagtcagtatcagttgggtggtcaactccaggggacactattcatgttatatttaactggaagaatttgccattcacagaaaaggcaatgtgaatgctgctccccagagcaccattcacagaaaatgcaatgtgaatggtgcctcctggagattttgccttgcttagcaaggtgctagagctaaggactcagaaatgtttgttaagtgagtgaatggaatcccaggctacttcttactcattccaacccccaggacgaaaaagaaaagttgacaaggggtgaggagagtgggggaggagaaagggtgatccttagctacaaggcttctatgagattgggtgtgggtcggtgctgatgggagtgcaggggaggtgagcagggagaggatactaaagcaagcgtcctgttcccagggttcctaattttcctagaaatattacttctctccgatctcagtgcagaaccatactgatgattttacagccctggatttgtcaagttcttatgttgatgtatgctgttcattcattaaacagaagaacaaacaaacgcagttagcgcctaccataagccaaattctgtgctggaggtagagtggtgaacaggacagcaaaggttctaccccgcatggggaagcaatcaccctcgggaggtggtacttcaattgcgactagaagaaaaaagaagagtgagtgattcagaccaggccaggcagtcaggaagcttgagggacatagccctctgaagcgggtctggagcaagggagtgagggagaccagtggacaggggccaaatcaggcagggtttgtggagactgtattttacccaaggtaattgggagccagtaaataattttaagaaaaaaaaagtgatatgggcaaattttaatttttcaaaatggagcgcaggttggaagaggcaaaagtagaggcagggagagccattaagaagctactgcggctgtcttggcgacacatgatggtgtctttaaccagggtggtgccagaagagatggagagaagtggatagttacaggtacgtttaggaagtaaaatccgacaggggtggtgacagtaaacagccctacctcaaaaaagatcatggaaaacacttcagtttgctcattaacccatcaggcgtccgccttcccttaaccctatcgcctcgatatatggacacagcagggggacgaggggcggggcaggcgcccacaaaaatccgggaactttaatttaaactgtgtggacttcagcggagagtagaataaagaacacaggaacttccggttactccggaagtggaagcttcatactcctaagctcctcccccggcggcgagccagggagaaaggatggccggcctggcggcgcggttggtcctgctagctggggcagcggcgctggcgagcggctcccagggcgaccgtgagccggtgtaccgcgactgcgtactgcagtgcgaagagcagaactgctctgggggcgctctgaatcacttccgctcccgccagccaatctacatgagtctagcaggtaagccccacccccacggtaagccccgcccatttgtcttgctcccgccccctgcgcccccaatacgcctctgcaatccctgaaccttagtttccccacgaggtctcttatgaatgtgagtgaagcccctaaggtgatgagagccttaccagcctctcttactttcccagaagctttcatttacttatttgttcagtcaaaagggtatttattaaatacattcgggccacaatgtctaggaatggcacagaaatcagaccagggtcccgcccattgggactcacagtccccacggggacatgagccttttcaagtgcaaggcagagaatgatttgagcccctgaaagactctttgattaggaagcatttgggataggaaggtgtcagttccggctttgaagacgtgggggcagggatcatcttggaacgttttgtttgaaggagggactttggactggtacattcgatttggaccatagtgggcaaagaaccaacgtattgagcactcactgtgtgacaggtgtcacaatatgtcaagtaatttttatcacaccctttgagatagtttctctaatcccagttttacagatggggattagagagattaaatgccctgcccaaggtcacacagccagtatgtagtaaagtggagtttccagttctggcctgtttgaccacaagcttgtcctctttactattataccactttgcattccagacagagggaacagagagaatggatgccctgggcagatgtgggcacatccaggagctttatttactcagggagcagggtacatgaacaggagtagtgaccaatacggttggaaaggcaatttggagcctcaaaagtcaggttgaagaatttgggcttcattttcataggaagggagtaagatagcaagaactccttccaggagagtaagagcaaatcctatattcaggaaggacaaatataaacccaggtttccatagatgagttcatcagatgccaacatcttgatggacttgagcaaaaggagaggaaatgtctgccaaggtagaaagatcatctgagccctggagttcaagactagcctaggcaacatgacaagatgccttctctacaaaaaataaaagaattagccagacattgtggtctcgctacttgggaggctgaggtgggaggatcgtttgagcccaggaggtcaaggctgtggtgagccatgctctccccactgcactccagcctggatgaaagagcgagaccctgtctcaaaaaaaaaaaaaaaaaaaaaatgccgggtgcggtggctcgtgcctgcaatccccgcactttaggtggcagaggcaggcagataacctgaggttgggagttcaagaccaccctgaccaacatggagaaaccccatctctactaaaaatacaaaattagttgggtgtggtggtgcatgcctgtaatcccagctactcgggagcctgaggcaggagaatcgcttgaacccaggaggcggaggttgcagtgaaccgagatcgcaccattgcactccagcctgggcaacaaaaacaaaactgtctcaaaaaaacaaacaaaaaaaagacgaatatctctaattgctcactaaaatatgcatacatacgtacatacaccttcccctatgtgtacatctcatcatctctcattcattcaaaggggaagctagaattttgagatttctcctggttctctccaacttacaggccctcttggcctacatttgcgcttggaccc

SEQ ID NO: 1243983 - DNA, 4001 bp, Homo sapiens
gatcaactcccagcccaaggtgaggaagggcagcagctcagcctgacagctcagtatggcctcacccttctcatcagaagatgagaggtgaagatgcttgtctgggaaacagggagggcaaggatgtactccctggaagagaggaaccttcttcctcagcaagaaggcgtggccatagaaggctacctccctctgtttatggcagatctggcccagcaccttaagggagttcctgcagaggacagagttcagcctgtgtccccaagtcagcagagagactgctgtttggcaacacaaagcccagacacacaaatacaaagaccacacaactgaggaacaccctggcgtagacctgcagagataacacggccatgcactcactcacagagggcccctcgggcaacacacagccacgatgacacccactccctccccagaccctctgacctatggagaccacccacgactcccagaacactttcattttgtctcccctgcagcccagtgactcagggagcagtgtccctcattgctccaggtgcactcatccatatagcgatttcgaatgcatggttgggggtcgcactgcctggggtcccatcttgaccccaccacttactagctgctactcaacctctggactgctactcagtccagaatgctggcagaacttccactataggggtgttctaggattaaaggagaatgcatgcaaaacaccacaaacagttcctggcagagtatacctggcccaggctatatgttagcttttatgattaatgcacacaggtggacagatgggtcaggatacacactgcccccactcacccttccccacgcacagcaccaaggaaaaggcagcagaacaacgcagccctccctaggctcccatctggccttatttcttagcttccttctctgggaactctcccactttacaccccaagaaacccacccccacccctccatggtccacgcgctccaaaagtcacagagcacagtccctaagctggccccaagaatctgttcaaagcaaacgtctcccccgcccccaacccagaccccagcaagaggccaccctccgggccaccctttcctccccggctctggttgggacaggttgctatgccaccctccactccaccacacacacacacacccgaccccgccagaagcaggagcaaccaaaccaaaatcgtctgaaggggagcggggaggggctggaggaggggcagggcagaggacccccccaaggaatccagcccaggccagtccggaggcggaggctgccaactggaaaggctttgagaaagcttgagggggctcaagaaggggggaaacgcgcgcgcgcgctctacgcaatacaccctttgcgggaaaactttctgaacaatttcagagaacttctttgacaagttcccggagcccctcggagcctggaaagcgccagtctcttggatgggccatctcgagccgctgccgtgtaactgccccctcccgcccgagggccccagggcccggctgccctgagcgtctcgactgtccacaacttcgggataggagagctcgtccgggcccctctggccccgccggccgcgggacctcggcggggcatccacagggcagggtcccgccgctgctccgtcccctccccacaccagacccaccttgggtgctcgcggctccggggggcaagagggcgaggaggagcccccagcggcacaaggccgccagctccatggtgctcactgcggctccggccccatggctccggctggacccggctgggagggcgcggggcgcggggtgctgcgaggggtgggggccgggcgcgcggcgcagtaaagggccccgtgggaaggggcgcgcggctgcccggggggctcccctggtttctccggtcccaatggaggggaatctcagcttcacaacttcattcttatacttcctcaagcagccctcctcctccacctcctccttctcctgtgattgggagcaagcgcgctcccagctcgccccctccaactgcattccaacaagtctgggagtggcaactcccagcttcactttctccctctcttcgcgcaggcctgggtgcgtccctcctagcgccgggacgcctgggttgcctgcagccgttctcacacttttcctcggagaatccctaaatgcagaggctggtgactctgccccctcccccggagtccgggataaattccctaggctgccactcttaacacccttttaagtctcaggttttatcttaaactttcctggggagcttgcatcctactccatcccaagcctatttgttttaatatcaaataatggttttcccaccacatcctctagtaaaattgatagtcaaggagggggatgtgttgtgtttaccttgtggcttccaggacccccggggcatatcttctggaatctttgaagtatctgaaaagcatgatcttaagagggtctacaaatttgggaggagacagtcacatcgaaaggacttttttttttttttaaacgaacttttgctcttgttgcccaggctggagagcaatggcgcgatctctgctcaccacaacctctgcctccctggttcaagtgattctcctgcctcagcctcccgagcagctgggattacaggcatgtgccaccatgaccagctaattttttgtatttttagtaaagacagggtttctccacgttggtgaggctggtcttgaactcccaacctcaggtgatcctcccgcctcagcctcccaaagtgctggaattacaaccacgagcaactgcacccagcccaaaaagacttctatctcaattcttcaaaatgcacccttcttgcttatttaaggaggcacccagcacccaatgcattcaaggtttcttctttgccccttgccttctattagcctgcttaattccacttctcaaccacattctatttggagcccctgaccctattccttaggcctagtggtaggggtggggatggaaggaagacttttttttttttttttaatttcaacaagatattgcatgggacatatttatactaacaaattattcattgtttatctgaaattcaaatttaactgggcctccttatttttatgtgctaaatttggcagttctagttggaatgccccagccaagaatgcagctatactggtcaagaagggatcaaaggcacctatcagggactggagaatgaaggacaccagcatctctttctctcttccctcccccccatctcccacacctctttacaggtatacacttgcatttctaaacttgcttccatgtgctgagcacacttaaagcaggcacctcttgtgggacaggttgctatgccatcctagggagttgagaaacaggggcctctgggaccaagaggacctgggttcaaatcttgaatctggccagtcgcggtggctcacacctgtaattccagcactttgggaggccgaggcaggcagatcacgaggtcaggagatcgagaccatcctggctaacacggtgaaaccctgtctctgctaaaaatacaaaaaattagccaggtgtggtggcgggtgcctgtagtcccagctactcaggaggctgaggcaggagaatggcgtgaacctgggaggcagagcttgcagtgagctgagattgcgcctctgcactccagcctgggagacagagtgagactccgtgtcaaaaaaaaaaaaaaaaatcttgactctattccatatcagtcatgtcaccttgggcaagtgactgagcatctctggtctcagttggctcatctgtaaaacagcatctgacatactatgctggggttaaaggagataatgctctggaagcactcagcgcaatacttggcacataataattgctcaataaatggtcccagatttagttatactggggcagatctaggttttgtggggcctgaagcttatataatttgggaaactctctttaagaaagtaatacaaagttggccgagtatggcg

SEQ ID NO: 1243984 - DNA, 4001 bp, Homo sapiens
cgctaccacgcccggctaatttttttttttttttttttttgtatgtttagtagagacaaggtttcaccatgttggccaggctggtctcaaactcctgacctcaagtgatccacccacctcagcctcccaaagtgctgggattacaggcatgagccaccgggcccggcctgacctttcacctaaatatagttacgctaaactataaccttttgataagggtctggaatattttatcatgaactctgagaagtttggatttctaaatacaaattggaaatatttacacgaactgaaactatagttccaactacagctaaatcgttatttttggctctttagcctaagttattcaataaccaaacactagaatccagtgacaaagtagcaaaaggaaagatgtggcaaaggaaaccattatacacctatcccttgacgttatgaaatgatcgaattcatgtcaaacatttggtcattctgcttataccttcgtttgtgaacagatgccaggcagtagttaccaatccaaggtgaggtgctcaagttcaaaacctgaccttagttgtaaaagtggggtttttatttgaaagaaaaacttaacttccacaagttctattataaagagtctacaaattttcctttatttaaaaaaaaaaaccctgaatttgaaaaaggcaaccttatttatttacttctcctgtttccaaattcttgttactccaagagtacagacagttatttacctaaaatgcaaaacctccaaagagttcacacggtggctggcactcaggcacacacatgtcagtgctctactgggacacctggtacatgatatccctattaaagagtacacagtacctttaaagaggtcattaaacagaacacggacaaatttgccacgctcacatcctgaacaatacattttgtgaaaaacattcgctaatttaggttcttccaaccagaagaaaaaaaaaagccaagtctcccacaaagtgcccccaaatccacagctgagtgaaggtcataaagagttaaatgaatgtaaaccaggccctatcattcgtctcctccagaaaaagatgaaaagacatttctgatggccccaggtgctctcccacgaggagacagtctttcatttgaggttctgaagcggcctcacctcgaacccatgcgggatcttccaagagtgcaattcccacagctccacttgctcaaggaagtctcggtgcacagaaggaagcctgcagcctcccagtaccaagaaaccggcagggcaagtggcagaagccagctctcgggtgagagtccttactccctgttgcattcgttccccaaagttttcgaatttttaaaaagttcaaacaaggattcgaagcgcaggacagacccttcccctggatcccaacgccctttcggctcctccgcggcccccgccaggcagcgccggcgcccgcccgcgaggaggagggtcccgcaggtgggcggcctcctcaggccggggccttctgggacccccaagtgccgtgcaggacgccacgaagttgcgcccgagcccgcggggtccggggagccgctgcccgtgacagccgcgctggcttgggaggctcttcgggcggccgacgcctcggtggggccgcgactcccgtcagggaagctctcccggcccggtgccgcctcctacgcccggcccgagcctcccacggctgggctcacggggcatctggccgccgccgtcgcgctcccagctcggactccagccccggcgccgcgacgctgccccggccccgacccggccgtcgcgagctgtcctccaccccacgctccccggtcactcaccccgaggccgggcagcagcagcgtcagcagcagcagcagccgccgggccggcatggcgaggactcggccctggctccgggggcggtacggacagaggacggggcgggggcgccgcgacgacagcgaggcggtgaccgagcctcagcggacgcagaactgactaggcagcggcggcacccccattcccggccctataagcgctgggtgccgcggcttcttccggtcggggcggagttgcgggcggggacggggcggggccaatctaggggcgtgttcggggcggagatgggggcgggccgagggcgtgccccgggcggggatgtgggaggggctggctcggggcggggccgaaggcggtgctggcatctggctggcttcgctcatgaggcgtcggcggctgtaaaggaccaggcctcggcatccagcgtctgggggcgctgggggatcgaggcgcgaagcttgtctgtggctgggaaagaccggcaatgccccaccaggccgtcccattaaccctgccgagggacctgccgcgtcagacttcatcggggaaaagggcgggacacgggcggtcccgggtgcctagaagcctccttttcgtctttccgccgtggtggaatcatccgcaaggtttaccgaggcgacctccggagcgaaggtttcagcagctaccggaggcttccagcaaacacggcgcagctgccccgcgcggcagtcgcagtgttcacagccctagggttctccagctgtgcctcgtcttctctggggcccctttcttccttttccttgccctcaggaattcccctcaagtcatatccaccagccatcacttccgcttggaatgaaccacggccaagtcactcaccaaaaattataaggaggaaaccatttcggccacttgtgtcacgtgcgttgatgtgacacgtgtggatgtgaagtttgagatggtctgcgtcacaactcgttggagggagtgggtgggttgaggcctcctgcaaggtctatgtgagggtgtggagtactaattagagttaaagagctcggcagctgtttggtcactggcactggcctccactgagagggacatgggtagggaggacacgtcttttgcaaggaaagacagtaaactgagatttggagcccagggaaaggtatctaacttatcctaggagaaaaagaaaacggctatgaaattctctaatttttcctgacttgcttatatgagagcctaagatttttcaggtttgaaggaaaagaataagcactcctagacaaaacaacaaagtagtagtgggggactggccaaatgtccagtctgtgtgcattgtggtcaatcttatccaactaaaacagaccaaaatgacagtaagcccaaatcctgcaaatagagctccccattcctaaccccctaggcctggattacagtgaagggactaagtcctaccgcatgctggagactccaacacatctctgtaagagtgggaagaatcttggcaactgtgaaaacagtagagacattttgaaaagtgttacctgaatgtctaaatgcaaacagaggtttgggattggcagagagatgtactgagaggcccagcactcctgagcagtatagccgggcttccagggaggcctacagccctgaaactgggaggagctctttatttcttgaccttttatcttttctttttagagatgaggtctcacggtgttgcccaggctgctctcaaactcctgggctcaagagatcctccccagtagctgggacttcaggtgtgccccacgacacctggcttgggaggacctctttagtgattacctgtccagtttgccagctgacaacagcatctgttagaccctgtatacttgacttaaaagagaagcttgactgaaaaatgtcactttcacatccccccctctggtgctttttctcaaacagagtaagtctaggaggggaaaatttgctgtactggaactctggcagcccttttacaattcaaaatgtcactgtgaccctgtaacatcagcagatgaaacacaaaggggaatgctgacctcaatttcactcataaatcagttttaaagatcgtagaaagaaaaaaaatctgttccaagaagcctggacagttaggtattatttatcttacactcagttggaccaaatccccagggct

SEQ ID NO: 1243985 - DNA, 4001 bp, Homo sapiens
aaggactgccgaaaagaattatttaaacttttgttgttcttttggcttggacagtaaattgtttggtgctgggggttgggaagaagagaaacccaggggataagaatcaatgcttgggcaactctggaggatgagtgacaaattaatttctccccccaccccccaccaacaacaccccaacatgcaccttggcctggcggcttctgcaaaacaaactttacaaatgaaaatttcaaccaggaaaatgggcctggggccaagttccattcaaataagcaaataccccacacaatggtctgattcatcctcaagcctagttacacaagcctggctcagggtagagaaaataaatatcaatataagtgtccacgctgggtgctggggtgagtagagtggcaagggacctggggagagggccttggagaactccttgaggcagggaagggagaggagaagtgtagggcttagggtggaataccaggggctacggagtgtccccctgtccagcctcccaaaatagaaaaggtcacaaaactactcaccttcagcgagccacgtctcctggaagtgacttagatcctggaagagatctgaggggtaaatagtggaattggaggtgaggtggaggggacggtaagagagaaggggccctagcaagacccggtgactcccctgccttgggagtagggaccgagaagaatgaccaaaatcccttggagggcgagttttttggggaaacaggcgggggttccagaatcggccgtgtgtgtgtgtgtgtgtgtgtgtgtgtgtgtgtgtgtgtggcggaggagggtcgcggtttgtctctcttgctctttaccttcagagtcgaggggcggcagggagcccgggtccatgagcttccccagcgggccgatcagcgcttcgcgcaagctcccatttccgggcgatttctgcgagaagcggggagaatgcccgcgagtcaccctgaggcgcttagtctgggggacgaggttggggtcctcgggtgactcaggggcggggcagcccaggactccgctgggactgcggggaggggggctgtggtgagagtaggggctgggtgcggggcggggcgggcgtggaggccggcgcggcgctcacgctgctgaaggtgtagggcacttgctggtccaagtatccggctttcatcctccgctccatccggccgctccctccggccgcacggccggggccccaagcgggggccgagacctggtgggggagggggctgcgttcgcacaccgtccagggagggctgcgatgggggcggggagggggcagtcccaaggctctgggtccgacggcgaaacttctccgactcactggggcgatggcgaggtttccgcctgccaggccgagcgccaccaccactcccctcccgccaaaggccaaaggaggtcccacctgctcccaggagccgggctcgccgtttctgctttctgcagccctgctttacccgggctcggttacataagaacgtgtgtgtgtgtgtgtgtgtgtgtgtgtgtgtgtgtgtgtgtgtgtacgcgcgcgcgcgcggaggagcaggcgaagcgcacaccatcgcatgcccacaactcccgcgccccctccaaccctgaatcccagcacctcccacccccgccctggaatctgcggaggcgggtggtgagagtgagtgtggtgtgcattggaggcgaggcggggaatcacagacactctccctccctttccctcccgcagcctcacctgaggccggggcgtctgggctggagccgcggggggtcccgagcatgccctggagcccgcaccgagggccgcggggctaggccggagtaaggcggccccggccccgggtccccagcgcaccgacttgtttttcgggcgcagcagacagttgtgagcccgggggagcagctgattggtgcatttccttcgctcggcctcagctctccaccccccgccccgccacaccgccccccgtttccctttgtttcattgacttttgtgaatggaaccccagggctgggcacgcccgccaatccggagagtcgtccggcctggccggggggcggagtttcccagccgcgggggccaatcagaatgtaggggttggctcccggcttcattcagtgctccggctcccattcataaaaaaataaaactcgcggctggagttcattcataaagaaccgagagaaaaagagagaagccgaggaccccgcggcttcttcaccgtctcgccacggtcttgggtctgatgcgccgcgtgctcctccggctggcgtctgcacacgtctctgcatctgcgtgtacgtgggagtatgaacatgtctgtgtgcgcccaggagggaggcgaccgggcttgtgtgcccagaggaacaataataactagcatttatgaagcgctccgcttccacgtgctcatttcgttcccataacccggcgaaatggatcgtttgtatcttacagatattaaaaatgaaactcagagagggatggtaactctcctgaggtcactcagctagtcagcacctctggggtttacagcctcaaatccctcacactctcctgtacacccctctgaagccatgattaaatgagttaagctatgtgacaactgatacacagtaggtgatcaataaatgtaaactggcacagaatccaggcttttcctcaagggtctgttctctgcagagctgttttgtgacccactttctactgattgcagcagaaaccagaagccccagggtagatgatttccgaaagtgtagctccctctcagccatcttccctcttatctgagagccagcaaaaggagcaaaagccccaaaggttctgatgatctggaggcaggatgggtttcagttttagctaagaagctggtcatagtctctgtcatctcatccattcaccacttctttcaataaacatttatcgtgtcagatacagtgctgggttccaggcaagcagctatgtccaagacagacatctgaggggacctggggtgcttgggctgtggccatgggggcacaaaggacatgaatcctcaaaggcctttttgctgagacaattctctatgtctccagcctatgcactcctttgaggacagcctgattttttatcctgcctgtttgtgataaacacaaaagaatgttcaaatgccaggccagcaggagtggcttcccaaattcatctaacctaacacccgccactttacagatgaggcagtggagtttcagagaaggaaatgacacatgtaagctctttgggcctgtctggccagaactaaggctaaaacatacaattgctgtttagtgttcataagggctcattccatgagatctgcttgtgcaaatggaagtaaacttccctttctataggtgctgtaatattctataaggctcatgtctattgtccctctcctccaggaagccttccatgatagcctgaatcagttcctttagccatatacaacattcttgactatatctctggtgtggatgtttttcatcctgcctcatggtatagacatccttatctatggagagctctccagagctcatttgcctctgaaagtcctcctcagcctgttagcatgcttatgagggtggcatgaaatgcttgtgtagtgaataggtacaataaagaccaaattaattgagcttagcaggaaccctgcccaaggaaggagaaacaagcccaagcaaatcccagctttgggctggatggaaccagtttagagacaagtgtgagttctggccaagagaagtggagaggaggacagagggctcttcctggaaggcagctttgatgtggtctccatgacaacgaagaagagtccagtaggtctttaagttggtactgggcacttcagtaggatgggacctctctagggatgccagtgcccctctggttctgagtttttttgtttttgtttttgagacagagtttcactcttgttgcccacactggagtgcaaaggtgcaatctcggct

SEQ ID NO: 1243986 - DNA, 4001 bp, Homo sapiens
ggagagttccagggtagttggatttgagctttaaaaaaattagatacccagggtggagggatgaggagatcctaaggaaaatacctcaaaaagacctcaaaaaaggagttcctagtgttttggcttcttcattttcatagtgttaaaataaaccctaagatgggggtagttaacccttccctctcagagactgtctaaaccaccattttccctcccacctgcagccccaccagcgacaccctcaggccccaccaaaacgcactgaagaatccaaccaggaaacctcctgaacacaccacttccccatcagacccagccacggacccagccacggaccccaccccagccagctcacagctaactccccagcacacaggaaggggggaatttgcctggaggcagaggtattcaagcgggatggaagagggaggaacacttgctattagaattacaatcaaggctatttggggagggagccctgggctctctgtgccaaaggactgccgaaaagaattatttaaacttttgttgttcttttggcttggacagtaaattgtttggtgctgggggttgggaagaagagaaacccaggggataagaatcaatgcttgggcaactctggaggatgagtgacaaattaatttctccccccaccccccaccaacaacaccccaacatgcaccttggcctggcggcttctgcaaaacaaactttacaaatgaaaatttcaaccaggaaaatgggcctggggccaagttccattcaaataagcaaataccccacacaatggtctgattcatcctcaagcctagttacacaagcctggctcagggtagagaaaataaatatcaatataagtgtccacgctgggtgctggggtgagtagagtggcaagggacctggggagagggccttggagaactccttgaggcagggaagggagaggagaagtgtagggcttagggtggaataccaggggctacggagtgtccccctgtccagcctcccaaaatagaaaaggtcacaaaactactcaccttcagcgagccacgtctcctggaagtgacttagatcctggaagagatctgaggggtaaatagtggaattggaggtgaggtggaggggacggtaagagagaaggggccctagcaagacccggtgactcccctgccttgggagtagggaccgagaagaatgaccaaaatcccttggagggcgagttttttggggaaacaggcgggggttccagaatcggccgtgtgtgtgtgtgtgtgtgtgtgtgtgtgtgtgtgtgtgtggcggaggagggtcgcggtttgtctctcttgctctttaccttcagagtcgaggggcggcagggagcccgggtccatgagcttccccagcgggccgatcagcgcttcgcgcaagctcccatttccgggcgatttctgcgagaagcggggagaatgcccgcgagtcaccctgaggcgcttagtctgggggacgaggttggggtcctcgggtgactcaggggcggggcagcccaggactccgctgggactgcggggaggggggctgtggtgagagtaggggctgggtgcggggcggggcgggcgtggaggccggcgcggcgctcacgctgctgaaggtgtagggcacttgctggtccaagtatccggctttcatcctccgctccatccggccgctccctccggccgcacggccggggccccaagcgggggccgagacctggtgggggagggggctgcgttcgcacaccgtccagggagggctgcgatgggggcggggagggggcagtcccaaggctctgggtccgacggcgaaacttctccgactcactggggcgatggcgaggtttccgcctgccaggccgagcgccaccaccactcccctcccgccaaaggccaaaggaggtcccacctgctcccaggagccgggctcgccgtttctgctttctgcagccctgctttacccgggctcggttacataagaacgtgtgtgtgtgtgtgtgtgtgtgtgtgtgtgtgtgtgtgtgtgtgtacgcgcgcgcgcgcggaggagcaggcgaagcgcacaccatcgcatgcccacaactcccgcgccccctccaaccctgaatcccagcacctcccacccccgccctggaatctgcggaggcgggtggtgagagtgagtgtggtgtgcattggaggcgaggcggggaatcacagacactctccctccctttccctcccgcagcctcacctgaggccggggcgtctgggctggagccgcggggggtcccgagcatgccctggagcccgcaccgagggccgcggggctaggccggagtaaggcggccccggccccgggtccccagcgcaccgacttgtttttcgggcgcagcagacagttgtgagcccgggggagcagctgattggtgcatttccttcgctcggcctcagctctccaccccccgccccgccacaccgccccccgtttccctttgtttcattgacttttgtgaatggaaccccagggctgggcacgcccgccaatccggagagtcgtccggcctggccggggggcggagtttcccagccgcgggggccaatcagaatgtaggggttggctcccggcttcattcagtgctccggctcccattcataaaaaaataaaactcgcggctggagttcattcataaagaaccgagagaaaaagagagaagccgaggaccccgcggcttcttcaccgtctcgccacggtcttgggtctgatgcgccgcgtgctcctccggctggcgtctgcacacgtctctgcatctgcgtgtacgtgggagtatgaacatgtctgtgtgcgcccaggagggaggcgaccgggcttgtgtgcccagaggaacaataataactagcatttatgaagcgctccgcttccacgtgctcatttcgttcccataacccggcgaaatggatcgtttgtatcttacagatattaaaaatgaaactcagagagggatggtaactctcctgaggtcactcagctagtcagcacctctggggtttacagcctcaaatccctcacactctcctgtacacccctctgaagccatgattaaatgagttaagctatgtgacaactgatacacagtaggtgatcaataaatgtaaactggcacagaatccaggcttttcctcaagggtctgttctctgcagagctgttttgtgacccactttctactgattgcagcagaaaccagaagccccagggtagatgatttccgaaagtgtagctccctctcagccatcttccctcttatctgagagccagcaaaaggagcaaaagccccaaaggttctgatgatctggaggcaggatgggtttcagttttagctaagaagctggtcatagtctctgtcatctcatccattcaccacttctttcaataaacatttatcgtgtcagatacagtgctgggttccaggcaagcagctatgtccaagacagacatctgaggggacctggggtgcttgggctgtggccatgggggcacaaaggacatgaatcctcaaaggcctttttgctgagacaattctctatgtctccagcctatgcactcctttgaggacagcctgattttttatcctgcctgtttgtgataaacacaaaagaatgttcaaatgccaggccagcaggagtggcttcccaaattcatctaacctaacacccgccactttacagatgaggcagtggagtttcagagaaggaaatgacacatgtaagctctttgggcctgtctggccagaactaaggctaaaacatacaattgctgtttagtgttcataagggctcattccatgagatctgcttgtgcaaatggaagtaaacttccctttctataggtgctgtaatattctataaggctcatgtctattgtccctctcctccaggaagccttccatgatagcctgaatcagttcctttagccatatacaacattcttgactatatctctggtgtgg

SEQ ID NO: 1243987 - DNA, 4001 bp, Homo sapiens
gatgaaggtttccccaacaccagattcatttatatgtacacagggcagcacccacctgcggcagggggaacagccgctgggggctagtaagagtagccacccttggggccaaatggctgggcggggccagccagctctgggaggtaggcggggctctcatccaagtgggacaaagggactgtgtcctcctcactgacaggccggtcaaactcagccttgagagctggacgctgattgtccgggaaggccaaagagaagagggcctcgggctcacacacaaacttgtacacgtaacgctcaccagccacctatggggagagagaaggtctggtcagcctggctagccgcccagcctttgtatggggtaaggtgggggagtggggaatgtggcccttctaccagtacaggcagatgctcggggcatttctctcccatgctggttcctgagaagctgactctcccttcacagttcttactcctttttcatctcaacttctccatgcttgggcttctcagttacagtgttgcacttttttgggggaggagaaccttgggattctccacaatttcttgtctctctgactgattcattatctgatcctacaaagttgctgagaactgccctgctgaccctctccccagtcagcttctcacagccactgccccccaccaccttgtccctagacccacagcccccaccttctgcatgatgcctttctcataatagtatcggagcgagcggctcagcttgtcgtaattcatggctggccggttcttctggatgccccagagcctggcgacctgggaacaaaacagttttggggtagagatgctaccttggcagaggaaaaaatgggggtaaggtcagaaagagcacttgagattcttggtgcaaagtgccaagctagctctgcaacaaagcatcagcccacagacttaggcttggcaagaattcaggttaggtaaagcaagaatcatgatggaggcacgtgccaccatttcccaggttctcccacctccaggctgtaaactttggaaaggagggctgggaacatccgagaggcccacctcctcaggctcaatgagcttgaactccattccccggcccgtccaggcaatgaaatgggcatttgttgggtcatccagcaaggccaccagaaattgccacagctgcagggcaccccggcgctggtagggcggcccctctcgaaatgcaccgaccccttcctgcttgatgtctcctggggaacacgaaaataggaggtgtggggtttgtgtcttttggtcccccaagcaaccgcctcccacccgagggatttctcgaaggggtctccccaggtacttttctatgggtcccaccctcttgcaacaatgaaacgtgatgtgactcctgcagggacacagcgtgataagaccttgaccctcccatcaacagtcacttctctgaccttcaaatttctcagggacaacgcagacatcatctgggaatggtcgcagaggtttctcatagccatagccttgtggaggaaattgggggttgctcagatctgggggttcaccgatgagaccccagagagtccagagggactcctggccagggagaccctcccccatggcagcgctccctcccccaacatggagggcttggcaggggaaggggggctgccttacccatggccccgtcacctggagagggcccagagaagccctctgtgtggaggtacattgatgcgcacccggtgacatctgtgggggaagaaggggtgatgtgagaagtggcttggggtggagctcgagggcaggggaggaggaagtcctatccacattcaagaatttcttccttccagcctgcttcctggtgactgttctttgcccaggttgcctgccaaccacaaaatcccagggaaagttcacccagagggagtgtgatgctggaacccctcctcaacttgagggctgcggctgaggccatggaaggcagcagcgggggctgggcaagctgttctgaagggcccaagctgccagggagcagctgtttcctgcgagttcagggggaggagggagggtgagatgaacgtccggggaaagagttcggtgtccacgcctaagactccctcagaatggacaaaaatgtccggtcagcaggtcaggttcccagccctgtgcacgcgcgcgtgtgtgtgtgtgtgtgtgtgtgtgtgacagaaacagagcgtgcgcctgcatgcacctggggaagaggcagtgggcactgggccttgttttttcaggtctaacagagcacattccacttcgtttcattccattccataggataggaaccttcccactccacatcgggaaggcggctgtgtgaagccacccgttcaagttccaaccccttcccgccctccccccactgcactcccacctatgaatgagaagatggtgaaacatgacacctccgggaggaggcgggagggtgggctcattcatgcctccattttgtgaatggaattcctgactccattcaggagtagctggggggaggggcaggagttcaagggcatgtaacacaatcccctccggtctacagcctttgaaggtcagcggcaagagtgcctccctcctcctctccccagctcactgccaagcctggctcaggcttatgccctggatttgaggacaggagcaccatccggttcttagttggacagcctggggggttgtggttcatccccctgcccttgaacggttgtgggcaccacaaaaagggaaattctaaagttctagctagctctgggcctactctaataaactcagatctagggctactaatgtaacaaaagccaggaggaaagaagaaaaggcagggttttctggacccttcctgggactggccctccttcggcccttgaggctttgaactatagctatttatgaacacaggtgagtgcatctcactccagtcaacagccaggtggaactagaatttaaagaagtccctacttcctctgcccttgcctctggccagggcatacatcaattgggaggctcaaatatgtaagccacatattaacctgtgcttctaccagcttgatcaacatggtgaaaccccgtctctactaaaaatacaaaaactagctgggcatggtgatgggcacctgtaaccccagctattcgggaggctgaagcatgagaatcgcttgaacccagtggcactccagcctgggcgagagagcaagactccatctcaaaacaaacaaacagagcaagactctgtctcaaaacaaacaaaacaaaacaaaacaagaaaaccctgccctcctattgagaactagcaagaaccatgagcctggctagtttcaaattcatgtttctcttcattcaaatccctttgtatttttaagcctctgtggggatagggaccagacacatcctattcatctttgtatttcccaactctgcacactcgtgttcctgtcacagtagtttggtcttaataggtaattaaaacctcaaacacctgttaaatagaaataaatgccttaacttccctattaagtcacaagctacctgagggcaggatctacatccccctttattttaattttacttttttataaatagacacgaggtctcactttgttgcctaagctggccttgaactaattcctgggctcaaacgatcctcctgccatggcctcctaaagtgctgggattacagatgactcaccatgccccgggggccccccttatcttttaatctgaatataggtttgctcattgaaaagtaataatttgtccgggtgaggtggctcatgtctataatcacagcactttgggaggccgaggcgatggatcatatgaagtcaggagttcgagaccatcctggccagcatggcgaaaccccatctctactaaaaatacaaaaattagccgggcacggtggctggtgcctgtaatcccaggtactcgggaggctgaggcacaagaatcgcttgaacccggtaggcagaggt

SEQ ID NO: 1243988 - DNA, 4001 bp, Homo sapiens
ctgaagaaaaaaaaaaaaaaacagcaaatttcctctgagtagacttaaaagttcaacaaaagttgctgggttttcttttaaagcatcatttatacctagcattttttctgattttgacataattgtaaaaaaaaatgtgtaataaaatagaaatagagcatcaggatcttgatgatttgggatgaagtggcaggttataagcatctcaacagataattgaaaatgttgaatttccgctttggccctgagcttgctggaaactagtacaaaaaggagacaagttatattatacattttttaaatctaccaaatgattgatttaaatagaaatggcatatcttagaatttaacagttccatgtactgctaacccagcaggaaagatttataatcattattaaggtatcttataataatataccagtttgtcttgagctacttttgaaaggagtattttattgttagcatttatttgaatgaactaaaagcaaaactatattgttctcctgagatttactaaatgaaattgcctggttaagaaccctacgtatgctatagaaattcttctcaaatgtacttaggagtccttttatttaaaaaaaaaaaaaaaaggcagattcttacctagctagtataggtagggcctgaaagtctttgtttccaaaccaactcctaagcaacatggatgccactgctagtcaggcttttgaacatcaaggttttataagaaatggttgttatatgtcattggctgacatttgtatactattaaaatacagaaattgaaaataagaaatgtgatacgttgagttatgcaaacaaaagtagcatgtaataaacaatgctaactggagactatatttcatattaatagtagggaggaaaaactattaaatattccaggattaagattactttttagattatgacctttagtagacaattaaaggcccaagtcactggcttttgtataatagtgttcagctttaatttttaagtttagtgacataaatctttggatatttcatgattcttccacaaaaagaaatacttgaaattggattagcaagtaatttccatctttttatactagactggacttctgtattagatgctagaatgatttaaagtagattattcttttcacattagttcattaacagtgtagtatacatcatagtattggtacacattttaacagtgcttaccacggaacagataataggcctgctgttgattgtcttcagccagatgtactgcagtgcccaaataaacaaactgtatgacaaaatgagactttctcttgcccttacaaatgcctgagaattgaggactgtttttactccagtttatgccttggaggccaggttgtgttatcagaagttttcttatatctgatcattttcagtagaatttattttcagtagaatttgtaatgtccaagcattagtaatgagaaatttattttttaacttttgaaaaataacaaaacatttccagtttacttgaggaaaccaaacttagatccttcgtaatcctaatttaaaactccatggcgatggcaaattttttcatttctaacttaaaatttatgtaacaggacagaaaaaaaaagtatacattttcagtcacaattctagtttgttagtgagattcttacacactttgatagcatttcctcgaacactaatctgtcagacgttagaagtgaaaaggcataagaaaagccgtatatatatgacctaccttacaaaatgcttggtcaaaatctgattataacgtgattttgataaaccacttcttttcttgtcttctttttaaagcagaatagacttggagaatatgagccttaaagtaaatctgcagtaaaaaaggatatgtgcagctagttttccacttttaaaaccaaaccacagatgacacatttcctttccactgcaactaaagcacatgtcacaggagggaaaaaaaaaaaaacaacgaaaaagctccaacttctctagttggccactggcatgacaggaggctttgtagaaccaatccccgcctccagagcagggagggttttccacttaatgccttttgacagtatgctcattctataggcctgctacatgctttagtgtcattcaaaagaggttttgaaatggtatcttccatttcaaatcttctctaaaagacttatttgaaatctacagactgatttgaaaatgtgagtttggagtccatgggatactgatcagataatgtaacaattgtggaactgcagcaattatttgagaaaatatctagtaaacttagattatatgggacagaaaatgctttcgtgtggtgtagtgtgtgtatacacacacacacacacacacacacacacacacacaactgtcaaacatcctgtcatcacctcaagtttaacatgactgaaacagactttaagaactaggtatgggctgaacacggtggctcacacctgtaatcccagcacgttgggagggttgacgcaggcagatcacttgaggccaggagttcaagaccagcctggccaacatagagaaaacctgtctctactaaaaatataaaaattaaccaggcagggtagcatgcacctgtagtcccacctacttgggaggctgagacaggagaatagcttgaacccgggacgtggaggctgcagagatcatgagatcttggctgcatgagctaagatcatgccactgcactccagccaggaagacagagtaagactctgtctcaaaaaaaaaaaaaaaaaaaaaaaaaaaaaaaaaaagaactggatatggcagcacatatctgtaatcccagctactaggtaggttgaggtaggaggatcactggtggagcccaggagttcaaatccagcctgggtaacatagcaagactccatctcttaaaaattaattaaattaatgaaataaaaagaactttattttttctttaaaggaggctgcctgtgacagtcttcttgtttctgttcatgatagcaacattctaatatcagaggcttagtatacaacacatcattttaatttaagtcctctcagtcctgatcagactttgaatcatgttggtccttccttcatattgttggatcagtttctttttccctgtttttactgtcaacagtactattttagatccttatcaggtcatacctagactctacagtgccttttcggtagccctgaatccttcttatatcttgtatacatcactgtctttggtcataccaccctttctttaagggaaaataaaaccggttgaacagttccctaatacatacaacaatgattcagaaatgtttgtgtacataaacatcagatgagaagattgtttaaaaattataaaagcaggacatggtggctcacacctgtaatctcagcactttgggaggctgaggcgggaggattacttgagccacagaaattcgagaccagcctgggcagcatggcaaaatcctgtctctacaaaaaatacaaaaaaacaaaaacaaaaaactagccgggcatggtggcgcttatctgtagtcccagctactcaggaggctgaggtgggaggatcacctgagcctggggaggtcaaggctacagtgagctgtgaccgtgccactgcagtccagcctgagttaagggaaaaaaaaaaaagataaaaatttccaggccccactacatagatccatatttagtaggtccaggttgggaccaggaaactgcatttttatcaagcaccacagttgattctgacgccagtagtccacagaacatatgctgagaaatggtgagcccctagtagaaaacctaagccctttggttgggcagttatggtctctccacaatttgactattctgtattttcccagctttatctctcaaaacttctctacctgaatcctccattctggctagactagctgtctcttcaacacatctagttacctgtttcttttcctttttgcctttctccataaggcctgcccagtcctct

SEQ ID NO: 1243989 - DNA, 4001 bp, Homo sapiens
acttaatcagaattaaagtttccttctaagtagaattatgtgggaattagctggaaaacacaggcactactagtaaactttagatttgggactaaccctttaaaaacatgtatgggaccaggcgcagtggttcctgcctgtaatcccagcactttgggaggccgaggtgggccaatcacttgaggtcaggagttgaagaccagcctgaccaacatggtgaaaccccgtttctactaaaaatacaaaaaattagccaggcgtggtggtgggtgcctgtaatcccagctactcaggaggctgaggcagaagaatctcttgaccctgggaggcggaggttgcagtgagcctgtgagccaagatggtgccgctgcacaccagcctgggtgacagagggagactccatctcaaaaaaaaaaaaaaaaagtatgggattctatgacaaaaacacaccataaggatcgatgggaaattttttaattttatgaaatatgacagtgaaaaaaatttaatataattttatgactttatgcataatgaaataaactaaatattagaagtagaaaaatatatagacaagcctaatctgaaaaagagataaatatctttattttctgacttccacagtaattacttagaagaaatccttctaagagaaagtcatgaatatttattaagtgttgaaatgggatatcacccactatgaacatattattccctgaaattacaagtctatgtaaaatactctttgcagtttttatttgcccattttacccacagcaagcatcttttatgcatattaacaattttctattgtttattctataggtttcttctatcttatactatgttctaaagtctcagataatgtgacataaacacgtagatgatattaatatacgcatgcatgtttgattattgactaacatttttggcttagtaagcttttaaaatgagccataatgttttcatgtcatcattattaaatataaaatctatatgtaaaaaataaagcatgtataataataatagtcaaataccacatctgatttctttttctttctaaattaagtgaaagtgaccattcttactatgcaaactaaaggggatacaaaaattttaatttatgcattatattatgtacaggaaaattctataaaaagtacattagaacttttaacaattaatattttggaggttataaattcagtcatagcctgtggaatctagttctatttctaacccttagctttatctgccatggctatagtttctttttaattctaaaactaaggttaacaaatatgattgtggctgggagcggtggctcactcctgtaatcccagcactttgggaggcggaggtaagcggatcacccaaggtcaggagtaggagaccagcctgggcaacatagtgaaaccccatctctactaaaaatacaaaaaaattagccaggcgtggtggtgggcgcctgtaatccgagctacttgagaggctgaagcaggagaattgcttgaacccaggaggtggaggttgcagtgagctgagatcgtgccactgcactccagcctgggagacagagcaagactctatctcaaaaaaaaaaaaaaatatgtgtgtgtgtgtgtgtgtgtgtgtgtgtgtgtgtgagattaaataaacttaaaaggtcttatacaaacctaggtgaaaatatttttctaaggcaagctgaactgagtattttttaattctatgcaacaaaaccacaaaaacctgttatagacatctttagactatcagagtttaagtttaaaacactaatgacagtttttaaaataaattttatataaagcaagatcaaaccaaattgtgtgaaaattttcttacctcagctgttaacttcttttgcagaatgctaaattcttgttctaactggacattttggtgatttggctaagaaaggaaaatgggtggttcaattcagatttaaaatgttcctctagcaaactgaaatagtttctgtagaaaaagaggaagtttatcaatagctggttccggaagtgcaataaaccacaaagtgactaagaaatatattactttaacagaacttattttgaaatacattttggagccctatgatttgagtgcttttaattatgtaaataaatatttgagatactctagtaatatgattatgtaaattaaatatttaggatggagtcccgaagagaaaattacatgttctaagaagaaaagctgccagttgggttatcacttacagtgagatttcttctcataagaagtgagtgatgtgttctgtttacttgtatgaccttaggcaagactctgcacttctgagtcaccgtttcctcctctaaaggaatattttattgggttattgtgaggattaaataagatagcataatataacatgtataaatgcctcaccaactgcaggtaaccaataaatgtaatgttatttcctcataatataaaaagtccagggtaaaagtataattacattattttgcaaatgacaggatctcattcttttttatggctgaataatactccattgtgtatatgtaccatattttctttatccattcatctgtttatagacacttaggttgcttccaaatcttggctgttgtgaatagtgttacaacaaaagtgggagtgcagatgtctctttgtacagttttcctttctgttgggtatatacctagcagtgggattgctggatcatatgatagctctatttttagttttttgaggaaccaccaaactgttctccatagtggttttactgatttacattcccactaacagcgtacgagagttccattttctccacacccttcccagcacttgttattgcctgtcttttgagtataagccattttaactggggtgagatgaggtatcattgtagttttgatttgcatttctctcatcagtggtgctgagtaccctttcgtatgcctgtttgccatttgtatatttgtaattaaattattttgaccaaatattttactagtgacttttgagttcaagttctcaactatttatttgattacccacaaagtagttacttctcagtggaaaataaaataaattggggatcattttttaaataagaagttaactaaagttaacttgttactaaagggtaatgaggggttggggagatggtgttaccagttaataggtacaaaaaacaatagaaagaatgaataagacctatttgatagcacaacagagtgactgtcattaataccataattatacattttaaaataactaaaagtgtaattggatcctttgtaacacaaaggataagtgcttgaagggatggataccccattctccatgatgtgattatttcacgttgcgtgactgtatcaaaacatctcattaccctttaaatatatacacctactatgtacccacaaaaatttaaaatacaaaaaatttttaagttaactaaacaaagtgtattgaaaggagtgagtccatctgaataaaaatttctttgagtaagtcacctttcctctcttgaaaaatggagatcataattcctaatttataagcttattgtggaattaaataaatgtaaagtgccttggatgatgcatattatagtaggtacggaatgtgttaacccatgcactgctttttcctggtcactgcgggaaacacaggttattatgaccttgttcttaacttcagggtacttatagcttggtgcaaaaagaatagtttttttttatgggctcctactataaagcataatataatcaaatgctataaagcttttgattcactggtttttggaagtattgttgtttttacggacagggtattgctgtgttgcgcaggctggtcttgaactcctgacctcaagcaatcctcctgcctcagcctctcgagtagctaggactacaggcacatgctactatgctcgctggctggcttatttatttattgtaaagatgaggctcttactttgttgtgcaggc

SEQ ID NO: 1243990 - DNA, 4001 bp, Homo sapiens
caacagggccctgaggacggagctgccccaggccaggagcgcactgctggggagcctgcctggacagtgggagctgcaggtgctgggccctgggcgcccctcctcaggtcccgcctcctgggatggctgctcccaccgggagctgcacactccaccctgggtggggctcaggtgccccagggaggacaggtcactcagcgagagtgttagctgagagtcttaaccactgtctttcccgtccgcccagacacccagcctcggtgtctgttggtgccttgatccctatcggggtaatgggcacccccactcccacaccagcctttcatccctgaggtcatctcgacaccctggacccaggcgggctgctgcctcctctgcagacgagctgaagccagtgagtgggaagaacaccgcccaatccatccacagattgctgaggctgggctccagagagccgggtggtccaagggaggcccagtgccccctgcaccacacccactggaaaaggaagccccagctctattttgttttaacagacagggtcttgctctgtcacccaggctagagggcagtggagtgatcacggctcactgcagcctcgacttcccgggctcaagtgatcctctcacctcagcctcccaagtagctctgactacaggcatgcgccactacatccagataatttttgtatattttttgtagagacgggatttcatcatgttgcccaggctggtctcgaactcccgggctcaagtgatctacccgcctcggcctcccaaagttgtaggattgcaggcgtgaggtattgcgccaggattttttttttttttttttttaagacagagtctcagtctgtcacccaggcgggagcgcaggggtgtgatcatggctcactgcagcctcaaactcctgggctcaagcaataggcacgagccaccatgcctggctattttttatttttatttttttacagaaacaagatctccctatgttgtccaggctggtctcgagctcctgggctcaaggaatcctcccgcattggcctcctgaagttcggggattataggcgtgagccacggcgcccggccatgaacccctaactcttcaatacaacaaggccctgggtgagaactctggggagggctgtggcttaggcaggaggcagcacagcccctgcatccctaccccagggatcccaccccgtcccctcagtcctcatgccctgtacccaggctccaggggtcatcccagccaagtagagccttggggcagagctgcagtcaggcagccaggctctcctgtctcccaggctctcctgtctcccaggctctcctgtctcccagcctctggcagaggagggcctccgtgcaggctcctgtccagcacttctcccgcgaagcggcctcaatccgtggccctcaggcccccttagaggatgtagggagccccaggtcatcccctgcctcctgccagggctgaagttcggcctgggcctgcggctcccaaggcagggagagagtccatccctgggccctttggcctcaggacaccaaatgccagcacggggctggtcctgggctctgggccgccgccgccgccaggtggctcaaggacctgggcctggcaccacccccaccccagttccccggctccccatcccccagtcccacttaccggctgtgcctgctgggggagcctttgggggaccccttggcgggggagcccttgggggaccccttcccctgggagcctttgctcagccccttgaacatggtcgtaaaggcaagtgctggctcaggctgggcttggctggcgaaagacggcaggagggcaggtgggaggcagcgggcgtcctcactggctggtcagctaagtctggcgaggtggggcggctgggcactggggaagggagtttctgggaggcccctccttgcaggtgaggcagcgggcgggcggccgggtcccaggcctgacgcgcatgcacccacaacggccacactcatgcctcctcctgcacaaccagtctgggaggaaagggcacagccctgagggcggggccgagcctgcccgactcccacagaaggtttggacttgttacacccacatgcctaggggagcgcagcggcgatcacacccagatagggaaggagttgggccaggacagacagggctggagacagacgtgcacatgcaggtgcaggctcagcggagaggccccagccccggagctcaggattaataaacacctccagccagctcagaggacctgctgccaggcaggcccccacccacagctctcaatcccccaggagaggagggggtgtcctgccagcccagggcctgactctctgttctccactgacatgatggggcagtcaggggacgttcactccagacaactggcacaaggtccattttttttttttttaagagacaaagtctcgctctgtcacccaggctggagtgcaatggcatgatctcggctcactgcaacctctacctcccgggttcaagcgattctcctgcctcagcctcctgagtagctgggattacaggtgcccgtcaccacgcccagaaaatttttgtatttttagcagagaaggggcttcaccatgttggccaggctggtctcgaactcctgacctcaagtgatccacccgcctcggcctcccaaaatgctgggatcacaggcatgagccaccacgcctggccccattttataaagtgtgcacagtgcagcagcaccagggctggcttcaggcgccagtaagcctgggctctggctgaggcccgggagcctgatgcacttggcttttcctacctgcctcttcccccacccagaaatggcccctggtggcttttatgaagtcagattgagtggcagacagtgatgccagcttattggtcttttcctcacactgggtaccagggctgctgccttttccttctgtggtggccctgagcgtcttcaagaaagaggcgatggcacccccctttccaggcgctcatttcactggcccagcgtaacaggccccttctgcggggtggcgtcgctttccaggtcattcctgaaacccccgtggttttagtggaaggagggcttgagggggagccaggggatggaacagactgactgggtgacatcacctggacatcctggcaggcctcgctgaggacaaagcacagcctggcaggagagaaagatcccagcagacgggggagaccagggaccgacgcctgatactggcctcaggcccccatgggatagaaaagtcctgcgccctttttggctgaatttcatgggaagtccctgaactcggccgtggagaggggatgcaggacacccccattcctagaggtggaggagctgacaggggcagtaggggtggggagggcagtggcagcccctgacagcaatgaggaaacaaagaggtctccagtgtccttggctcccagcccgtgtcttgagtgagatggcaccagggatgactggccactcagcctctgccccagcctgctcccactttattcctggtgacacttgtcttctagccactcattgcacacctgcaatcagctgtcttcagaaaggagccgtttgtgtgaatgactacgggggccaacgccagcctcacccctggcctccctgactcgcctttttcttttctttcttttttttttgagactgagtctcgctctgtctcccaggctggagtgcagtggcgccatctcggctcactgcaacccctgcctcccaggttcaagtgattctcctgtctcagcctcccgagtagctgggattacaggcgcccgccaccacgcgcgactaattttttgtatttttagtagagacagggtttcaccacgttggccaggctggtctcgaactcctgacctcaggtgattcgcccacctcagcctcccaaagtgctgggattacaggcatcagccactgagcccgcctgcttcacctttgagcttggcccctccctgggaggtgg

SEQ ID NO: 1243991 - DNA, 4001 bp, Homo sapiens
tcccactagagggctagtgccttgaaggcaggggcctgttggttctgtctacagcgacatctccagtgcctagaacagtcctggcatgcagtaagtgctcagtaagttcatgtcaaacgagtggatcgcacgtgaggtgatccagagccaacagggccctgaggactgagctgccccaggccaggagcacactgctggggagcctgcctggacagtgggagctgcaggtgctgggccctgggcactcctgctcaggtcccgcctcctgggatggctgctcccaccaggagctgcacactccaccctgggtggggctcaggtgccccagggaggacaggtcactcagtgagagtgttagctgagagtcttaaccactgtctttcccgtcggcccagacgcccagactcggtgtctgttggtgccttgatccctatcggggtaatgggcacccccactcccacaccagcttttcatccctgagcttatctcgacaccctggacccaggcgggctgctgcctcctctgcagatgagctgaagccagtgagtgggaagagcgccacccaatccatccacagagagctgaggctgggccccagagaaccgggtggtccaagggaggcccagtgccccctgcaccacacccactggaaaaggaagccccagctctattctgttttgttttaacagacagggtcttgctctgtcacccaggctagagtgcagttgagtgatcacggctcactgcagcctcgacttcccgggctcaagtgatcctctcacctcagcctcccaagtagctctgactacaggcatgcaccactacatccagataatttttgtatattttttatagagatgggatttcgtcatgttgcccaggctggtctccaactcctgggctcaagtcatccacccgcctcagcctcccaaagtggtaggattgcaggcatgaggtattgcaccaggattttttttttttttaaagacagagtcacagtctgtcacccaggcaggagcgcagtggtgtgatcatggctcactgaagcctcaaactcctgggctcaagcaataggcatgagccaccatacctggctgttttttatttttattttttttatagaaacaagatctccctatgttgcccaggctggtctcaaactcctgggctcaaggaatcctcccgcattggcctcctaaagtcagggattataggcgtgagctaccgcgcccagccatgaacccctaactcttcaatacaacaaggccctgggtgagagctctggggagggctctggcttaggcaggaggcagcacagcccctgcatccctaccccagggatcccaccccaccccctcagtcctcatgccctgcacccaggctccaggggtcatcccagccaagtagagccttggggcagagctgcagtcacacaaccaggctctcctgtgtcccagcctctggcagaggagggcatcagtgcaggctcctgtccggcacttctcccgctgagcagcatcaatctgtggcccacaggcccccttagaggatgtagggagccccaggccatcccctgcctcctgccagggctgaagttcggcctgggcctgcggctcccaaggcagggagagagtccacccctgggccctttgtcctcgggacaccaaatgccagcacggggctggtcctgggctctgggccgccgccaggtggctcaaggacctgggcctggcaccacccccaccctagctccctggctccccatcccctagtcccactcaccagctgtgcttgctgggggagcctttgggggaccccttggctggggagtccttgggggaccccttcccctgggagcctttgctcagtcccttgaacatggtcataaaggcaggtgctggctcaggctgggcttggctggtgaaggagggcaggagggcaggtgggaggcagcgggcgtccttgctggctggtcagctaagtctggcaaggtggggcggctgggcattggggaagggagtttctgggaggcccctccttgcaggtgaggcagcaggcggccaggccccaggcctgccgcgcatgcacccacaaaaaccacactcatgcctgctcttgcataaccagtctgggaggaaagggcacagccttgagggtggggccgagcctgcccgactcccacagaaggtttggacttgttacacccacatgcccaggggagcgcggtggcgattacacccagatagggaaggagctgggccaggacagatgggtctggagacagacgtgcacatgcaggcgcaggctcagcggagaggccccagctctggagctcaggattaataaacatctccagccagctcagaggccctgctgccaggctggcccccacccacagctctcaatcccccaggagaggagggggtgtcctgccagcccagggcctggctctgtgttctccactgacatgatggggcagccaggggacgttcactccagacaactggcacaaggtccattttttttttttttaagagacaaagtcttgctctgtcacccaggctggagtgcaaaggcacgatctcggctcactgcaacctctgcctgccgggttcaagcgattctcctgcctcagcctcccaagtagctgggattacaggtgtccgtcaccacgcccagaaaatttttgtatttttagcagagaaggggattcaccatgttggccaggctggtctggaactcctgacctcaagtgatccacccgccttggcctcccaaagtgctgggattacaggcatgagccaccatgcccggccccattttataaagtgtgcacagtgcagcagcaccagggctggcttcaggtgccactaagcctgggctctggctgaggcccgggagcccgatgcacttggcttttcctacctgcctcttcccccacccagaaatggcccctggtggcttttatgaagtcagattgagtggcagagagtgatgccagcttattggtcttttcctcacactggggaccagggctgctgccttttccttctgtggtgaccctcagcgtcttcaagaaaggggcgatgggacccccctttccaggcgctcattttactggcccagcgtaacaggccccttctgcagaggtggcgtcgctttccaggtcattcctgaaatccccgtggttttagtggaaggagggcttgagggggagccaggggatggaacaggcggactgggtgacatcacctggtcatcctggcaggcctcgctgaggacaaaacagcctggcaggagagaaaggtcccagcagatgggggagaccagggaccgacacctgatactggcctcaggcccccatgggatagaaaaggcctgtgccctttttgggtgaatctcatgggaagctcctgaactcggccatggagaggggatgcagtaaacccccattcctagaggtggaggagctgacaggggcagtgggggtggggagggcagcagaggcccctgacagcaatgaggaaacaaagtggtctccagtgtcctcagctcccggcccatgtcttgagtgagatgccaatagagatgactggccactcagcctctgccccagcctgctcccactttattcctggtgacacttgtcttctaaccactcattgtacgcctgcaatcaactgtcttcagaaaggagccgtttgtgtgaatgactatgggggccaacgccagcctcacccctggcctccctgactcaccttttcttttcttttttttttttttttttgagacagagtctcgctctgtctcccaggctggagtgcagtggcaccaactcagctcactgtaacccctgcctcccaggttcaagcaattctcctgtctcagcctcctgagtagctgggactacaggtgcacaccaccacacccagttaatttttgtatttttagtatagatggggtttcagcatgttggccaggctggtctcgaactcctgacc

SEQ ID NO: 1243992 - DNA, 4001 bp, Homo sapiens
ccgtctgcttgtgcacagggatgatggagttctccagcttcataaggcggctctcaaaggatgataagatagacacctgcgggagggaagcctcttgatcttgggactcacagtggtcccagcactgcttctacacacccaccttcggcatttcctgccttttctctggttttctagacaataaactccacaagcgaaggaacagggtgtacctgttccccactgtatcttcagcacctatcatgtgcctggcatatagtaggtggtctaagacaaattggttgaaattttatttgaaggcaaaccaagcatcaaattaattcttcttaaaataatcagcccaagatggcttcccttccaccctttgaagccaaatctcaacttctgttctctctgaagcattcctaaaccggactggaagtagtttcatacagagtagcctcaaatgcattgctgtatcttcaaaaccctctctaaggatgaaactcattgaataaggactagaggctgggcgtgatggttcatgcctgtaatacccagaatttgggaggctgaggcgggaggttagcttgagactaggagttcaagacaagcctggacaacacagtgagaccctgtctacacacacagacacacacacacacacacacacacacacacacacacacaattagcaaggcgtggtggtgtgtgcctacagtcccagctgctaggaggccgaggcaggaggactgcctgagcccaggagttagagactgcagtgagctacagtcatgccactgcactctagcctgcacaacacagccagactctgcctctaaaaaaaaaaatttaaaaattaaaatttttagaaaaggactaggactttattattgtgtgactaaatgcaaatacaagtttgtatttactcactttgtgcttttccagtctcccctaggaataaagaaggaaactcacttattgagcacctattgtataccaggcactgtgcaagatgcagtcgcatgcattagcgcatatgaccttcacagacacactgggaggctggcacagtctctgttttagcagatgaattcgctgacaccagttacctatcaggagccgcacatttaagcagaagggcaaggactagatcccagatctgcctgactttagagctctttctttccctaaagtcctctggagtgaaggctgagtcttctctgccctcaggaatctcaaagtgccaacctcctgggcagagagtccactgacaatgacatatgcccagtacctagcccaactggtcagactcactgagtgtttgcagaaggagagaaggaagaatggcgagcttagacagaaagcagcaagtccaggccagtgggaagtgcagcctcctcagtgagggtacggaacatggggagggggctaggcaggagagatgccaaactgttgctagataaacccacacactgcctccgtcgctgcccattccagaactccaggccgcaggaaccggaaccgccaggtcgcaaggctctcccccagggtccggaggcctgccctctcccccagctgcggggagactcaccatgttcttagtgagctggtcgctcttctccaggctgtctcggatgaaggacagagtctcctcctcctgggggcaggcaaggggaggacatcaccagaaaccagaagctaaaggagaccactgcgtcccaaccccacggcctagcccccaaccccatctcctcgctgggtgcgctccctcccacccctgcctcctccatgagtagacaatcaggccccgctgttggcccctttccctcacctcctccccagcctccccaggcccacgcccacctgcttcagcttgtcctcaatctcccgccgtcgagcggatgcctcctgtgggggaatcatcgctctgaaccccgcggctcccactccccagtatctttcctccgcgggcccaccgggcccccgtccccgtcacacccacttccgctcttggtcccgccccgggacgcctgggcggagccatgttgggaatcgcaggctgaagtgcgcctgcgcggagcccaagaacggaccgacggccattttgagcgtggctgggaagagaagtgtattcggatgctgcaagggacctcgacgcgggttccttgcctcagcagaggttttcgatcggccttatgtcccgcggctggcaggacacttagagctcacttgctgttttcgttgaaagaccgacccttttgataaagactgctggggaaggcgacgaattcctttccccaggtcgcattctatgggcaggcaccaaggccaattgcgtttcccacaaagccccgcacggagcaggtgacacagtagatgcctaacgtgtgtccatgtaatgaaccaggggcttgtgtacttgtttccgccttccaccctgcattacgcaaaaacgtatcctgtgggctggcggggctgctccggagctccaggcccagacccagcgtccaactgcagctccaggggacggggtggggggcgcccctggatcaacttccctgcggggctggatgttgtggttgcagacccagctcctgcaaaacctcgagttactccttcctctaacccgtccctgcccaccctgcctctggcccccagccttgagaaaggacaaggccgaccagcttggttcagtccttctgtggcctcagtgtccagacacccggaagatagacaaggaggcatgtgctggtagatgagaaggtttggggcgggcaggggggacaccaagctttttttttcctttcttttcttttgagagagagtctcactctgtcgcccaggctggagtgcaagtggcacgatcttggctcattgcagtctctgcctcccgggttcaagtgattctcgtgcctcagcgtcccgagtagctgggattacaggcggctgccaacacgcccggctaatttttttgtattattagtagagacagggtttcgccatgttgcccaggctagtctcgaactcctgacctcaagtgatccacccgccttggccttccaaagtcctgagattacaggcgtgagcccctgctcccggcctaaggagagaaggagagaaggaagaacccaagctctagggttcccaagcgctcactccacccatagtcacccgaagaggaggaggaggaggaagtgggtgcacagagcctggagagggatgggcagccttccctcaggcaagaggacaatttcaatcctgttgtaggtgggggagataaaaggctgattcctgtgtcaggaaatacccaggatgatttcgctgacatggtccttgtgtagtccaaagggctaagtaggagaaagtttaaactgttagatgtcacagaatagagtagcggggctagttagccgctgtagagagggtgttttgggctcaggtggactacctttgagggcctggtccagcatttaacctgagtctctctctctctctcttttttttttcttgagacggagtcttgctgtgttgcccaggctcgagtgcaatggcgtgatctcgcctcactgcaacttctgcctcccgggttcaagcgattctcctgcctcagcctctcgagtagctgggattacaggcatgggccaccaccctggctaattttgtatttttagtagagatggggtttctccatgttggtcaggctagtcttgaactcccaacctcagttgatccgcccgcctcggcctcccaaagtgctgggattacaggtgtgagccaccgtgcttggcctgagtctctaaacagttcctggcccatagtagatgcttaataaaaatactgataataaatattttgctccggccaggtgtggtggctcatgcctgtaatcccagcactttgggaggccgaggcgggtggatcacgaggtcaggagttcgagaccagcctggccaacatagtgaaaccccatctctactaaaaatacaaaaattagctgggtgtggtggtgtgcacctgta

SEQ ID NO: 1243993 - DNA, 4001 bp, Homo sapiens
caagcgatcctcccacctcagcctcccaaattgttgggattacagaccaaccctcctgttggcccaggaggcattaggaattgaccctctgggcctcactcactcacccctctctgatgatcttctcagtgtcactggccacatggtagtagctgatgacatggtccaggcaggacagcgtcttctcaacattctcctgcagccgctgcagattctccgtctgcttgtgcacagggatgatggagttctccagcttcataaggcggctctcaaaggatgataagatagacacctgcgggagggaagcctcttgatcttgggactcacagtggtcccagcactgcttctacacacccaccttcggcatttcctgccttttctctggttttctagacaataaactccacaagcgaaggaacagggtgtacctgttccccactgtatcttcagcacctatcatgtgcctggcatatagtaggtggtctaagacaaattggttgaaattttatttgaaggcaaaccaagcatcaaattaattcttcttaaaataatcagcccaagatggcttcccttccaccctttgaagccaaatctcaacttctgttctctctgaagcattcctaaaccggactggaagtagtttcatacagagtagcctcaaatgcattgctgtatcttcaaaaccctctctaaggatgaaactcattgaataaggactagaggctgggcgtgatggttcatgcctgtaatacccagaatttgggaggctgaggcgggaggttagcttgagactaggagttcaagacaagcctggacaacacagtgagaccctgtctacacacacagacacacacacacacacacacacacacacacacacacacaattagcaaggcgtggtggtgtgtgcctacagtcccagctgctaggaggccgaggcaggaggactgcctgagcccaggagttagagactgcagtgagctacagtcatgccactgcactctagcctgcacaacacagccagactctgcctctaaaaaaaaaaatttaaaaattaaaatttttagaaaaggactaggactttattattgtgtgactaaatgcaaatacaagtttgtatttactcactttgtgcttttccagtctcccctaggaataaagaaggaaactcacttattgagcacctattgtataccaggcactgtgcaagatgcagtcgcatgcattagcgcatatgaccttcacagacacactgggaggctggcacagtctctgttttagcagatgaattcgctgacaccagttacctatcaggagccgcacatttaagcagaagggcaaggactagatcccagatctgcctgactttagagctctttctttccctaaagtcctctggagtgaaggctgagtcttctctgccctcaggaatctcaaagtgccaacctcctgggcagagagtccactgacaatgacatatgcccagtacctagcccaactggtcagactcactgagtgtttgcagaaggagagaaggaagaatggcgagcttagacagaaagcagcaagtccaggccagtgggaagtgcagcctcctcagtgagggtacggaacatggggagggggctaggcaggagagatgccaaactgttgctagataaacccacacactgcctccgtcgctgcccattccagaactccaggccgcaggaaccggaaccgccaggtcgcaaggctctcccccagggtccggaggcctgccctctcccccagctgcggggagactcaccatgttcttagtgagctggtcgctcttctccaggctgtctcggatgaaggacagagtctcctcctcctgggggcaggcaaggggaggacatcaccagaaaccagaagctaaaggagaccactgcgtcccaaccccacggcctagcccccaaccccatctcctcgctgggtgcgctccctcccacccctgcctcctccatgagtagacaatcaggccccgctgttggcccctttccctcacctcctccccagcctccccaggcccacgcccacctgcttcagcttgtcctcaatctcccgccgtcgagcggatgcctcctgtgggggaatcatcgctctgaaccccgcggctcccactccccagtatctttcctccgcgggcccaccgggcccccgtccccgtcacacccacttccgctcttggtcccgccccgggacgcctgggcggagccatgttgggaatcgcaggctgaagtgcgcctgcgcggagcccaagaacggaccgacggccattttgagcgtggctgggaagagaagtgtattcggatgctgcaagggacctcgacgcgggttccttgcctcagcagaggttttcgatcggccttatgtcccgcggctggcaggacacttagagctcacttgctgttttcgttgaaagaccgacccttttgataaagactgctggggaaggcgacgaattcctttccccaggtcgcattctatgggcaggcaccaaggccaattgcgtttcccacaaagccccgcacggagcaggtgacacagtagatgcctaacgtgtgtccatgtaatgaaccaggggcttgtgtacttgtttccgccttccaccctgcattacgcaaaaacgtatcctgtgggctggcggggctgctccggagctccaggcccagacccagcgtccaactgcagctccaggggacggggtggggggcgcccctggatcaacttccctgcggggctggatgttgtggttgcagacccagctcctgcaaaacctcgagttactccttcctctaacccgtccctgcccaccctgcctctggcccccagccttgagaaaggacaaggccgaccagcttggttcagtccttctgtggcctcagtgtccagacacccggaagatagacaaggaggcatgtgctggtagatgagaaggtttggggcgggcaggggggacaccaagctttttttttcctttcttttcttttgagagagagtctcactctgtcgcccaggctggagtgcaagtggcacgatcttggctcattgcagtctctgcctcccgggttcaagtgattctcgtgcctcagcgtcccgagtagctgggattacaggcggctgccaacacgcccggctaatttttttgtattattagtagagacagggtttcgccatgttgcccaggctagtctcgaactcctgacctcaagtgatccacccgccttggccttccaaagtcctgagattacaggcgtgagcccctgctcccggcctaaggagagaaggagagaaggaagaacccaagctctagggttcccaagcgctcactccacccatagtcacccgaagaggaggaggaggaggaagtgggtgcacagagcctggagagggatgggcagccttccctcaggcaagaggacaatttcaatcctgttgtaggtgggggagataaaaggctgattcctgtgtcaggaaatacccaggatgatttcgctgacatggtccttgtgtagtccaaagggctaagtaggagaaagtttaaactgttagatgtcacagaatagagtagcggggctagttagccgctgtagagagggtgttttgggctcaggtggactacctttgagggcctggtccagcatttaacctgagtctctctctctctctcttttttttttcttgagacggagtcttgctgtgttgcccaggctcgagtgcaatggcgtgatctcgcctcactgcaacttctgcctcccgggttcaagcgattctcctgcctcagcctctcgagtagctgggattacaggcatgggccaccaccctggctaattttgtatttttagtagagatggggtttctccatgttggtcaggctagtcttgaactcccaacctcagttgatccgcccgcctcggcctcccaaagtgctgggattacaggtgtgagccaccgtgcttggcctgagtctctaaaca

SEQ ID NO: 1243994 - DNA, 4001 bp, Homo sapiens
agaaggagtttcgccatgttgcccaggcagctctcggactcttgacctcaagtgatccgcctgccttggcctcccaaagtgctgggattacaggcctgagccactgtgccaggcctcctttttttttttttttttttgacagaatctcactctgttgcccaggttgatgtgcagtggtgcaatctcggctcactgcaacctccacctcccggttcaagcgattctaatgcctcagccctcccgagtagctgggactacaggcgtgtgccaccacacctgattaatttttgtatttttagtagagatggagttgtcccatgttgcccaggctggtctcaaactcctgggctcgagtgaacggtccacctcagcctcccaaagtgttgggattacaggcatgagccaccgtgccaggctttttttttttttcttgagacagggtctcaggtgctgtcacccagactggagtgcagtggcaggatcagagctcattgcaaccttgacctcccagtctcaagcaatactcctgcttcagcctcccaagcagctgggactataggagaaggccaccacatctggctattttttttttgtagagatgaggtctcgctattgttgcctgagctggtcccaaactcctgggctcaagctattctcctgcctgggcctcccgaatgctgggatttcagatatgagccaccgagcccagtctaaagtacttatctcctaacacacactctctcctatgtaagtaatctcttttatcagtggcatatctggggattccaagacttaaaatagacaagctttcacagaaacctctaatagggttagcaccttctcaggctggaaacctccttcaatatcagtttcctaaatttaaaaaacatggggtgtgggaatttttttattcagcggcagtatggcagcaaacgtggaggagactcgcgttttcattgccatccttgcacccacctaattgttagtgtacctgagctcctttgctttcatcctcccctgccaagcgtcaggttcctatcggcctgggctacatcacatacaaccctgtatttcaccctccatattccttcacattccacggggggcactaacatccttcaggtatcccttcccttccctgctcaagaaacaattcctcagtagtcactttttattgaaataaaagtttgtcccacatttcctaacaggcatgtcccaaatacaacaccttgtctgtgcttcaaggcacttttatttatatcatttgatcctcggttgaatggtgggggtgagcgatcattggcgtgagaccaaaagtctggagtgaaggagattcttgctcagggccaggcctggggtgaggcgaccgaggcacccaggacgcacgtgaggaggcgctcactgcacttgcgcgaccctgagtcagtgctcctttacactttgtgccttgggagccttactcacctcaccctagtcccggccttgtttttactgctacccctcctcaacatccccgaaagccatcgcaagatcagccccggtctctagccctccccaagcacagctccaggtccccagagtccacctcgctaaaggcccccgcaggtgccaccgccctcccgcgccctttgggcgctggggctcccgcccaccggcccacaccgccatccaacgggattccccgtccccgagcccgcccccgccgctcctcctcccgggcacacagccctcgcagccccagacgctgtcctcgcctgggtctctctcgccccgtcgcccccattcccccaccctcggaatgaggaggggcgcctgctacccccggccaggcaggcagtgtgtccctcggattccttccaatttcctgatccctccgcctctccctccctcaggcccagggcggcgaggggaggaggcccggccccaccgcccggcccaggcttgtttactcactcaccctccatcccgagccgcgggtcccgctgctaggacgcatgcgcgccgcggccccacccctgcgccgtgccccgccccgcgcctcctgtcggcgcgtgcgcattgacttacccgtgccgcgcggacgcactactgtcatttgccgccaaaaccccgcactcaggagtcctggcgggtgcagcctcccagacggcttccaaagcggcgctggcaggggaggggaagggctctggggaaaccttcgcagagccactaatatcttcctgaagaccctattcagcggatttgccatccccacgcgctggtgacaagccacatctcacttcagcgtttgaagccaacccagatcaccttcataccgatgcttcacccctaccagttctccagacaccggtctatgggttctaagccctttatttatgtctgatctccctatttctgttcatagttttctagtcacttagaatcaaaattatagccttgtatcgaaataaatccccacaagacacctgctagttacaaagggaaaaaaatagcaactttacagataagaatctgtcagacaccaccttaactaagtgatcaaagttagcatcactagtgataagaggtattgttttcttcttctttttttgccggggggcgaggctggacggagtctcgctttgttacttacacaggctggagtgccgtggcgcgatctcggctcactgcaacctctccctcccgggctcaagcaattctcccgcctcagcctcccaagtagccaggaatacaggttcgtgccaccacgcccggctaatttttgtatttttagtagagatggggtttcaccgtattggccaggctgctgtcaaactcctgacctcaagtgatctgcctacctcggcctcccaaagtgctgagattaccggcatgagccaccacgcccggcctccctcttctttttaaggagacagggtcttgctgtgttgcctaggctggtcttgaactccagggttcaagccatcctcccaccttgatttcccaaagtgttgggattacaggcatgagccattgcccccagctgagaggtattcttaccaggtccctctgaacatgatgcaatgagaagcgcacaaaatcacttctgtggtattcttgacgaacacgcataagctgattttttgtgcgtgttgtttgtttgtttgttttgagacagtttcactcttgttgcctaggctggagtgcaatggtgcaatctcggctcactgcaatctctgcctcctgggttcaagcgattctcctgcctcagcctcccaagtagctgggtttacaggcatgcactactatacccggcaaattttgtaattttagtagagatggggtttcaccatgttgtccaggctggtctcgaactgctgactcaggtgatccccccacctctgcctcccagtgctgggattacaggcatgagccacaatgcccagcctgcataagctgaatttaattatgaggaaacatcagacaaatccaaaatgagagacaatctacaaaataactggccagtatcttcaagtgtcaagatcatgaaagacaaggggtgagaaaccatctcagattgggagactgaggagatatgacaactaaatgtaatgtgtgatcctggcttgaatcctggtccagaaaaagaacaccagtgggataatttgatgaaattagaataaaatctctagattaattaatagtattttatcaatcttattcctggttttaatcattgtaattgaggaagtttgatggacatataggaactctaccatatttgcaactctattaaatctgaaattatttcaaaatataaatttttaaaattacaaattaaaatgcaaaataataacatcttgattttgattttgtctcaaagtgtataattagaaaagcttataatgttcattttttcaagtaatcttcataacaactgtatgaagtacgtagggcaacttcagtttacacatcaggttattctggcctaaaggagttagaagacttgccttacacagatg

SEQ ID NO: 1243995 - DNA, 4001 bp, Homo sapiens
tggtcccagctttcctatttattcataaggtgtggccattcatttatttaggggaaccatcacctgggtgaccaggcgacggtccccctggaaaggaggagggagcaagttcagcagaggaactggggaggcctggagaccagtcaagagagaaagacaagctggtcgaaacttttgccttcctgggcgtgcccgaaggtaagaaggccaaggtcgaactgggaaggggtggaagaagggagggcaagggtcaggtgaggtgggtacttcctggagctgaccccggggagcagggggcttctcaggaaggctaggccatggccaggcatcagaggagcatcatccggagtaaggacgctgccccttgtggacactgggcccctcctccccctccctttctgtctgtgggtcacattttaaaccctgactgcaaaatctggaggccccactggttgtaactgtgggccaagacagcggcatactcatcctacaactctctacccatggggtgcaaagacccgctcaagggcttggagaagtcctcagacacgctgtagtgcatactgcaccagtggaccggcataccatcagctgcagcggcctgcccccgtgggcacatgcacagctggacacacccgcatgctcgaacagaagaatgaggctgccacacggtcccagcagctgcctgcatcctccttctcccaggctcacctccacaaagaaaagcagccagatcttgctccagcgtttggactcggtgagggccccatgagtggccaggtggctgcccttgacagtgagtgtgtagtggcacacacccaagatggtgatgccggatgcaaagaccagggcattctcccagcgcaggcacaggaagcctgcgtggagaggaggaagaagacgggtctttctctagctctgggtgatctgggcccaaatacctcaacccttaccctgggagcccaggctaaagtgggctaggctctgggggctgccactggccggagtgaggcaggtcccactgtggcctgaggggaaccaggactgcccctccagcggtcctgactctcccgtgcctggtcctgactctccagtgcgtggtcctgggcccccagccaaagcaatgttggggcctcaggtaccatgggtgttccagaccaggaagggtccaggggaaactcccaccccctccccactcacctaggtccccaaagaacaccgtctcccttcccgggggtgggggggcacctcatcactcccggccactcccccgctcctctcaactttcccttccaccaccctcctgcgccccctcctagggtacacagggcagaacaccccagtccagactctcaggttcggggtgtgaccctccatccttgggtgcggggccccgaccacctccgcctccctgccgccgccagtccactccgcaggctgcactcccacggctgctgttgcagaccccgcgccgccacctccgccgcaccccgcccccacccgcagcccggccgggacgccgggtccccgcgttcctcacctgccggcaaggcgaagaggctgagcgcgaggatggcgcagtccacgccgtggcgctcccaccaggagctcgtcctcaccacgtcctgcaccagcacctccagctcccgcagcagcgcctcgcccccacggtgcgcgctccgcgccggttccatgggctccgtaggttccatgggctccgtaggttccatgggctccgtaggttccatgggctccgtaggttccatcggctccgtgggttccatggactctgtgggctcgggcccgacgcgcacggaggactggaggactggggcgtgtgtctgcggtgcaggcgaggcggggcgggccggggcggagtcacgcgccgcctggggacacccgcccccggggtcaaggtgcgagacaccctggctcctctgctgcgggcgctggcgacccaggcccggctcaggcgcgcgaccctggcaggcggcatcagaaccgccgcggagggaggagccaggccgatgagctgagagtggctaggcggggaggcgaccctgcggtgagacccagcccaggtagtagggacggaggcgtcaggggcacggagaccccagtggagacaccccccacccccgccccgccccgagggccttccctgacctccgacctcaaataactccctgagttccctcggtccctgagatctgtccgagcattctcttccctcgaccctgactattcgtagtggcactgagcagctcccctcgtacgtgacacacatgacacatgctgtcgtctgtctctgccaacagacggaccctcagtgccgtagagacgtcctcgttttgcccaagctctgtcttcagtacctagggcaatgcttggcacagaaacatctgggaattcctagggcagaaagttcaaggactccccactccccctccccgtgggtcaaggagtgagaggtcccctctgagtatggcttcagcagaggtgacccaggggagctggctcttcagcccaataatgttttgggtgagacgggtagctacagggaatacacatccggaggtcatcattctgggtgggcaggcagaccagccgggtcccgctgccattccactccctcaagagcgcccaggcctgaacccagggccagggcctcagccaagccctctgagatgtgggagccacacctgtcacatccccttcccatcagcccaggcccccaccccgcactgctggagatggccttggtcctcaggggataagcctctgtcctctacaaactcctcttccctgcttctgaataccctttctcttttcttttttgttttacttactcccagtttcatgacttaagggatctggtatggtgaggacagtggcatctttagcaggagacccctaggaaagagaagttgggtgggtggggtaagggagagacagtcagggatcctaatgacattgattccttttgactccttcctggtgttttccttcaggaattcttttttttctctctttgtttagaaacagggtctcgctctatcactcaggctggagtgcagtggcacaatcacagctcactgcagcctcgatttcctaggctcaagtgatcctccccctcagcctcctgagtagcttgggactacaggcacacacggggaccactaagcctggctaatcatgaattcgtatgagcttattcctttaattctttatcaaagaataagatttatttaccagctcagtattctaagggactgacaatttaataaaccaattctcaccaagtgcacgtgcgcatatacctgccccgcaggttatcattgactttcacatactgatgaggttttgtggattccccacatccctcaaggatggcatcatctaaggccaggcgcggtggctcacacctgtaatcccagcactttgggaggccaagacaggcagatcacttgaggtcaggagttcgagacctgcctggccaacatggtgaaaccccggctctactgaaaatacaaaaattagctggacgtggtggcaggagcctgtaatacaagctattcgggagactgaggcagaagactcgcttgaaaccaggaggcagaggttgcagtgagccaagttcgcaccattgcactccagcttgggggacaagagcaaaactccatctacaaaaaaaaaaaaaaaaataggatggcctcatcttcatttaatcaacggaggccccaagagatgaactgatccgcccagcactccacagttagtaaatggcagaattagagctgaatccaggagcttctccaaatgcaatggtttccatgagagattttcttttttttttttttttgagacagagcctcgctctatcactaggctggagtgcagtggcgcgatctccactcactgcaacctccaactccctggttcaagtgattctcctgcctcagcctcccgagtagctgggattacaggcacgcaccaccaca

SEQ ID NO: 1243996 - DNA, 4001 bp, Homo sapiens
tttgagatggagtctcgctctgtcacccaggctagagtgcagtggtgcaatctcagctcactgcaacctccgcctcccaggttaaagtgattctcctgcctcagcctcctgagtagctgggattacaggcgcccgccaccacgccctgctaatttttgtatttctactagagacggggtttcaccatgttgaccaggctggtctcaaactcccgacctcaggtgatctgcctgccttggcctcccaaaacgctgggattatagacatgaaccactgcacctggcctctttttttgtgttttttttttttaaacaacatatcttttattctttgtagagatgaggacttcctgtgtcgcccaggctggtcctaaactcctgggctcgagcaatcctcctgcatcagcctcccagagtgctgggattacaggcatgagccgccgcacccaccctatcagctctttaatgagaggataaaggaacccagaaaccttgaatgctggttctgaaagtttggctataccaaatattaatactttgttcaccttggcatttggtttggggaccctccctaaacctacatatctgggtatctgacttatcaatgaaagccaattatcatcttgatttccataagataaattagcatctgtgttcctcaggcatttaattttttcaagtccttcttttaattttgggagtcagttttcttttcttttctttcttttttttttttttgtttttcggaaatggagtctcgctttctcgcccactctggagtggtgcagtggggtggtctcagctcaccacagcctccacctcctgggcccaagcgatcctctcacctcagcctcctgcgtagctgggactacaggcgtgcaccaccattcccaggtaatttttgtattttttgtagagacagggtttcactgttgttgcccaggctggtctcgaactcctgcttcagtctgccagaatgctggattctaggcgtgagccaccgtgcctggcccaaaagttacttttcttacagaagcaaagctttaatgcattttactgaatgcttatagctttgtagatactgaaaagagtatgagcgtcacatacagacacatctaacagcactgcctccaaccagcccctacccactggtcaggtgagtaagaatcagaattcttttctgtgagtggaacggaaatttcatctctcctcctcaggcaagtagttaagaggctggtgggagtcatggccccattttgttcaaaatacaagctccacaggaacaaaaggctgaactgctcacctcccaactgatgaacctcgtctttgttccatgtcaaaggggcctttgtgttactgcagcagaaactccagctatcaaaccatcaggtaccaaaagtaaaactcctttctctaaaaagacctctctttacctgagcctttcaatgcatctttgcccccagataatcctggatgagataatccccagaggaagaccagcgcttgcctagtgaaattatactatgagacaaggttaaaagacctcagagactgggttggcaggtaagggagtagggtacagcagcttctggaaagaagaattaatatttgacaaaattgtaaccctctgacagccatgatacatgaattgcaaaaagaaaatgcagaactttatacataacatgatctcatttttattttaattttaaaagcatgtctatatatttaattggttagaatgcaggaacagaaagaggacccaccaaactattaatcatctctgtcatacttttgcaattaactaattttttataacaacaagcattaatatctggaataaaaaataaaaattgttaaaaaaaaaaaaagaataaaattggggcctgctatatttaccttacttcctttggtggtaaggggtcaaactccactccttcgccaaaggacaggggacaaagcctcagcgcacagccgggagccagggggagagacgctggactcttcaaggacagagaagaatgcagttagagctcttacgggccatttcttttattttttatttttttttattttttatttttgtgagacagagtctcgctctgttacccaggctggagtgcaatcgtacaatctcagctcactgcaacctctgcctcccaggttcaagcaattcgcctgcctcagcctcctgagtagctggaattacaggcatgtgccaccacgcttggccaatttttttttttttttgtatttttagtagagacggggtttcgtcatgttggccaggctggtctcgaactcctgacctcagatgatccgcccacctcggcctcccaaagtgctgggattacaggcgtgagccaccgcacccggcccccacgggccatttctaagcattgcccacagaaggctgtgggtctgagcctccagctgatgggcccaactgggatctgtgtcccccatgctgggcacaccagagaaacgctggacagggagcagagaggtctgggttcaaatcccaggttgaccacgaccgtgccgtgagccctcagaggagccacatcacaagccctgtgaccctatcaacacagcaaagtggatgccccctttcactgctaaggttgtgtgaaaagctgcaaagaggaaacaaactcaagccagactgccacccctcgccctgcggtgagaaaccctggtgagccgaggctcacttcacccgaatcctcaattcgacagcgctccctctgtcaccgtctcagcaacactctagaaaaggtcaaaacaaaaaatatgctaccagggaattttttgttttctaactaaagattcaatctggccaagcgcagtggcccacacctgtaatcccagcattttgggaggtggaggtgggaggatcccttgcgcccaggagtttgagaccagcctggacaacatggcaagaccccatctctacaaaaaatacaacaattagctgggtgtggtggtacgcgcctgtagtcccagctactcaggaggcttaggtgggaggatcgtttgagcctgggaggttgaggctgcaatgagctgagatcgccactacactccagtctaggcaacaaagcgggcagaacaatagactctgtctttaaagaaaaaactttcattggtaagatggacaccaggccgggcacagtagctcacacctgtaatcccagcactttgggaggccaaggcaggtggctcacccgaggttgggagttcgacaccagcctggccaacgtggcgaaaccccgtctctactaaaaatacaaaaatgagccaggcatggtgctgtgtgcctgaagtcccagctactaggaaggctgaggcacgggaatcgcttgaacccaggagacagaggttgcagtgagccgagatcatgccactgcactccagcctgggcgacagagtgggactctgtgtcaaaaaaaaaaaaaaaaaaaaaagagagacggacaccacatgttcttcctgtcactttccgctatccagaatactcagtgaaccagagcacagcaggacttccagcccggccaatgcatgggacgttctgattaaccaagaaggctcactagaagtcagttacatcctagacatggggctagttttcacccaatttgcaggatcagggcttccgtgttaaagagtgcaaagataaacacggtgcagagcctgaactcggaagccctttatgttccctggttcactcgggatctatcattttttttgcctaatttgagagaaggatgtacatttgcgccagggtgtggagttggcagccccacccccacatctcccgaggacagagaaggaggcaaacgtttctagaaggttggctctgagacctttatcctgagaccaggacaaggtgtgtcaagtaggggcatggggtggaaatgcgaaagccaaaggggaccagaacagagacgcagagggccctgagggtccaggtcctgaacctgggtggaggcttagcaaggccgg

SEQ ID NO: 1243997 - DNA, 4001 bp, Homo sapiens
cctgaaaacccttttttttttttagatggaagtttcgctcttgttgctcaggcttgagtgcagtgatctccgctcactgcaacctccgccttccaggttcaagcgattctcctgccttagcctcccaagtagctgggatgaaggtgcccaccaccaggcccaactaatttttttgtatttttagtagagacagagtttcaccatgttggccagagtgatctccaactcctgacctcaggtgatccgcccgccttgacttcccaaagtgctgggattacaggcgtgagccaccgcacccagccgaaaaaccaccgtcttagaccatcctagagctggcagagctggcccatcatactccattaaacactggcaggaaaagcctgtccaaatcaaataacttctttaaaacatgttgagattatttgtgtacaagataaaaggaatctactgccagtataaatgcattcagattagttatgtacagtagaatttttatttgtaggaaatatttagattttttttcagatatgtgagacaccccaagagaatatcgtaagtataaactgggtttgggaaagaataatatggcagtcgggtcagattcactgtatctaaagatcttgctcctaattccgatggcatgtctgtaattgggcccccaatttcaaatttagtccactcttcttttctatacaaggagaggctttatgctccacctgctacatgacccaaatcaataatccaatgcagcagcttggggaaccctaggttttcactatgggaccaaataaactcagaatacttttgagaacttcaatcacatgaaataattatttcagagaaggatccttgtggaaagaccgtaacaggaagagcattctgaggtaacctttcccaactttctcctccacacattcttgcagaggaaattaagagagagaaaaaaattaagaaatcccaacttagtccggactctagtagtacatgtcaagcacagaacccctaatttaagacccgcgtcccgaggccaggctccctcgggaaggtagcgagtgcatcgcgataaaatctttcctcccgccttcggagtcaaacggccccgcaatccaaacagtttagaatccagcttgttcttaatgccacagtcaagagaagatccataacccgccttggtcatctgcccttctgtgttcacaaccgttcagggcacaagttcttcggtctaaccgaatctttccctgctgcggggttaagcccaacctttctttctgaccttggggagccggcagctccccgcccggtgccctcacaaaagcctttgggggctccctctccaagatgagacgtttatcccatccccccaccctcctaaatttaggacaggaaagctttagggccaccgtctctcttccgggaccgatcacacttcgttccaaataggaaaagacaggggggaaaaaagatggaggggcgggagacctggaccccggagagtcaccttccagctacccacaggaaccaagcatccgatcactcgcgcatccctctcccctcctcccccggcccgcagtgcaccccacagggagccccgccgggtccactcttgctccgacccccatttcgcgcgccccctcggctctatctcccagatcctcaggcgacgaatggaaagggggtcccttccctctcacctgggacggaggcgctcgctcatggcagctggcggatggaagctacgcggcgccgctccgcgaagagagggaacagagggggttgtgtttcggcggccgccacgcccaccccctcgggccttggctctcgcagccgctcgggtggacgcagccggtggcgagtacccctcagtcggacccgtaccaccactacttccggcgtctgctccgcgcccccccatgtcgctgccgccgtggtaccgccctctcgcggctgcgcagtggcaccatcccaaccgcaccgactggtaaccccgcccacgggaagaggcgggctcggagcgggaggagcgactaggagcttctgggagaaaggacctcccctggggtggcagaagcgctcgcctgttcacagccaacggagggtacggtataaaagtcaagccaggtttcaaataaattcaattatgtcataataatatcatacaagtatttgagttgaatccgtgtaacatattttaaaacaggcggacctatccggcagtggtgcagacggcctgacgaggttccttggccgggggttgggcaggggcctggggggcttccctggggggcttgtcgccggggccgcctgggctttcaggtcttccgaggtgaggacggtgctctgtggggagcttgcaagggcgggtttgttttccgcggcccacgttctaagtctgggggagactctcctgagcggagagggtagggaatcgggtgccggggccggcggagggtcttcctggaaccgcaggaggaaatcctcggtggggctgcgggaacggctgtccctgacccaggagctgccgggccgaccccatccactccgcagaatcagaacagctggcagaatcagaacagctttcagggaaaggaagggtgcggggaggtgggcaggctggtaacgcagcgggaggagggaaaggcggctggagagcgccggaggtgagggtgaggattagtggaactattgaggtcctccttgagcccggaggctggggaggtcttaactctctgctttccggaacctgtgtttctatttggttcagtatcgtgccgcgtttactcactgtgcatgctgccaagtcacctgtctgatcgtgtcctacacaggctgacattcacgtttcattctgccacactcgggaacggtgatcggggaagcatggggatccgggagaagcacccacaaaactagcatcctcctggaggagctcgggtaagaaaacagacacccacgtatagacgttatcgtgggaatgtaccgggatctttcaagtagggttgagtgtgaggtggagtggaggcagaaacgtctagcaggtgtcaagcccttcctaacgttgttagccgaaggtccatggactggcttcatttgtgtgtattattgtaaacaaacagtctgtggctttcatcctgttagtgtgtacctccaaagaaagaaagaatgatggctcacgcctgtaatcccagcaggctgggcgcggtggctcacgcctgtagtcccagcactttgggaggccgaggcgggtggatcacctgaggtcaggagttcaagaccagcctggccaacatggtgaaaccccgtctctactaaaaatactaaaattagctgggcgtggtggcgcacgcccttaatcccagtaatcccagccacgcgggaggctgaggcaggagaaccgtttgaacctgggaggctgaggttgctgtgagccgagatcgcgccactgcactccagcctgagtgatagagcaagactccatctcaaaaaaaaaaagaccaaacaacaacaaagtaaaaatgattactgtaatctgttggcagaaaacagttttgttttgaaggacttcgtacaggataaggtgggttggttgctttattgaatggattggtgaagattgtgtctattttgtaagtggtttcagtcaccctttttaatctctttggtagtcagaagatattatcagttgtagtactgaataatatttaaacgtttatatctaaagaattaagtgaacaaatattgtatgccaggctcagtgctaggtttttacatacagctgtgtgcaggatagatatgtttcctgccctctggaactttatagaaagaataagagatgtagaaaggaaataactttcaactaaacattggaattaaacattttcttttctggactctaaagaataacaggtacaaatatacatggtataaatgttttttttttaattttttacatcgtatatgtttaacaaagatgtcaaactaatttgccagtaatctgttgtact

SEQ ID NO: 1243998 - DNA, 4001 bp, Homo sapiens
ttacagggttttatcattagatattcatggtagcctctaatcttgttttctttcatccctgagattcccaactattacattaaacaaagctcaattacctttctgataatcattttttaaaaagaaaagaaaaaagcaaataggaaaaaaatatatatatatataatatatatatatatatattttttttttttttttttctgaaacggagtcttgctctgttgcccaggctggagtaaaacggcacgatctcagctcactgcaacctctgcctcctgggttcaagccattctcccacctcagcctcccaagtagctgggattacaggcgtgcaccaccacacccagctaattttttgtatttttagtagagatggggtttcaccatgttggccaggctggtctcgaactcctgacctcgtgatctgcccaccttggcctaccaaagggctgggattatagggatgagccactgcgctcggccaggaaaatatttgaagaggaaaaacagctatagaaactcaggtctccacacagaaggattctactctgcacttgttcactgtctctgaatgactgttacctacatgaaagttcctgatttttcccccttgggggagttactttgaattgctggcaaagacagactggatataggtcaaatcctattatcaggaactaattaaagtacaaattatttgggtgtgggagaattctactgtgagttatgaggctagggctctttgttgttgaggcttttctcttagtgtgacaactgttaagggtcaaaatctctaggtgcataacttaatagcagcattactttatattggtttcctttccccagcacagagcagccttccaattgcacagaaaatgtatcctcagtctgcgtactgaagcactctttcatgaaatcaaaaattgtaaaaaagttccagaacacccaactccccttccctctcaccacaggagctcttttcacaacaagataatgaaaagtaaaaacactgagaaatgggattctgcatacacataccttacatattttacatgcttaaagtttctcttaaaaggcatttgaattgaagcaacaaaatatgtttatcttaaggacaattcatggtttataaactaccagaaaagaagttcgctgctgaaatacaaaacagtgagttcaaacataggctttcaaaaagccacgaaatttctaacaaatacaaatgagtgtgtacatatatgactatgtgcacatatgtactgttttgctggggacagggtacacagcttcctcaaagggaccctgatttggaaacagaaaggttaaaccagtataatcaactaaggtcattttaaattactgtttaagtaaatttaattacacagcagatactaggttatttaactcaagcagtgaaaacaacagactatgtgaccacacttcctacctctgtgtcccaggaatcctgaaagacagggtttctgctacttcttttggtctgggggggaagatggttgtcttcttcgttgccattccttctccttttcctgaaattaaatcacaaggagaaaaaaaaaaaaacccaaacaaccgatgttttggacacttgaattgcaaaccataacaacatataaatttgccctctggcctgagaaaacataattcagcatatgatatcccaataggttatcagttggaagtacagcatcactggacactaagagcaaaaatacaagacagcagcagcgaggtcaagcttaagttagtaaaactcatttctaaaaagaagcttaacaattttaaatgtctgttgggactgaaacaagaacaggaagaggttaatgactaagctttcaacctctaacctaattaaggttttcttctttttacactccctgaaattaggattccgagttacctaattgtactcccttccatatgacaacatttgatataagagtggctgcctttgcctatttgccctgaaaacccttataaaagtacctcttggtcacattcacctgcttattctggcaacactagccggtattatgatataacaattacttcactagattgttactatgagatgatagcataagctgcttaaaatttccaggtttaaagaaaaatcacacatctttcttaggcaagtgttctcggacatgcaagaaagaccaaatttgcatgtactctatttaagaattatgtgctgtcaaaacgatttctgaacctgttagaaaacagaaataaattaaaggaggtataattttcagtcaaattgcccggaactgtactgtccaatacggtagccactagccacatatggttatttacatttaaattaactaaaattaaccatccagttcctaggtcacagctgccctgtttctagtgctcagtggccacgtgtagctagtggctactgcactgaccagcacagataaaggacatttccgtcactgcagaacgttctccggagcagcacaggctagaggtctgtatgtacatggcagcagcacctattacaaaacccttgaagtttcagctttctatagttaagagacaaaaggctagtgtggacacacagctcttggaaagcatgtacatttggaggatatagtgtcttctaaataattatacactttctatgagagtagggtggcttacagtggcaggcctttaatcctaaaggttttgagttgaggtttgaatattagagaaaataaatgatcaccctaagctcacttctctgtactctgcaacattctgaataggtctaactttaataatgagtatggatcccagcttaagtttggaataataaagagtgtgtggttctgataaagcttcaaccatcctgcactgggctatgtaatttacttcattctaagacatttctgctccccacctttctcttaggagatcagatcttagctgcacattactttgaagtagttggaggttaaaaaaaaatagatgaatatcaggttttaataatcattaaatgggtgtgcttttatcataaatttgaaccaagaaactgctaatttcatcctaatatgatcagggaatttgagtgggagtgttctgcagaggcaaagcaatgtctgctgggaggccagtcgacacccaaagagaaagtcattgagtaagtagcagctgctggtcctcacacacccattttatcagcgtgccaacagctgactgggctttgggctgctgagtcactctaaccaaacttaggagcctgatcaaaatttgctatctcctcatttataatgggggatagatctttccagggacaagactatgaatgtcaaggaggttgcatggcagagggactgtaagaacaaaaaaagatgagatgattttgtggatttcaactaatctctgggagagtcacatgaaatatccctgcctcataaattacttgatctctcaaggcaccagaataatctctttggcctgttggtagccttctcctctggatggtaccagattaagaaagagtcctacctgctcttcatttgcctttttctaggctcttagcagatctcatccttgaaacattcttctttcaacaatggtgttaacaactggcaagattacagcttcatgctcatccctatcagttcaatcaatcagattacaatttttggcattaatgccacagaccaggttatgattttagcaggcacccctataactgattatattcttccctaaccatctaggtgcagattaccagttagcatctgttacttctacagatggttgattccatcacgttgcattatttcatttctctccaaccttcctgtcatctcctagagactcggcatagaaataatcttaagagtatgggctgggcacggtgactcacacctgtaatcccagcactttgggaggctgaggcaggcagatcacttgaggtcaggagttcgaaaccagcctggcccacatggtgaaaccctgtctctactaaaaatacaaaagag

SEQ ID NO: 1243999 - DNA, 4001 bp, Homo sapiens
tctataatagacacaaaataactgatcttaaaatgattgctaatcagtttccagctactatacaggtaggctttctgttgttttccactaaaagtgactaaggttccggttcttgttctaccaacttcccggggtttcaaggaagcccaaacaaaaccaacaggtttgtagtcttgtggtttgctttataactcatgataggcatgagttagtctgggcattgccttactctacaccaccggattctaaacatacttttactacttggtcaccatcttgctaccagatttgaccaagtttctgcatcccaagatgtgatgctaacatatacagtgaaaagtccagaaagacttgggggctttctatctcagagatcctcttaagcccattcctacctagcaaggagtagccctgtagtagctactacttctgtaatagccctgcagaagcaggaaggagatgtgcagtaactaggcttggtaatcatcagaagctcaagagactctggtttagagaatgtcattaaccgttaagacggcaggaatcatgatttttgtacatttggtagaggctccggctttggaagtgtgcaatgatcttttcacatctggtgtgaatcaaatgcaagcctcactttcaacttattgccaacctcctcatgcaagtaggttccttttccccttcctaagtacttgcatttgtgggatcctcacagatttgagtatcaaagcaaggttaagtttgcttctccctagtttccccacagccaccacatcaagctgttattaagaacccatttcagtgctgttcagaaagtggggtacttgccaccatgcacttgactgtagccctcaccccactgccacgttggctgcaatgccccggacaaaacagccttggtgggtagaggggtggagggagtagaaagaaaggtagggggcaaaactgcccaggtctcccccccgctacacacacacacacacacacacacacacacacacacacacgctcgtacacaaacgatggttggaatgagacagccatattaagcaggtcaagaatctgggaacgtacaacttctgggacacagggagaagaatgcagggagctgggcatttgcaccacggtaaaagccgttaaacttagtccagcgggctgagatgaaatcagttccaggaggtggcataaagggaagcgcacgtgaagtggtggagaatggaactccagcgcagttgagagggatgctggggccaaactcaagctggagaagtaacacacggctgcacggggctctactccatgcccctccccctccccgtgcaatagtccagcgcccaccgactcctgctcccagcgccagccatccgcacggggcgcccccaccacgcgccactcctcctcacgcctcgctcccaccccctgcatcttccactcaccccacacgacacctctgcccacttttcggttacgcccccaaagccagcctccatctgccaggtccctcccctcacctccgggacccgactccccgcacactccgtcccagcggtgctccccacgtttcacggctcctcgctcttgctccctccgccctcatagactctgaacgccccctttctcttccctcgcccccatccactttcccctcacacttctccccgtccccctcccgcggtcacgcgccccccctcccccaatggctccttccacggcacccgctccaggcccggctcacctgcacggccacccccgtcccggcgctggtgcggctgctgcagctggaaggggatcgtggccctgagcggctgcagcccagcccggggggagccggcgggggctgggggagagcagccccgccggagccccccggcccctccgcgccccggcccccaggcacctccgcctctgccgcccgctgcggcccccgccatggctctcccggctgcctgcctcagccccactgcgagactcacacagccccccaacccccgaggccgctgcttatctgctgtacggggcggggaccggccccctcatcctagagctgtcattggactgcggaaacccagaccttccaccccagccaatccacagcttagccttccctttcctgaggatgattggtcgatgagcctagcgatccaagccaagaccccaccctcacaccgcccccttcggttttccaacatcccaggggctgctgattggcctgtacagaagagggctggttctccagcgccaccaatgagaagacgcagaataggggagcgtcacacccagtcccaggtagtatgcaaatataatgtcacgtgacgtcaggctgagctggagagtgggcgcggcgctgggtgtaggttggagtcaaacactagtgaaataatttttgggggcgggagtagggagcagtgtcaaactttacacagttgagtccctgaatcacagagaaagcgataccttcaaaaagtattacatttaatttaacctaaaaaacattagttttaaatccttataggatctcagtgctacttacaagctccaaactaagatcctacaaattaatgcaaggtttgcatatcatttgcatgtgatttgcattatatttgtgtatttaatggcgaccttgcctcgtgtgacacttacatctgtctttctccacgtttccaagtccctacttggtgttgatccaaccttaaaaaaacaattgctagcctgtaaattaaattgggactctgaaaagaagcagggaatttcccttcagagtcgtccactccaagtctagctcagcagagtgaaaggaacaaagcaactgaaaaacttgcccaagtttgcaccgcgactccgttaacaaatcctggtcttccaagatcaatgctctctgacttacaagtcagaatgagactggaaggtccccaaagagaatgcatgcagttgtgaaaagcacatgatataataatataaagggatttgggaaagaaaataacatttaagatactattaaaaagtattatgcttcaaaagaaaaaaaatattactcttggtatttgttaaccattttgttctacatatggaaaaagcaaaagtcaatcaaccctggattgtctgtgattggggaccattcaaataattgaataattccctccagatttatatttagctgtgaattctatttttgatcttgctacagatttttctttctatttctgtttttgcccagtttaatgttaaaaagaagatattccctgaagccatactaactaatcagagaaaaagaggtaatctgggagcctgctgtgaggcaaagagaagtcattctgggattaaatattgaaagtagataatacccaaagtggaaattcaagagtgggttgaatattaaaattagcctacatacactgaatgaattgaggcaatggaacataccgaagaaaggttttctttgcaaagagtgtactcttgcagttttgaaggatttacttcaagatctgacatttgaactgtttttttaattgattgaagaaatgctgtactacttttccatgaagaggacaatctaatcaaagacagagaagaataaacaaaaattgatgaactgattaaaaactcagtctttataagattaattaactcagttgaaaaaagatatcttgcatttatattgttcctcaatttcaagtagttcaaagtcttcatgtacttttaagaaatcctcatgacaatctggaaaaggaaaaacatggattcttaccatgttacaagtagtgaaactgaagtccaaagaagtgagtccttttgattcctagctcagatctctaacacatcatattgaaccaccctgcctcacatcttcattaataaaatcagtaatggtagcaacgaatattcattgaattcctttctccatgctaggtacatgttaagtaccatgcatactttatcttatttattgctcaagaccacacttgtgaaatgggtattatttcctcttcattgagacttcaggg

SEQ ID NO: 1244000 - DNA, 4001 bp, Homo sapiens
aagtggaagttgcaatgagccgagatcataccactgcactccagcctgggtgatagagcaagaccttgtctcaaaaaaaaaaaaaaaaaaaaaaaggccaggcgcagtggctcacgcctgtaatcccagcactttgggaggccgaggcaggcagatcacctgacctcgggagttcgagaccagcctgaccaacatggagaaaccccatctctactaaaaaaatacaaaattagccggttgtggtggttcatgcctgtaatcccagctacttggggggctgaggcaggagaaatgcttgaatctgggaggcggaggttgcagtgagccgagatcacgccattgcactccagcctgggcaataagagtgaaactctgtcttaaaaaaaaaaaaaagggaaaaagcactaccaaaaataaatgaagaacgtggtaggaaaagtttaccatcgagtttgctaaaggctctggaagccacaaatgccagagactactgtgacacctttaactgggtctctttcaaactgggagaggattagcttaatagctgaacactgttttcgggtcaatgaacttggaattatttgttctgcttcagctcactgaaaatctttcagataaaggataataaatgttttgattttaaaacaaattttaaggggaaagctatttttagcaaaaacacaattaaaaaacacacatattttgttgtttcaggcttatccagaatagtcttaatccattcagcagcagaaagccccctataagtcagttcccttggaacctcctccattacaaataaatccaaaattatggttggtagatcctatgaagtcctaggtccacttcaggtgatgacaactgagagaagcagcagttccattttcacagagcatgacacacacaaataaagcatatttacagtgctacttttccagctcaggaaaactcacacacagtattagacatcaatttccttgcctataaaccatggctaaggatgcctctctaattccttggaacagggaggagttacaatcacaggtggctttgacacgcgtgtaatctccgtcatcatttcctaactgttctttaaaagcttgtaattttctttcaattttcagctttgggggctcacactgacgcttagacttcataaacttccttcctagatatataacatgctaattcatgcgaatcgctcaagcttgttttataatcacacctatggatacctttgcaagacttcacgcctctactccaacaataaactactaaaacctctggaaacaatctagaacttgcacttgagcagacaagagaaaggaagtgatggctttaaagggacgcagctttgtcgggctcaaaagaggagccctcgctcactcttgagcggctcaagatgttaccagaagctcccgccagatgtgcggggcgggggtgcgggcacaggtaaggcagagaagatgggtggacggccctgggaagaactagggtgccgaagcctgcaggcgggatggagtggaaggaggtgaggcaaaattaggcaagtacaggaaggagccagtgcagcgaagaaaacagggcaggcgagaagtagagccctagaggaaccaacgaattcgggactcggagggtttccgagggtccagttctctcaccagaaagccgcgttcagccccaggcaccacagagcgctcctagctggccgctcccacaccagggctgcctgcacccgactcagcagaggctcgtaaggccccagcacctccaccagggcccgctgcgccgcctcaacctgctggtcccgctcccaggagcctgacacatctcggcggcccctgaaagtcgaccccgaagccgggcctggggtcgtgggaaccccttcggcctcagccatctccccgcggcagccacaacatccggggccgtggcccgacaagtcacaataacagcaactgcgcagatgcgcgattcggcgggggaggtggcttcgcaccacagcgcgcttgcgcgcaggcccaagcaggcgcccacccagaggggagggaggacgccgtaccccgccctcactgaggcgcggagccggatccggaggcgccgagccgcatccggagccgcgcacgcgcaatctgcatgaacgaaggccagtgcttaaagacgtgccattcattgccagaactcgattctcattggagcggaggaagttcgtgggtggagctggttgtttggcgcctgcgtcttgcggcgagcgggctggcgtgcggcgccgttgcgggcgggagcggctgcaacgccggtgcctgaggagcgatgccgagggaaatcatcaccctacagttgggccagtgcggcaatcagagtgagcgaaactccggcccctcagctagccaggttccttagggtcaatgggatctcgctgtgggatcctggactccatctgtccttgccagaatcgtagttctctgaaaggcgagacatccctgacccagtgtccacttgcccaaccccgaggggccctcccctgcccagtccctggcgtacagtcctttcctcagacacgggagagtcctgcggcttgacttcttatccctggacgcaggcgcccagtcccccggctcctgattggaacctgcccggacctagatatcttctttctcccctgcccgccccttccccccagttgggttcgagttctggaaacagctgtgcgccgagcatggtatcagccccgagggcatcgtggaggagttcgccaccgagggcactgaccgcaaggacgtctttttctaccaggtgcccccagcgacttggccgggggcggcagttgcccaagggggcggaagggaagggagtggcctggtactgggaaccccgctgggcagtagggccaggcggctggcttgaggagggagggccggagggagccagagttgggaggacttcggacttgggccgccctagctgattgggccccctcctggactccccttgacaggcagacgatgagcactacatcccccgggccgtgctgctggacttggaaccccgggtgatccactccatcctcaactccccctatgccaagctctacaacccagagaacatctacctgtcggaacatggaggaggagctggcaacaactgggccagcggattctcccaggtcgtttcctattccctggcagggcccacaactcgctgggtagggacaggctctatgacgtcccgaagagagggaaaaccggatcagggatgtatgaatgctggagggagagacctggctgcagggagtggactatgtaatattgtcaagcgcctacactagctaatgcagtgtgccaggtcattctaagtgctttacatatattaatttttctaaatctcccaacaaccctagaagtaagtactacaggtccacagtcccttatctgcctttccaggatccagaaagccatgaaaccaaaggacatttcataactagtttatcagcaaaaacaaatttcaatgaagacaggctgttttatagtttcttttttttaatttttatttatttattttttttgagacggagtctcactctgtcgcccaggctggagtgcagtggcacgctctcagctcactgcaacctctgctgcccgggttcaagcgattctcctgcctcagcctcccgagtagctgggattacaggtgcttgccatcacgcctggctaatttttgtatttttagtagagacggggttttactgtgttagccagggtggtcttgatctcctgacctcgtgatccacctgcctcggcctcccaaagtgctgggattgcaggcgtgaaccgccatgcccggccctatagtttctatccaacttactgtcattagtgatgccttttattacagaaatactaatatatttgattaacgtgcttctgattaaataaaaattcccactggaattttatttaatatatagtatatataccataatacctttctaaaatctgaaatat

SEQ ID NO: 1244001 - DNA, 4001 bp, Homo sapiens
tgccaacacccattaggaattcggagaagctagaaggtcctggctactcccacctccatcccgggcttaggaacagctggatagagcagctggggagagggatcccgagtctgagatatggtcatttgagggaatgccttgggttcaagagtcagagtttcagaagagggagggggctggggaaacaaaactggggtgggctggtaaggatctgtgccaaccttgcgggtgggggagaagggagggggcaggtgcctagcagattcccttccccctttccctcaacctgggctccccgccagctgccccagagaacccccaatcctggctctattccagccaattccctgggccccttcccctgaggtgcagggacttgaggggaggggcgtcctaagaaactagggcttcttcctactaagaaaagcctgatctcctccccgagagagctgggggagactgaggcagagggtgaaccctacccattcctcgaagcctgacattccatatagtatccacctctcccggctctaggcctgcctcagtccaggaggaaatccgaccccctcccttcatccggaccccacttccctcatccagacccccccactctgcttttcctgccagctccttagtgtggggggtgaggagtgaatactgcttcaggcagggatggggcccacaggcaggagagggagagcaggacccgggaggtggactcaggactggagtgggcggaggcccccaagcgtccaggcctgcctgtgggatgtgttgtcagggtcttgctcccccaccctttcctgctgcaggagccggccccacccccacctcacacacccacctgcgcccggtgagtcgctgggaagggtctcctccactgcgaagatgtgagatgaggagggggtgatatgggggcgggcaggggacaggaatgccaggaggcctgctgaatggggggggacccaggcacctgccctcccagccggcactgcccacagccagctagctcagcatggctccacgaccacaagcctgccatgctccctcagctgggaatcacaatgtacccccttttcttagaggcccacaactgcggctcgtcctccatcataggctcacaagcatttatttggtgcaccccaaactctaaaccaggggggctggctgggagctgtcaggctccagggcaaagaaccccattagagcagtcaatcccgcccacagcctcacccactcccccttctcccctccccccttcaaacccagctccaggctcccagcctccggtcccggcctagggtggcagcggatgccggcgcccccaccccgccagggtcgggagcgagcaacccgcagggggctgcggagcaggcgcccgccccagcccgcccctgggcgggtgtcttcggtagacaatggctcaggcagcagcgcctcgcggaccaggagggagaaaaacaaatagggagagggcggcggcgcagatcctggggaccctcgcactacccattgtgtctccccaagacccccgccccggacggcctccctctccccgcctccactttcccccagaagcgccaaccccagatcgcttagctccccccacccgaatccagggaacagaataccactcaattcacgaacgccgcgaagagggggctgacgggcgggagcctgatcagggggcgcaggcccgcgatcgcggcccctcccggctgagactcaccctgcgggctggggggctccggcggcgacttgccgggagcccgggaggcgctgccgagcagcagccccagcagcggcaacagccgcgcgaggacgctggggccactcgccggcggcatcgcggggctaggccgggccctagcggtccatggctcccgcctggtcccgctcgcccggccccgcgcagccccagctctgcgccgcgcctcgcagctccggctcccgctcccgctgcggcgcccgctcagcgcgattgtctccgaccggagccgccgcaagcgccccctgcaggcggcgcgccacaccgctggccctccggcaccgccccctcccggccccgctccgcccgccgccccccggtactgcccaccttcagcccaccccgcagcccccgcgctctgcgctcccagactctgcgctgcaaaggagtgtcgggattagggtcccatcacccgggttcttgggtttcgagagtccccaaaatttggtgcaaaatttgtgtgtgtgtaggtggggagtggatattgcctacaacactctcaaggggtacggtcatgaaagtctcagaaaactgtaagaactccctgctcgatggcccccttctcccggtagaacacctaggcagtgctggggtgatagcagggaaggccccctagacccccctaagtctctcttttttttttttttgagacagatttttttttttcagagacaagtgaacatttatttttgggcctttcttcctatttcaagtctttttcaaaacaaggccccaagaatctccaaattcaattatgtccctgggcttggccgactggtgcaggagtcttagggagccttgtacaaatgctagagttactcacttaccgacattaaactaaaacgctggaatttttccttggaaactggactgtgattagaggtgcttgccatgaacataagctactgtttcttctccttctttttttttttttttttttttttgagagagagtcttgctctgttgcccaggctggagtgcagtggcgtgatcttggctcactgcaacctctgcctcccgggttcaagtgattctcctgcctcagcctcccaagtagctgggactacaggtgcacgccaccatgcccggctaatttttgtatttttagtagagacagcgtttcactatgttggccaggctggtctcgaactcctgatctcaagtgatctacccgcctcggcctcccaaagtgctgggattacaggcgtgagcttctgtcttttctttgacccttcctttccagtttttgaagataaagctggaaataatcttctctgaagatacttgataaaaattcccaaaaaaacaaaaacacatgcttctactacccatgcttccacttcattaataaaaatttactgcagtttggcacctgggtctagttcagctggcggatgagctgactgatgcgttcaccctgatagccaggtgtgcccatctccttgaggaagcccactgtatttttggtagcatgacgggccactgagaggtagaaagggcgtaacaaccatgagacctcctggaaatgcttccctgggacggcaatttcatgactgaggtcttccaagcaaacgacaccaaacttccccaggtgcttctcaatcactgtgttgtctgtcagaggaatggtcttattccttattcctgaccttggcttgtccatgtttcaaaatgagttcctggacagacttcagatttggaaatccccaggtcacataaggttccaccatacgcagcatttttaggttctggggggtgacttttacaaagacaccactaaaaattttctttaggcaaagtcttacaatggttctctgcaccagtaaactcacgccatcaattctttcgatgtgtacaacaaaggccaaggaatgtttatctggcaattccaaggcatgatgtttcacttctagttgtctgagatgcactttgtcacatttctgccatcaggaatcatgtaggaatgattccagttgcttaaacctgagcccttttcctttcctctgctctttctttgacaaaagtgcctgctttgcctgggtggctttgagggcttggtaagcctttttttcaggagattttctagaaccaaagggatttttctttgctcttgctcgccatttttctagtgttgcagctaccgatcattaagacagagtcttttgctgttgcccaggctggagtgcaatgatgcaatctcggctcactgcaacctctgcctcttgagttcaag

SEQ ID NO: 1244002 - DNA, 4001 bp, Homo sapiens
catgtcactgcactccagcttgggaaacagagacagagcaagactctatctcaaaacaaacaacaaacaaacaaacaaaaaagggccccatctctgctctctgccctcaaaaaaaaaaaaaaaaaaaaagaacgaaagggatgctgttgattatcaagaatgaaacaactcttctgggtaaactggaatgtagagtcagcccactcttaggaaggtggaggcccagaaaagcactggggactgaaagaagagactgccaccagccacagcaaacacttgtcgggctaagggcagggcagccaccacgctgggcccttacacacattgcccacatccccacagctggaccagaaagataccctgagaacttccagttcagcgctgaaggagcctgccaccaagcagcggtgcccctcccagggcctccggggccacagcatttggggctcagcccgaatgctgcagctggcctgagcctcccaaagtctgcctccactctgcctgcaccctacagcaggtttctggactccctgaaagacccactccctactgatacccatgtggctttgctcagagactggccctccctccagatagggaggggagtcgcattgggtagaactatgtagaaccttcctcctccaggggacccaagggctttagagacttccaggtggggaggggacagaaccccagtctctggcctcccagtcccaaattctttcccccacacagccacatgcctaagaacaggccatgaggtaacactccagcaacgtgacaatagtgaggttccagagttagaatcagtgacgccatcgctagtcaccatgctcctccggagtttctgagattcaaagtttctaagactccactttctcttcgtgttctgtgtctttttcagccaacgaggctagaaaatgatctattgcccaagcaggcgcacgaggatacggctgtcacagctgccacactggcacctcgtggtcccttgaagaccgcccagggaaagcctctaagcgctgcaccacctcctcaccctctcccctgggtggtggcagcaacagcctgagcgtgtgcgccctcctccccatcctgatcccactcaaaccacaacctcccctgactcgccccaaatccagccctgttggctcttccttcacgtcccacttcccaccctctctacacgttctcgccacatcccacccaaagtccactcactggtccctgtttacacctcagggcctttggtcaagctgtcttctctgcccaaaactatcctactcatccttggggatccagctgaaagaccaccttcctgcgacggctacccaggggcaggagggagagaagcacagcccgtgccccgtatggctcccgcccccgcggtcacaaccaccgcccagtgagtgcctagaaggcaggcggaggccccgttctccccgttaggcccagcatcaccgcccggggagacgggaaagagggcaaggccgaaaaatggacagaaaaagaatgcggacggccgggcccgcggcgctccgagaatcggaggcatcctcaggcacggtccctccaggagaccgggaaagcggggctctgtcagccccaaagccccgacggcggcagaaggctggcccgctgcgagcgtccggcggcgctgggtccccggcacctgcccctgcctgggcgggaaaggcgctcagtccgagccgcgccctccccacgcgcgctcccaggcgccccgcgggccgcgccctcctgcaggtgccgggcggggaacgcgggcccctccctcggaccccggctgcccggccactcccccgcgcccggccccgcccggccctgcagggcacccgcggccgcgcggcgacaccagggcggggcccagccgcgcccgccccgccccgccccgtccccgccgcccggcgccgcacccgcctcacctcgccccgacccgccgccaccgcctcttccagctgggaggccccgccggaagtgacgccaccgcgggctgcacaggcgcaggcgcagcgcgctctcacgtgaccgcccggctggcggagggcgggggcggccgggattcccgtgcggggttggggctcgtggcggaagctccggacctccctggcccgaacggtgagcgccgccggccactgggagcggccagagcccagtaatcaggacaccaccacagggaccacgtgtgtagacccaggccccctcacctgggagtcacgtttattgaaaaagtaaaaagtgtcacagtaaaaaattcacctggggacaaagccaggcctaggaggggtggcggggtcgtggagggacgggtccggccgcccctggcccacgggtggggcacgtgctggcccatgggcgacgcgcggcttctccagggaggcggccctgggcgcgggggcgggcgggcaaagctggctcagtccatcgtggtccctttgaagagctccaccagctccttgtagtccgggtcgatgaggtcggagggcaggtcgccatcgtcgttggttgcatccctgtccgctcccagggagataaggtacctggggtgtaaaggtcgctctggctgaagcggggaggagccaggagagtgctcgccccaacccgggtcagagggccagagtcctggggtcacctgtgtgtcccccaccttggggtcctaaggtccgggtagggtgaggaggaagaaacctgaccctttggaagctgtggccagcttttcaagttggttctattgaggacaaaggcagaaacaggattccagaagcctctagggtttgcagggttctttttttgttttttttgttttttgagacagaatttcgctcttatcacccaggctggagtgcaatggcatgatctcgactcacggcaacctccacttcccgggttcaagtgattctcctgcctcagccttgagtagctgggattacaggcgcgcgccaccacgcgtggctaattttgtatttttagtagtgagagggttcttgtcacgaactcctgacctcaggtgatccgcccacctcggcctcccaaagtgctgggattacaggcgcaggcgtgagccaccgcccccagcctctagggttcttgccgacaccacccgggctacattttggggctcccatcctggggacccactgaggcccggaggggtcgggttcaagcctgtgtagacccagggccccctcacctggctatgtcagggtacccatcgctgcaggcaatgtgcaggggtgtccagcccgcctcatctcgctggtgaatgtcagccccgtatttgaccagcagcttcacgcattccaggtttccagagagcacggcttcatgcaaggcggccaggcctgggcagggaggacgggaggggtcaagactgagccccaggtcaggtcctccttgctggcctctcccaccaccccacaggccctggccagctcttccaggctttgctcacctgaggggtggatggtggccagggagactttccgagtccggatgaagcgccccacctgctccaggtcaccctgccggatgtggtccaagaacaggacatcattagggaaacgcacgctgcgatcagccagcatccgccgccgccgctgccgtgggctgtagcgggcatagcgggcagttctgctaggcatcttgggcgctgtggggcaggttgcccctggggaccctactgcactggggttaataatgtatccggtcccgaccagatcagcttgagggctcctgtcggacgagccccggcctctgacttgcttatatagggctcaggggctatataaagctgcacggtcatcctccccggcgcgaggggctgaaactgagctgcacccccgccccgcaccccagatcatgtttagtgactcatctttcagcccatctgtcaccgtgcccggccaaaggggtcagatcattcctgcctgtcgctccctgccccacagctggacctagaaggtgccttaccgagggcaggagga

SEQ ID NO: 1244003 - DNA, 4001 bp, Homo sapiens
gaagcaatctcaaactgccttttattactgcacacagttaacgtggaattgagaatcactttctttctaacataaaatgtgagccgtagagttactactgaaattcaccacagtgattcagccaacaactcaacttattcctttgcaaaaatttctgaaggtttttttttctcccttcaatctcagcattacaaaataatgagcaaacagttaaattggcccagctctgagtttcaagagagatttatggtctgctcatcctctggagggaccataaaaccaccgatgacatcttactttgaaatctcttgtattaagtaaagagatgggtgtggtgcgatagtgaactctgcatgtgagtggtatttagacaagttctgtacttcaaaacagagtccttaactcatacgaaggcttcctgccactagcaagggatctcagtaatgagcgtgctgccttccctaacacccccatccttttccagaaagattcttaattttatcctaaatatatttgatattttttcctctgtattttgctttgggtttaaaaaattccctgaaagatttttttctcgtctgtggaagcatcaagccgcagatccaagtcagtccaaatcaccaggatcatacaagacgataaaagtgccttcaagttctaatacttgctggatgggcccaagccgcgttttaaatgtgaacaatggggtggctgcggcagagaactgaccatttacttcctgcctcagatgacccccttgtgatctctgaaactgggcagaggaataaggaaagggaaagaactgggttttggggagaaacatgctttctggaaggcgcccaggtttacccaaagagcacagttaagtgctgaatttcaactagctctggagtcaccctgtttggggcctcattctggaaacccgaagtccagcggcagctttcctccacatcaggacagagagtggggtttgggagcggacgagggagcgggagtggacgagggagcaggagtggggctcaacgacgacccaggcgctcaaggggaaggggctgagagcgtttcttcgctgtgcggctgcaatagaaactttttcctcgtactatctgactccgggactggactgtgaggtctgcaacagctggtggggttcgggtggggaacacactctaagcccagcgccagggctggagccgtgggtggagccgctgcagccctgggccgggggcgtcaggaaactcgagactggggcgcggggaggccccggccagagcgcccgctctcccgcgtcccgggcggggtcctcacctgttccagcgggccaccttcctccggtaataccgcagcgcctcctggctggccaggagcgagtcctcggctcccaggagaggcggctcctccgggacgttgtacagcgggtgggcgaagagggcctgcaacttggagctcgacccgctgtggctgccgccagccggttcagtccggggctcggttcgggaaaagttgtgcacgatcgtgccggggtccgaggcagctgcggccgagtcccgcgccagggaggaggcgcggccggtgcacgggcacccccgcgggcgctcccgaggccgcagctggcgctgtacttggggccagaggtggaagtagaggtcggcggagagcagcgcgcccagcagcagcagagtcagtaggcggtcccggcgcagccccggcatggcgtgctggccaagggggacgccgggggcaggccggctgtctccggggtcccgggaggggtcgcggggtgcgggcagaagaggtgcctggagtcccgcgggtgggccggggtcagtgagaccggaatgctccccgcgcgggctagtcccctgtggaggggtgtcgctcctcaacttggggaccaggtgcacggagcaccggggctctcggagtcagcgggcgtcgcttctccgcgccgagtgagccgagggaatggggttcccggggtgcccgcttcttgcgccttttctcccgtgcgcccgcccgcccggacgctcgcggcaggtgaagggccccggggcgccggcgccggctgccaccgcgggcggacgggcgacggggcggggggcgaccgcggagggcggacggaggccgccggctgcaaagcccggggcgtctctcctgaggatgctgtcgctcggcggcggctgctagtgctcccgcgactcctcctgcgggcggcggagacgccagtgccggcggctggcacgggcggcgcgagtggggagttggcgaagcaggagcggctccggggagcttgtctgtgcgcctggactcctagaggcagaggtagcgcggggcctccccgagcctggcctggcgccggcacccccacccactctccgctggcacctgcctctggcgcagctgacggccaactcccgatccgaagccggcgctgcccttgcaccttgtcacccacccactgcctgcgccctccccctcgctcgggcctcccactttccctgcccaggtctcaatccagtcactttaagggactcacgcgaggggtccgaagcctctttttaccatttctattatttttagggaaaaaaaaaccaccacaagccccctaaaaccctttttttcctgtaagctttgccaaatgagtgtgtgggggggggtggggggaggcgggggtggcagtgttggtatctgttctttctttgtgttcccttccacctccgcccccctgcagagcgcagggcacatcaagattcataacaactacctaccacatgcctggcacatagtaggtgctcaggaaacacgctcttggtgaaggaaagagcttgacctttaaaagtaaggtatcagttttacctagaatcttgctgatttcctgtttggaaggagtttgattccaactctgcctgtactttaaaaagaggaaatgtttcttgcactcagggagggaggggccctgatgaccccactccgaacttttgagtttagcttggtgtgaaagtagtccacccaaatgaatcactggaggacacatttaggctttctccaatattctgtgaggtaatgtaccctccccacacccagttttccttttgaagaagagggagggagtcctgaactcctggctcctctatttaatgaccccatagtatagtaaagtgaagtctgattggagaggcggccccaccctgctgaatttcaggaaatccaccagaagctgcttgcccaggcagcaaagcttcccatgtaagttagttctactctttaaccccctcccttcccttgctggaattgagaaccctcagacatactttgacttgtgggttcagaccagagttcttttccccgtggttcagtgtaagatttcttcgggactttgcagtctcctcaaatgtaaatgaagataatgatggaacctacctcctaaggttattatgagacttaaatgaattgaagtacaattatgtgtcacgtctgagaaatgcatccttaggcaattttcctgtgtgtgtgaacatcagggtgtacttacacaaacctagatggttcagcctactacacacggaggctacatggcatagcctgttgatcctaggtacaaacctgtacagcatgcgactactgaatgctgtagggagttgtaacacagtggtgagtacttgtgtgtctaaacataggaaacatacagtaaaaatacagtattgtaatcttatgggaccactgttgcattgactaaaatgttatgtggcacttgactatgtataaattacttagaagagctcctaactcatcctaaataagtgtgaaatatgtgtttgctatcattatgattacttattagttcctgtagtacactaggcttggttagagactgctcatcgctaggacaaaaatagaaaaggatggaaaaggaagatagcaggaaggaacctgctttcaggggcataacattgtggcctgagtgcccagtccaagtgaaaaagcccaagacggtactattc

SEQ ID NO: 1244004 - DNA, 4001 bp, Homo sapiens
aatcccaggtactagggaggctgaggcaggagaattgcttgaacccaggaggcggaggttgcagtgaaccaagttcgcaccactgcactccagcctgggtgacagagcaagactccttcacccacctcaaaaaaaattataataaaataaaataaaaataaagataacaaaatagccaggcacggtggctcacgcctgtaatcccggcactttgagaggccgaggtgggtggatcacctgacgtgaggagttcaagaccagcctggccaacatggtgaaaccccatctctactaaaactacaaaaattagccaggcgtggtggtgggcatttgtaatcccagctactcaggaggctgagacaggagaatcgcttgaacccgggaggcggaggttgctgtgagccgagatgatgccactgcactcctgcctggcgacagagcgagactccgtctcaaaaataaaataaaatataataaacaaattatattttcacatccctcactgggcagccctcccagcttgtctcaaactagttttcttaactcttttttccagacggagtctcgcactgtcacccgaactggagtgcaatagcactatctcggctcaccgcaacctctgcctcccgggttcgagtgattcccctgcctcagcttcccaagcagctgggattacaggcgcccgccaccacacccggctgattttttgtatttttagtagagacgggatttcactacgttggctaggctggtctccaacttctgacctcgtgatccgcccgcctcggcctcccaaagtgctgggattacagacatgagccactgcacccggccttttctcaactcgttaaagcacattagtgccaactgtgttataaggcaacatgagttagctatgttcagaaaatattttaatagattggccctccatcctttcgggtgaggagctgcaaaccgtttgtaaaaacgccggagtacggtatttttcctacagaagtctgatggctaatttatcacattacagaactggtagttctgcacatggtctgctgtgcccataaagaaagcacatatgtgtctactgaggttttacaaacaatacgcttcttatcttaacagagaaatcagtcattccattaacaacggtaaggtctaaattccactaacattgttggtgatacattaacatcaacatagtacttacaattcacaatttgcataaacaatctcaattacataggtgatgcttgcaatagcccgtttgaagcatgacatcttcctggtgttcagaaaggttaagtgggacctgcccaaggttacctaacagctttatcaatggtggacttcctttcgaacctgcctgactctaagcccctagctcttttccctagacccctcccggctttcaaaagagggttcccgactcccatcctctacccagagcagcctattactccgggagaccgacccttcccctgcctggttcagaggtggcttcttaagctccagcagagctttcatcctccaccaccctccccccgcaatcattctctgaaagaagcggaaaggagaggcgaccaaaagctcctggaggaagggatgatacaaatgggctgcttcactccacagcacgcaaccccgtccccctccaccaagctgtccagctctgcggccggcgaccgggccacccgtgccccaaattctcccatcatcacctcaaactgtacctcccccacgcccttccgtctcccacagtcagagcccaccccacaaagtcatgtatccttccgctaagttaccctcttcccacgcgttgtccactccccctccaccactactcacggtcggtgactgggcccggccctcatggctgctcctttgccgcccgccgcccgccgccaccacttctccactgcccggcccctcagtcaccggcgcagctgtggggactacccggagccgctcctgcgcctgcgcagcgtgtagcgcctgggccctttcgggccgcacgcgcctgcgcagcccctgccgggggcgtcttcctcagtgcctgatggtctggacccctgggtctctagtggacatgggagctggccttgaagaattctgaggcttagagaatttggcggctgcctcagggtacgcctctggagtaccgtgcctaggttactaaacccttggatcgcgcttccccaaggagccacagacttactggctcttccagaattctgcatcctacttgcacttaaaggcctgaattcaggtgctctgaggtgaccactgatgataaatttgggtctttttttttttttttctgagtcgaagtttcgctcttgttgtccaggttggagtgcaatggcgtgatctcggctcaaacaacctccgcctcccgggttcaagcgattctcctgcctcagcctcccgagtagctgggattacaggcatgcaccaccacgcccagctaattttgtatttttagtagagacggggttttatcatgttggtcaggctggtctcgaactcccgacctcaggtgatccacccacctcagccttctaaagcgctgggattacaagcatgagccaccgcgcccagcctgggtcttttttttttttttttttttttgagacggagttttgctcttgttgcccaggctggagtgcagtggcgcgatctcagctcactgcaacctccgcctcccgggttcaaacgattctcctgcctcagcctcctgactagctgggattacaggcttgcaccaccacgcctggctaacttttgtatttttagtagagacggggtttcaccatgttggccaggctggtctcgaactcctgacctcagatgattcgcccgccccggcctcccaaagtgctgggattacaggcctgagtcaccatgcctggtaaaatttgggtctctttcaagatgatcgtgtctagaatgtatcgggggtaattatgtaaaggcagctttgccatcctagaatacgctactagctaggaggtgcaatgaagtcctggggaccttgtcaaggaggtgacctcgcctagaatgcactggggacaccgctaagttcagtatgtttatcaagcacatgctgtttattggacagaaatgttctaggcatcgcgtgtatgctattgaggaattcgcaggcaaatagtcccctgctttccagctctcactgtgagcctggccctttttcaaactggtaaaagaaaaccactaaagtccagtgaggcccaactgtcagtccctagactactgtgctgctttggcatagcctgacaagagactaagctcaatcgagtcctgagaattcaacaaaacagacttgaaagcagcaggcaagaggaggtacaggactaaactctctcctcatcaccatggctcttttttctctctcaactccagcgctggtctcctctcttcagagtttggacacataaggcccaagatacaacgtaagggggaaaaagagaagaaaaaaagacaagttgagtgctcaatgaggaatgttaaaaaaatttaaataggccaggtgcagtggctcacgcctgtaatcccagcactttgggaggccgaggcgggcggatcatgaggtcaggagatcgagaccatcctggctaacacggtgaaaccccgtctcactaaaaatacaaaaaattagccgggcgtggtggcgggcgcctgtagtcccagctactcaggaggctgaggcaagagaatggcgtgaacccgggaggcggagcttgcagtgagccgagatcaagccactgcattccagcctgggcgacagagcgagactccgtctcaaaagaaaaaaaaattaaaaataaagctgggcatagtgacttatgcttgtaatcccaacattttgggaggccaggttgggaggattgcttgagcccaggagttagagaccagcctgggcaacatagggagactcatctctacaaaaaatctaaaaaatagtggccaggcaagatagctcatgc

SEQ ID NO: 1244005 - DNA, 4001 bp, Homo sapiens
actctgttttatatactagctaactttgttttatatactagctaactttgttttatatactagctaactttgttttatatactagctaactctgttttatatactagctaactgtaaaggcttcaatcagtgatttttaacagttcactctcagtagcaagttaactagtcaacatctgggggatcccctttccctcccaatttaaatacaactcatggagccttaagggacaagtgagtaataaaaacccaaaacctgacacaggattactgtgaatctactttttagtaacatgtctattctaaggtatttgaaatcttctttttaaaaaaggtaaagtaagcttcgtaatccctattactttccacagctgaaatggtttcctatcccattatccctattttttataatacttgctttcatcccaaattgctcctaattgtctagagatctaataaatcaatgcaaagaaaaaaatcactaatctagccaaaagtgtaagacagctccagtgtatcaattctgtcttcaaaagtggaccccagttacaacaatcgtgggaaactgaacctgtattacataaactctgaaccattttaattaatatttatcaaagtgttgccaaaaaaaaaaatattcatcccttttggtactgtagctctttgctaatcaacattaagataaacctgctccaaacacgtttcgttgaaaatgcccatttaggccaggcgcggtggctcacgcctgtaatcccagcactttgggaggccgaggcgggtggatcacgaggtcaggatatcaagaccatcctggctaacacggtgaaacccggtcactactaaaaatacaaaaaattagccaggtgtggtggcaggcgcctgtaatcccagctactcaggaggctaagacaggggaatcgcttgaaccctggaggcagaggttgcagtgagccgagatcgcgccactgcactccagcctgggcaacagagcgagactcgtctcaaaaaacaaaaacaaaaacaaaaaaacccccacgaactaaaatacatctggaggtttgtttttttaagtttggttttggtttttgacgatagaaactactccctccgagggtctgtgaatataagaaatataccaacagagaaaaagataagacttttaagtttcagcaacagcaaggtaagtttgcctgctctagtcaggtttctccaacagagatgagctactacacaaagccggtgacaatgtactccaggaagagactttagcagagttaatcactaacaactatcaggatttcctttaaccaccatttgactggggctgctccctctttccactagcacctcctctcctttcagattgttattgctgatcaaggcagtcccaaggaggaaaatggtgaagacaaccttaatggacacgcatggagtacagttccaaatatccactcctagcttgccttttcttttttttaaattacggtttactgcatcagataccacacaaaaaagggctcctcttttcttctctgtgcattttactatgcgaccgatatcgacacatcagtaaaaagagataagagtcctgaatctccttacccatctgcaggggtgagatgaagggaaggaaaaaaaatgatgaagggtagaaacagataatcaaaataaactgatgcgatccagagacattatttcccgttccatttccccttttcttacaaggttaagtcggctgaagtcggggtcgcgttagaaaaagcacacacacaccttgcgccctggaaaggtgaggttcgctccgcagcgctccgtggggctcctggctccgccccgcccgccttgggcagctgagcccagctcacccccgccccgggaggatggaagagagggggcttctagcggtctaggcagggggagggggaggcggctgctccgggtgccaggctcacggagcgcaggactccgcggtgcgccgacaccccctcccccagccggctgccgcttgctcccagccgccgccggaagccagccccgccccctcacctccaccctggctcttcgcgagccctctcctgtctgcacagccaatggcgagccagggagccagcagagcgactcgccaaacagccaactggggaggcccacagggaggtcagccaccgggataggcccgctacccgcggacccggcccgactcggctcctctttgttagcgctgcccccatctctcccggcccctaccccaaagccaggagccaagcatcccgtagctgggccaggtgaagctgcgcccctttgcaccccttctccctctgtccccttgtcccctcccactttctgcctgggtactaggagacccccccccacccacgcgatacctcccagagtgcctcagacttcaacagcaattgccacctggagacactcgacagtaaaaagatgctccccaagcctctctgcctctagtctaatcaactgcactgcactgtaacagtggacggatttaggattgcatattaaatcaactgcacacatcaatcctccctgtcggaaactcgtgcttcccgtgacgcagaaattaagcgggggggggggggggggggaggggggggcgttggaggcatgttgggaaagtatgtatctagaagttggtggggtggagaagggaatacatgaaatcatcagacacaaaaaaaaaaaaaacacacacatacaaaaaaaaaaaacacacatagttggctccaacctgtttcagatacaaaacatccaatgtatttagctggatgtatccaatccagttaaatcccaagataacaattcctttagcaggtttcagtacaattaggaagcaaacacctaatccttgttcagtcatatacctaatattatggggaacatactctcagcaaccagactggaggagactaagacaacatgaaaaataaatgcaatgtgtgattctgacctggatcctttttgctataaagtatataactggtataataataagcaacagttgaagaggatctgataattatatggaagtaatgtgtcaatgttactttcctgattttgacagttgtttcttttttttttgttttttttggagacggagtctcgctctgttgcccaggctggagtgcagtggcgagatcttggctcactgcaagctccgcctcccaggttcatgccattctcctgcctgagcctcccaagtagctggagtagctgggactacaggtggccgccatcacgcccagctaattttttttttttttttgtattttttagtagagacggggtttcactgtgttagccaggacggtctcgatctcctgacgtcgtgatccgcccgcctcggccttccaaagtgctggtattacaggcgtcagccaccgcgcccggcatggaataggacattttaaacactgtggtatattttctggggtgtagtgatagagcactacatggggctcatttaagaaaactggccgggcgcggtgtgtctcacctgtaatcccagcactttgggaggccaacgtgggcagatcacttgaacccaggtgttcgagaccagcctggtcaacatggtgacctggtgagaaccccacctctaccacaaattttagaggtagctaggcgtggtaactcgcacggtagtcccagctacttggcagagtacagtgagcagagaccgtgccactgcactccagcctgagtgagagtaagactctaactccaaaaaaaaaaaaagaaaagaaaaagaaaacgggggtcaggaaaggcaagctattacctagaatgtcatttttattcagcgttcttgcaagtgcataacattaaatatctacatcacactctacaacactgcttaatccccccgaacactactataatttaaaacaaaacaaaactttaaaattaagcagtctaggctaccttggaactcaaaacatttcatatataacaacctcagtactcctggaagatggaaaagg

SEQ ID NO: 1244006 - DNA, 4001 bp, Homo sapiens
gtgcagtggctcacgcctataatcccaacactttgggaggcccaggcaggaggatcgttggagcccaggagttcaagaccagcctgggcaacgcagggagacccctgtctctaccaacaacaacaaaaaaaagttagccaggtgtagtagtgtgtgcctgtagtccaagcttgggaggctaaggaagacgggtggcttgaaccctggagttcaagactacagtcagctgtcattatgccactgcacctcagcctgaggtctcgacaggaaaaaaaaaaagtaaaaaatttgctgggtgtggtggctcatgcctgtaatcccagcactttgtgagggtgaggcagaaaaatgacttgagcccaggagttcaagaccagcctgggcaacatagtgagaccctgtctttaaaaaaaaaagaagaagaagaagaagaaaaattgtacccagccacaccaatattaacctttggtgtctacaatcgatgtcacttgatctatcgtagcatctacttattcatcgccaatagccagttttgtttttaaaaaggcagaagaaaagcacaaaaatcatgacagcaggattgatcccaggtaagaccgcaggctagagtgagacggacagcttgctcaggcccctcgcagttcagtctcagcaggtgagaagcaggacttggcagagcccacaggagagcagggcctggaaaggccgttcaacttcctgcacatccgactgtggtccttcaacttgggagaaagtgagtgtgattccagcaagaccggtggggaaaaaaaaggcttgaaataataaaagcaccaccattgtccaggtctaactactgtacaaagtcgactattctggtcttaatttatgatttgtttcactggaactgcagataggtgcacatttcctgacctgcctctggactgacctctgatagacgtacaagtccgtgttctaagcgctgggaacctctcaatcacctttagcaaatctgcaggaaaagcaagagcggcgtttgcgtggaagggggtggtgggttggttcctttccatggagggggctctgctaaccacactggacgtctgttagccagtgatgctccagagtgagaacccagtgaagccaactgcaagaatcaagccacactcccagtcgtaaatgcttccacgcttatctcttccatgaaggacctggatccctggctcacaccacctgaaatcagactccgactctgtcgtcctccctcatttccgtggactttctcctaagctgggggtgcccgaagactccggagaggaagaaggagcccattgtggtgccagcttttcccattagtcagctttctgagcgcgtgtgctgcgagagccagagcctgcgagctactgaaatgtgacatttgcaacaaggccccggcccgggctcttacctgccggtgatcacgtcgtcgcaggagcgaatgatgacgatccccgagccggtggccagcacggcgtgcaccgaggaaaccagcctagcgcgggcggagagaacagcgcgcgcgctcagtccggtccgaggaccgcagggagcccggcccggcccttcggcctgactctccccagccgcaggcagatgtggggagcgggctccggaggctcatcggccattcccgcccgccccggccccgctcccgccaggggaggacgcggaggggcttcggaaactcgggccgccgggacgcggagggagcagcccccgggcttcctgccgccccccttttccgccctgggccccgcggccgggtggggtgcggtgggcagcgccccgggcctcggggggcgtctcggcggcgccggtacctggtgctgatcatcacgcagtcggtgcggctccatccgggctgggagcggcgcagcgcccaggtgcagagcgcgaagagccccgggaagaagagcgcgcccccggccagcgtcagcagcatcggggctgcgggtccggccgcctcgctggcgccgcgtggctgggttcggctcggcgcgccccggcccggccgcgcgatttcaaccctccgcccccgtccccgtcccgcctccgcccggcgctggccccgatcccgcggcgcggctctgcgcgtgaccaggcccggcggctgcgatagggcggggcggggtctctcgcggtccctgggcccggagggttccccggcgtccccggcgggcgggtgggcgggggcggaggcggggaccgaggcggcggctgtggccggggccgcggcgcgcgcgcgttccgagtccgccgctccctcccgagcggccgcggggcccaggcggaggcgggaagggccgcggctcccggcttctgttccgtcagcggacgcgcccctccccgacctgctcttctcgccggccccgggcgaaggggcggggtgggcgcggggccgaggaagccaggtaggaaccccctccggggtggggcgaggcccgcggggaaggaaggagggaggcggcgtgtggccctgggttcgcgggccccgtccaccaagccctggtgcttctcggtgggaggcctcaggatgtggcctctccccgcacggccgagatgcttttcccggtgccgccagcggctgcagccgctccggggtggccctcaggaagcgtgaggtccgggggcctccagcagcccctctccacctgcaccaggaggcggactgtggaggctgcaggctcttactgcctctcggctttggatctatccggagacaccatccagaggcgtagggactgtggtgttgttcacaacgtgtcgttatttaaaagtatcggggtcgggcgcgcctgtaaccccagcacttggggaggccgaggcgggcagatcacttgacgtcaggagttcgagaccagcctgaccaccacggtgaaaccccgtctctactaaaaatacaaaattagccaggtgtggtggtgcctgtctgtagtcccagctactctggaggctgaggcaggagaatcgcttgaacctgggaggcagaggttgcagtgagccgagatcacgccactgcactccagcctgggccacagagcaggactctgtctcaaaaaacaaacaaacaaacaaacaaaaaaacagttatcgggacaggcgtctaaacttgaatgaattggaatacatttcatttgtgccaagcaccaatcacatggatgaagacaggaatttcagtatcattggcttctgtcctttaggaactaccagctttattttgctttggtctgtatcttcctcagctaacaaacgtagggggtgggaaatacagttcatttatgttactacaaatgaaaggtatgacgggtctcctcagatcaccgtcatgcaaaatgctgaccaaaatcccgtatgaggacttcggaacagctgggctcggctctctgggccacgatttgctggtccgtgaaatgagagggaggctggatcactagctctttaacggtcttccagctctagattcttatgagtctatgacttttacaaagtggcagatgatttctgttaggtgccagttaaattactttaacacggcagttagtgatgtaggaactggtgtagagtgagcacagcttttgtttttttcaatttggattcattcatgatggagtctgaagatgtttctcaggtttaaaagatagttttccttcagtggtagtatcagttactaggctgtgaccttttggaatgaatgtagcctctaacatcttcctatatgtggttaagaaaagggacttagccaacaggacggtggcagacagcctcaagaaaagcctcaaacttcgtccacttagggcaacatctctaactcccaaattcactgctgacatactcagtgaaaggagaaagccacttcaggttggtcccaagatatctgacaaatgcgacgctctctttattttcacattcgcttgtggacaaaaccagctacctgtgaactctccattctctccaggaaaacgactctgtgcagtccactgtct

SEQ ID NO: 1244007 - DNA, 4001 bp, Homo sapiens
ggctcagagagctctctgcagagggtccagaaagagccacccactttctggagaattctttcatcttcagaattcccaatgagacaccgaggagaagcctctgcagcccccaatcctctccctggaggtctgttcatcctaatggcttctgtcctttctaagtgacacgtctacacctccagctctgggtttaaagatgcatcccttgaagggtccacagacacttacatccaatataaggacgtcttcctgacagcagctctcatttgacagcaaatcccctctaactggaccttctcggcagctcctgaagtttatcccctgcaagtccaaacccttagtctccatcaggagcatctctgcctctattcccttctccatcatgtagctaaagggcaaattctaatatgctaattagaccagactttccactgtttagaatcttccggactcctgatcattcctgggagagttctaagctccttcatatcctttccccctgctctaccttgctctctgtcatctgttcatacccagactacaattctggctctcctcagggatacacagctgagtgggcagtacaccttgctttccctcagctctaggcctggacttgcactatttcccctaccctaaataccccttgacctttgcttccctgggtgaactctggaatcacctcctctgggaagccttcaccgactaagcttgcatttggtgagcctcactattggtcacttgctttgcaatttcctatcacgtacagctcttatcacctggtattgtgagcatctgtttcctccaagacatgctttcattcactcattcaactatttgttgagcacctatatgtgccaggaactatctggggtggtggggaaacagcagtgaactaaccaacgtccctgttttcatgaagtctatattcttgaggctctttgagggcaggaactgcctggcaccaaggaaacactccataaaaaagatgattagtgttgtcagtattacctgggacacggcacccaaagcactcttagctgagcgagctgcagcctggaggccctgctgacctggctctggggtttccaggcgtttccaggagggccctgcgcggaggttgaggttgacggctctcaggggcagcctcctttggaactgtctgcacagggaccccagggcccctacagaggtctcctgatggctgaccacaggctgcagctccttgctgtcctccagctgctcctggtgctggagagatctccggcgcacggaggtccccatgttctgccaccgagaagccatctgcctggccaagagtcttctctgtccactagaccctggggaggagggcgaaaggcagatcagcaaggcattccccatacccattcccaggccccacagagaccctggacacaggggaagagacgggatgcagcggggtggcgggggcgggcgagttggtaagtgtgggtgcaggaaggaggatgcttcctggaagaggggcctcgggtcagcagcatttctgatgtcccgcccttcaagtttccaaaacagctgtcttttcatcccaacctccttcctctctctggctcaggcgaggaggggaggcagggtcaagacacgccgtagccgagcttcagcgctgggcccaggacacgatcaccatcttcttcaccagctcgcccagaccaaacgcgcacccgcccagaccccggccttcccaccagacgccccgatttcgatccgacttcttgtggtacccagacgaccccacaggccgtgcgtgtccgaacctgatgccctcccctgtgaacagaacctgatgccctcccctccgaacaaaaaaattgttttgagtccagatcgcgccattgcactccagcctgggcaacaagggcgaaacttgtgcccagcccgcactcacccgacaccactaaggccgagcacagccgcagcacagctgctcctcgcccaccgcagccgatttgaaactctgcgcggctccgcccccggccccgtcctcacagctgattggttccgtccccgcccccgccaccgccaccgccccggggatccgattggctccctctctcgcggctgcaaatgctgcgcttggattggcccggccgtgcccattcatcgctccggcccccgccccgccgccagcctcgtggctccgggctttgtatcctgcgtcccgctcgcgccactgcccttgctagcccagcccccgcgcatcgcacaccgggtcccctccctggagcgcgcacagggttcaggctgctctgacccatggggtggaggcggaggtcctgggacctaggcctcctggctcaggccccaggccccaggcccggcagcgggcagagacccctctcatcctgccaaggggtctggcttttccttcttgctcagtggttttgtcagaaggagccagggactggcagtgcagagccctgggttcccagagacgttttctttcaaatttccctcctgaccctcccttcctgtgacaagacactgtccctctctgagttccccatactcgccatccacgctccgccctccctagaaaacgcgtcccggaagcggggatagaccagagtaccggtctgccctccacccgtctacaccggctccccgcccccgccttgccccacgcatccctccctctctccagcggaatgcctgcctctcttctccttagcatccaaacaaatgcagccattataaagctctctccagctcatctttctcctttcggtgacctcagagcagtgctgcccactcccccggctggtttctttgttacttctccgcacaagagcctgagatgatggcttcttgagactctgtcttcagccctctccgtttctgggtggtctcacccactcctttggcctcagtgatttccaaggaaaggatgatgataatgattaacgtgtatatggcacttagtatgcacaggtaccggtgttgcagtttattaacttacttgatcctctgctatggtttgaatgtgtccctcaaatttcacatgttggaaatgtaatgcccaaattcatatatcggtggcattttttgtttgtttttgagacggaatttcactcttgttgcccaggctggagtgcaatggcatgatctcggctcactgcaacctccgcctcccaggttcaagcgattctcctgcctcagcctccctagtagctgggattacaggtgcctgccaccacgcctagctaattttttgtatttttagtagagatggggtttcactatgttggccaggctggtctcgaactcctgaccttaggcaatccacccgcctcagcctcccaaactgctgggattacagacgtgagccaccgttcctggctatcggtggcattttttaagacatataaattgttatttattcaaattatagaatattatacagcactgaaaaataagcaaattgtagccagatggtgtaacttaagtcaatctcagaaatatgttagattaaaaaaaagcaatatgcagacaaacataaagtatgacactgtataaattcaaacgcaaaaaagctcaacaatatggtttaggaatatgcacatacatttgtggacaaagctattatggaaagcaaaggaattgaaacaccaaaataaaataagtcgtcgtttttggaagggtggcaggagaagaggatgtaatgaggaaagggctcaaaggacttcaaagataatgttccattttgtaggctgggtggtggccacatggatgtttactttcttcttttttattttttttcttttagacaggatcttgctctgttgtccaggctgaggtgcagtggtacaatcatagctcactgcagtctcaacctcctgggctcaagcagtcctcctgccttgacctcccagagtgctgggattacaagcgtgagccaccttgcctagtctttattattctttaaaccatatatgtaagtaattttatacgtatcactttat

SEQ ID NO: 1244008 - DNA, 4001 bp, Homo sapiens
ctcagaatgtgtgacggtgtgtcagccaagaatggccccccacagctagggcactgcatagcccaacaggggtggagaaggggagggccagagaaggcttgaggtcccttccggtggcaaaattcaggtggacaatgctcaggtggactcactccacttccacagatgaggaccacacctccctcacccaagcatcctggcctggaaagtttccaccattgcaaagctcacaaagaggctcagagagggtgtgcaatctgctcccagttgctcagcacagctaggaaacaggcagtgttgaacaaggacctccaggccagtctcagatggacttggaccatgcctattccctcaccccacaacaaaagctctccccaccagagagctcatggtgtgtgcgcgcctttacagtgaatcagagccactctaagggagagtgagaggaagccctggggttcctcccctccccactccaccctatctcggtgccttcttctggggaaccagaaacaccctccaacaataaagaggccctttgagacggggcagcccactgtcacctgctaggacctgggaaccctaccctgcaaagaaactgcggatccccacgaaggtggggaggaaacctccacccaagaggcagccagggaaaacagcagagatccctagaagcccatgttgggctcccgttttgggctctgagtgagcctgtattgagaggggtccggtggctggttgggccatggctccaggagtccccgcgctgcctcaccttctgtgcctggctgatcatcttccgcaccacctctttgatgtgggcctgcccgtctatggggggctgcatgtagacgctagcccgggtcacgccgcggtaggcgatggtgtcgggccagcccaggtccagctgcgggatggagcggtccgacttctggggccagtactccagggagggcagcggctcggcctcgatggggaccccatccgccccgctggcttcctcgccgtcgccgaccccattgtcctcgggcccctgagaggggcccgtgccccgagggtcctcagagcccgggtcgtacacctcgatggtctccaggatgcgcttgagctccagctccgagaggaagtctcggatgttctcccgcttgagcacctcgtagaaggcgtcccggccgcgggccaccagggcctccagcgccagccgctgctcctcgctgtagaagaactcaggcttggactcgctggagcgccagttcacatggttgtcgtccagacactgcacctgagagaaggccatggcgccgcctgcccgggcactgctgccgggggtgggtgggcaaggtccagctcctagctccggcccagctggggcaccgcgcgctcgggggcctctccgcggcctctgcttctctgcccatgagcaatctgcgggaaagacctgatgagcccggctcggcggggagggcgggccgcgcggggaggggcggcgggggcggggccgggaactcaggtgggcgtgggaaggacggggctggggctggggctgggaagatgaggtgggggcactggactgggatgggaagaaagtaagggatcggaacagcggtgagggagcggtgggccacgtcccagggctcagcgtgcctctacgtgcagggaacccatatcccagatttccggagctgcctgaagtcctcgcaacttctgagggaaactagggcagccggggaacttcccagtagcttcttagagtgggaggcggccccggcacagaggcgccccgcaaaccgagggcttccgggtaagggaggggtcttaaaatttccgggtgccggcaacccaggaggcctgcccggaggaggctggggctctgggaggggtccaggagacccagaaacgcggttgcggggcggcgacgccccgcgagacccgggatccggggggcgcggccgggacttgcttaccgagcgggcgctggcggagcggggcgcacacgcggcggctgcggcggcggcgcgaggctgggcgggggcgcgccggtgactcagggccgccccgcttaccccgccgccgccacctgcggtcacgtgccgcccggggcggggccggaagctgattcacccctcgacagacagacagacctggggcggacgcactgcccacggtcccctggtgcccgaattccgaaaatatcagaggcctaagcccaagagctcctggaacacccatcccagagagggacagtgttctccctgaggtcacacagcgggtcaacagccttggcacccccctgtgcccccagggtctgttggtgatcctggatcaaccctggctgtgcccagtttcgccggcgtggcgggaagtccgtgcggctgtatagatacccagctgtccagttgtggaaacaggtctagggtactgggctgggagcccccaggcagggatagggcactgactgacccaaactcagggctttcctgagcagatacccagttctcagtcctaagccctgatcccctctgggaggggtccccggactgcttctgcgtggcgggcagcacccgacctgaaccctagggcagggaggggccaagagggccgctgtgggctggggtcaggcccagctctctgctgagcgtcccctggggttgggaccctggttatggggagcgtggagaccacatctgaaggcaggctttgagggtgggacagcaaagcccattaaatctggcccaacaaacagcccccaccccatcgcgtgccgcagccagtctgcccggcaccaggcccagcccttcctcccatcccccatacttgctctggatctggatggggctggtttgggtcccgtaaggatgctgcttccgtaggctggtgacatctctaggccttgtgccctcaaaccccccccctccaaggccttctccaccattcatggcccatcaggactccttgcctctgagtccactgccctgggcaatgactagcctcctaggcccagcatccttgtggtccccatcactgacccctcaagcatgaagtcctacactctgccatatagccccccaagggctttatgctactgaacatagtggcccctggggaacaggcacacatatttgcatcctcctcctgccccagggccagagaggggaggtgatcccagcgggggagccctgccttgagggtcctgaagacccatttatagcccctctgctactgtggatcccctgtaagaccttctctgagccgcctcagcttctccctgtgttcttaccaatgcacagaggctggagagttcaggaagggagtccaaggcctcactcccacctccaccaccccaacacttctgcagttgatgagcaggaaggttgtatgcacccagttttccccagtagcgacgttttgcataactataatacaataatatcacagccagaaaattgacactggtgcaatccacaaagcttatttagatttcaccagttttttgtttgttttgggacagggtcttgctctgtcacctaggctggagtgcagtggtatgtacaatcattgctcaatgcagccttgaactcctgggctcaagcctcagcctcctgagtagctgggaccagagacaccatgcccagctaattttttttcttttttcttttttcttttttttttttttttgtagagacaaggcctcactatgttgctcagactggtctcaaactcctggcctcaagtgattctcccaccttggcctcccgaagttctgggattataggcgtgagccactgcactggccagatttcaccagttttacatgcactcatttatgtgtgttatacaaccttattatgtgtatagatttgtgtaaccaccattacagtcaagatacagaactgttctgtcactacaaagatctccttctctgtagccatccccacacctcccccgaccaccattcctaacttctggcaaccactaatctattctacaattcaacaattttgctg

SEQ ID NO: 1244009 - DNA, 4001 bp, Homo sapiens
gacacagcacagcagggaggctgctgtgaggacaaaggtggagatggagcttcacaccccaggcacggggagccccgcagccacatacccgccttccagcgacggtcatcgtccgtgaccatgtccacaccgccgatgaggttgtcccagaactcctgcaagttctccgactctggcagcttcccggacatgccggcaatcaccacctcctccatggctgctctgcagggcgggcggtgtgagtgccccacacatcccggccacgacacccccgtcaacagcctcggcacccagaacaggtggacacccatggggccaagcaccaccctgagggtccgtgcgggccctggctcctgcggctcccttcctcatgtggccagttcctgggccctgaccccgctctcgctgggaggggctgcgtgctctgggaacaggcccgcctctgggccctgacccattcagttcagggtattggctggggtaccccactggagccctgcagccctggcctccccagcagttactggtttctgcgcctgtgtcggcttccactcgcctgagtctcagccttccaaggctcctggagcttgtcccaggccatccctagggcaccagggggctcacagtgaggagcaggcagggtcacctgagatggggacaaggcctcaggtggccagcctgctaagggccatcaaagaaatggagaggcagggtcccaaagccggggcatggaggtggctgggagccctagaggggggtactcagcacccatgctcacccgtgttggggtgggggcccgctgtccaggccagcccaagagccaccagggctggggagggacgaaatggggatagcctatgctctgggggaaaggtggcccctgccccactgtggaccgacccagccagtccaacccctccagcagggtccaacctggagaaccactcctggccaggacacgcaggtgttgcctggcacccttcacctgcgcgggtgaacccacagacgcttgcctccccataccaacccacacaccacaggaggccctccctggagcccaggtccctaagacccggaacgggtgcccaggccgccggctcctcctccagcatgagggctggtgcggccctggggggagggggcggaggccagcgctggtctggccacttgcacgaggccccagggcctgatacgcgcgccgcccctcggcagtgcggcctcccttgggccgtcccggcagggaggcggccgccttcccacccgctgcgattcacagaggcttggctgccccgggccagctccaggcccgcacgctgggtcctcgccgcttgctattcacgcggggtcgacggccaggcagggggtgggaacaccgcggcgcgcccggcctcccttcgccccgggcgggggctgctcgggacccctgcgcttcggccgggctgcgccacgtgatggggaggccggtcccggcgcggcccctgcgcccccccgttcctccctcgcggcgtccccttcgggctgggcctcggctccggggcggctccgggaggaggatgcggcggcgcctttgtgggcgcggggaggccgagccgggggctcctccaggcccttcagggtccgcggcctcccccacgggaagcgaaggcggctgttggtggctttccccggcgtccttcccccgccatccgcccacctactccgcggggccccgggcgcctccgaaggggcacgaacaccgagacccggacaggccgcccaggcgacccctggatacggggccgggccacgcgcgccccgagagcggaggatgaggagccgggccaccccgggaaccccgggcccagccccgaccacgacccgcgccccggccccagcgccggctgctcgtacctggtgagggcgcgggcggcggtgcgggcggcggagagcgaggctggagcgcggcggagcgggaggctgaagcgcggcggagagggaggccggggccgctgccgtctctctggctccctctaggccggcgccgacgctatttaaaccgcggccatccccgggcggccacgccacatgggctgacagcttggctgcgccgcccaggccaatgagcgtcggggctgcgccccgggacccggcgcgccgccgccggtggggtgatgctcgtgcgcgccgccgcccgagccgggaccctgcgcgggaacgcgcctgggggggtggggctgggactgaggagcgccgggggcggggcgggcgggaaaccaccgccccccgacttccgcctcccgccccgcgggccccgacgcgcacgcggctgcgaccgagcccgcggcgcgcctcccgagccatccccgacccccgtgtccgccggggccacgtgtgcgggatgggaatgcttgggccacactggggactaccccgtggccacaccgggggtccagccggctgcggcggggcgctcggacccacaggcgcgcggaaggacggacggacccgcgtgcccgcacttcggccgccgactccacgccgccgtcgctgcccgcgcggagctggctgagggcgcggcgttgcgcggcgcggcggcagcagcaaccaatcgggcgccaggggtgttcgcaccggcccaatggcggcgcgcgggtgggcgttgctaggcgatagggtgatgggcgggcggcggggcggtcccggatgcctcgcgggccgcggcgcaagtgcgggcgttgaccccggccgcgggcgccccggccggggttactgccggtcatcgcagcgcatccccggttttcctcgcgggtgcggcggggaacccagacccgagacggacgtccacccacccgacggcccctccttagcagcttcccggggacccggacgaggcgcagggccgaacgggcgagcgcactccaggccgctggagctcggcggaggggaggggcgcggccacgtggcgagcggagtcggccgggacacccacctggtgtggtgcggacaaagggagccgctgccccacttcccagggcggaggctgcgagttttccaggcgcgcacccacgggcgggggctcagcccggccctcgcgcgctccctccctcccgagtgattcctcgaatcgtggccccttgggcggcctgagccctgaagcgcggcctcccttttctgaccgcttcgcgcttgcggggccaggcaccccatggggggcaagcgggccttgtgaggccacaggtgtctctggctgcgtgtcctactttgagggctcagcaagcccgggccgctgaaggggaaccggagactggggcccccggcccctctgcaggtgtcccgcttccttcctctcctgagagcaggcctgagggtcaggcggccactccgcgtcttttcccttctggggctgtggttgacgcacggtgggaccgagggtcaaggaaggacaagggaagacagggccggggctggccccgcactgctgtccccactgcgggggttcttctgattcagggtgaggccctgtgtcagcctcaggcgtgcgggcacgcagctccggctctccatgctccaaacctcccaggtggccctggctgccagtgctggtgatcagcggccagcggggccctgctctctgcagcctgtcgagggctgggccagctacaggggagccctggctggctcccaaggaggttggagactcgtccagcaccctgagggcttccacagaaagtgagcggcagcggccgggcttggtggctcacgcctgtaatcccagcactttgggaggccaaggcgggcaaatcacgaggtcaagagttgtagacaagcctgggaaacagggaaactccgtctctactaaaaatacaaacattagccgggtgtggtggcgcgtgcctctagtcccagctactcgggaggctgaggctggagaatagcttgaacccaggaggcagaggttgcagtgagccgagattgcaccactgcattccagcctgggcgacagagcaagactctgtctcaaa

SEQ ID NO: 1244010 - DNA, 4001 bp, Homo sapiens
ttatcccagcactttgggaggctgaggtgggcagatcatttgaggtcaggagttcaagaccagcctgaccaacatggtgaaaccccatttctactaaaaatacaaaaattagctgggcatggtggcatatgcctgtaatctcagctactcaggaggctgaggcaggagactaggttgaacctaggaggagaaggttgcagtgagccgagatcgccccactgcactccagcctgggcaacatgcgagactctgtctccaaaaaaaaaaaaaaaaaaaaaacgtgctctggataacttaatgggctttctgaggctttgagattacttgaaaaaagggcagtggccatcatcccttaccctgaaagccgatgcagcaagtggcaagtactcatttcagaaaggaggtgggtgcctggcaccaaggctgaaaccctttcccaggcaacacccatgactactttctaggcagcatttagcacaaaagcaggtatgaactctggttactctttgatattctttttctttttaaaattttttttttcgagacggggtctcactgtgttactcaggttggtattgaactctggggctcaagcaatcctcctgcgttggtcttccaaagtgctgggattacaggtgtgagccaccacgtccagcaacacgattttcactgacagtggaaatatttccctttacataggcagtaaatctgacccattgagaacattttcctcggaattagctgtctccctccccctcctccactttaccaaaacccacctacaggatgtcctggaagaaaggagtcagaggggtcctctttatgtcccaagtattggcctgtcctgttattggaatgcaagggttatctgggcttacctacagagcccaccctgaatacatgtgttttcttttttttctttttttagacggagtcttgctctgttgcccaggatggagtgcagtggtgcgatcttggctcaccacaacctcagcctcccgggttcaagcgaatctcctgcctcagcctcccgagtagctgggaatacaggcacatgccaccatgcccggttaatttttgtatttttagtagagacggggtttcactgttggccaggaggtctcgaactcctgacctcgtgatctgcccgtctcggcctcccaaagtgctaggattacaggtgtgagccaccacgcctggccttctttcttttttttttttccagacagggtctcgctctgttgcccaggctggagtgcagtggcacgatcacagctctcatagcttactgcagcctcgacctccttgggctcaggcgatcctccaatgtcagcctccctagcagctgggaccacaggcacacgccaccatgtgcggcaaattttaaaattttttttgtagagacgggggtctccctatgttgcccagggtcgtcccagacgcctggcctcaagtgatcctcccgccttggcctcccaaagtgtcgggattacaggcgtgagccaccgtgcccggccttgtttctttttctctgcaatggcgacttcacgacctacaagtccaaatgtgtcccataacacatcaaggaacttctggcatctcctatcgatcctgtacgggcttctcagactatggggattttctaggcttggtttgccaaggccaaagggctacagagtaaccccgtccccacatgtattcagccgactccatgccaggcgttttacagatcccgagaccacccctaagcaagacccctagccggagtcgcccctccgtcccgagactccgcgcccctcaatgcgtcacccttctgagcgcccggcctatctggccccggagcgcagcctgtaacgctctcagccccggaagcctcctgttacgcgccgtgcccccggaggtgcggccgctgggaccagcgccggccctggctccattcgggtcgcccagcccggccaggactggcctcccgcttccagccgctgccggcaccctcagccgtctggcctcccgcggaaaggcgggcgcgaggcatcctgggagtcgcagtcggcggtcgactcacccgccctcacagaggaggtggggacgccatgaagaactacagctcccagggagccgcgcgcggcagttggcggggccgggcttctgccggcggcgggcacgttgctaggagctgccccaacgcctctccgggaagagggcgccaggctcaaaggccctcttgggaactgccgggaagcttaaaagttcctcctgcccacttctgagggctgacacgtggccgacgcggaggcgtgagaaatgtgttgatattgggaggttgacgggtgaatccacaaattcaccggtgtttattccacaccccaaagcttgagggaagtgactgacctgtttaatgatccaatcaaagctgtatagccagaatgaaacccaatactgtcgccccacaaaaagattaagtcacattttttctagtatgtgctaattatgaattttattaaggtttattcaatgtcacagaggaaagaacggtttgtagttttgcttacccgcagtgctggcaggtcacagctgtccaaccatgatccattcacatgctctggccccgtgcccctcgtcctcccacccctaccccacaggacaccattaagccagggctgggtaacaacatatgctcaatgcatcttctcaggtgagaaccaaactcgagccacaacagcaaagggggaaaaaggtagcaaagtaattatgtgctcccaaggcagtcatttagttgaatccataactggaaataaaaaggcatttatgaagtgtagtccgcagtctgaatgtggaaggtggaagatcacacatttactaagaaacactcaaaacatattttggttcagaattctaaaaaatcccgaattttccatgatcttcccaagacaaccaatgacccacttaaatttaaggcaaaaacacccttgaatctaggaatgtgcacatatgcaacagctaacatctggtaactctaataatgttccttatatgtttctgtgtttactatcatgaaccataggaagaagtactggaaaatttagtaagtgtggacagttaaaaacactggcccggcacggtggctcacgcctgtaatcccagcactttgggaggccgaggtgggtggatcacgaggtcaggagttcaagaccagcctggccaacttggtgaaacccctgtctctactaaaaatacaaaaaaactagacaggcatggtggcaggcgctgtaatcccagcttctcaggaggctgaggcagagaattgcttgaacccgggaggcagaggttgcagtgagccaagatttcgccactgcactctaccctgggtgaaagagcaagacaacgtctcaaaaaaaaaaaaaaaaaaaaaagcaaaaccccaccatcaatattttaaaataaaaagtcgttttagtcaattacagtgtgacttgttctaatcctccaagaatggagtagtaaagaaacagcagaaatgacttccctgcattatttcatgaaaatgatcaaaacctttatctaagtcagaacatcaacaagactcttggtctcaggtcatcagtttcctggcactcctcctctctctagctgtagtagcagctactgcttgaagacaacctatatatcccaggcataccctctacacgtataaaaagatgtgcaggtgttacagaccacctacacctaattcacttcctttctaataagatggatggaataactcggaaaagggaaaggagggattttgagccgcagttgtctaaagaattattgattcacagggatctccaagatcatgcatttgaagagttttatttctccacccaaagccctgcagtgaagaaaatccaagaattaagatgtaacatgttggctgggtgaggtggcttgtggcttatgcctgtaatcccagcactttgggaagtgtggggggagtgggagtgcagatcacctggcca

SEQ ID NO: 1244011 - DNA, 4001 bp, Homo sapiens
aaagatttcgttgccagctacatcagctacaagttaaaaagaaacctcttaatacagcaacaaatttccttattactttattatagtatgccacccctacagagattgtaaattaaagtataagataattataaaaatacaaaatagcaatgtaattttacaccacatacaagagaatactttccaaaaattattcaatctaaaatgaacagcaaactgataaagagctaattccacaggcaaaagactgtccccgactcaaatcttcagtatctggaactgcctttcaagattcctgttaactgctgaacgtctattcagcaattttagtgacattctgggtttttacggtactactgaatacgaaaccatcataaattaactttattggggctctgtacattagggccatccaatgtcctattaaacaccaaataatatattccataacattttcttctagtgatcaagttaaatactaaaactctaagaaggccaattctttgattttctccactcctgaagtgcaacagtaacactgaagctctgaacttaaactgcacccaaaacacttcctatcttgatcttcgtggatcaattcaaattatttcccagttcgcataataagaaatcaaagaatagattaaactgacaacccttaaaagttttcacaccctgaacctagttgtcgagtttcttaaacttttgtctcgccgtcttacaatttcatctctcaaatggagatgaagaaaaacaccgagtgagattgtccactgagctgtgagtgatcccaggtcagcctggttctctgccagaaaagaccaggtgacatttactcttcctgtagaagtttctttctcttgaccctcaaggaaccttccagtatattgttatactactgtaattcatcagtagttacaatatttcacttcccaaaggaatctcttccttgcaagatgactactctctaaagacgctttcaagaccgtccactcctcaattccaggacagtaaacctccctcgctagaggagaaaaagttcctgaaagacagaccggaatggatttgctgaactttcgtcccaatctcaaagcatgtagacatccaagggttcccaaggaacaatgagctacagaagtacagactaaacgggaaagcagaggaagtatcagaacaatacccaaaccaaacacagcaccgaaaacccgtggtagcctctatcatcccaaactaccgtccccacttccctagtttcaccaaggtctcaaactcggagaaatggtacccatcccctaatttcctccctcaacagacaacaaacgcgtcatgaaggtagcagcgagaaaagcagcaggctctggtggaccggagccgtgatggctgggtggaaggaggcaagccaagggttgtgtaaagaatggaaagctgagcgatcctggaggagggtggaattagggcgcccgagctaatcccccgcgggggcccgctggtgggaagagacggggggcgaaccggcgaggggactgggggcaccgggctgcgctgggcttctgggtcgcaagaaaggggagcggagtctggcagccccgccagtgggtgggtgacggcgcctgccagggaggaggctccgtgcggagcggacgttttgggattagagcgcgcgacccgccctcctcacgccgcccgagccccccaagctcacacctcaaacctgctcttggtcactccgttcacgtccctcctcatggggccggcgggtgcggcccgggccgggcgctgcggcgagcggagtgcacagaccgggggcccaggacaggcccgggagttccgggacggggactgggcgccggaggggtgacgccgggaccgtgggacgggaacaagagacctctcggctccggctaggcctccaccacctcccgcggcgccggcggccgcaacgactgctcgtcgctagctcggctctctcctcagcctcaacttcaacccaaaacaaaaacactccccacctgccagcaacgccgctgctcattggacagagccgcccgggcctcggagcgcccgggagggggaggggcgggaggggaggagcgcggcggcggcggcgcgagaccacccctcccccacacggggccggccctgacggcgctcccgggagcagccggtgcgcggcggcggcacgaccccctgcgcctccgaggcagacgagcccatcgggagaaggcgaggcagggaagtgcctgtgcgtgtggaaaagggggtctgtggggcggatgcgagtgcgcgcgtgctcgcggaccagcgagggagagtagagcagtaccgcactctgcgcgggggcccctcttctgccccgtgtccccctctcctccctccgcgggcaaacaggcacgcacctgcctgcacagaacctcagcctctgcccgcgcccgtcgcccctcgtcacttgttccccaggatcctgtaaggcacccgcatccttcccggccacccagctcccttcccctgtcactcactgtcgccttgaacccaaagtgcagcaggcggtccctgctcggagccattttcctcctcttctggatgtgtctagattggggcagtgcggctgccgccgcgcctccgcggttgccgccgccgccgcctcccccgcctcccccgccccagtgcattacattacggggtgctgcagggaggcctggggggccggggccggacgcttgtctccctgtgcatggctcgggagggcgagggtggttgcgctgagcaacaggccaagtgcccgccctggtccggggatggctgcggagctgcacctgaggccgggggtcgggggtgcagggctggagccgggcaacccttcctttggccggggtcggggcgcgcgtccgtgggggtggggcgggcgagaccgaagagcctttggttttccttgctcggccgccgccggcgcccaatgggctgcagcgcctgcctgtccgccaatcagggcgctgtttggtgagagcttcggcctgacgtcactttggcgggagaaacaagcgtgtgtgagcgagtaggcgggggcgttttcccgatggaaacacttcatcagactcccgggctccttgtatagaagctgatctgtgtcatcatattatattatgttttaacaactctggccttcaaggtctcagaatttatgaccgaatttccacgaaggaataacacaggattttgtagttttgttgccccttctatgagcaacaaactacaaaattatgtcctaagagtgaactattagaaactgtataataaattccagcacacctggcaggagcagcagcactgctaattgtatgcttccaaagcagttatgagttggtcttcctcacaccccttttaattagtggttttagcgactgacttgttatgcgtctaagaaattaacaagagcaacaagtgcggcagatctttaagaacaggtatattttagctggaggacatattacccaactcttaaagcactgtacaaactttttctttttttttttttttttttttttgagacagaggttcaactctgtcgcttaggctggagtgcagtggcacgatctcggtttactgcaacctctgcctcccgggttcaagcctcccaagtagctgggattacaggcgcgccgcgccgcacctggctaagtagagacgaggtttcgccatgttggccaggctggtcaggaacacctgactacaagtgatccgcccgcctcggcctcccagagtgctgggatcttttttcttttgtagagacggggtctccctatgttgcccagactagtctgcaattcctgggcccaagtgatcctccagcctcctcccagtgctgagattacaggcctcatgtgagccaccacgaccagcgcgccaccccccggctttttttaatcctagagggggcttcctaaaaccagggacctagcttcagaaactcattctcaggcccacaaacccaggtctgtcttctc

SEQ ID NO: 1244012 - DNA, 4001 bp, Homo sapiens
gtctttttgtctgtatgtgtgcttgccaaatgtgtacttactgtttgtcggacttattcctgtggctctgtgtacatttcacccattgcgtctagcagctgaatagaacccatggcaggtatcctgcctgtctcccatcctctttcctttgatggaccccaagtctcctccagctcccaccaacaccacagtggcagtgagcatcctcaagtaagcacagttgtgggcctccctagggaccttctccaggctttgtcctcactacgccatcactttctctcaccacccactcactgatttggcccctgtctccagctggccttcccaccgccacatccgaacagacttccgtaaaggactgaacagcagcccgtcccgcccatgacgtggcgccctagtggttcccagcatggctgtgtccgtatttagcttgcctccttctgctacctcttgccagtgcccctctttgtataatctgtgtccttgcctttctctcccaagggacccacacaccccttgacaacctccttctgcttttgagaaggtacttaaacatttaacaaatgaagaaataggtctcttcaatcacttgcaaactgcccaaggctagggatctccacagcactcaccaccaagcaaagctcctaaaaggtgctgcagaagagataaaccagtttaaaagctccacgaagcaaagacttggaatcaacccaaatgcccatcaatgatcgacaggattaagaaaatgtggcacatatacaccatgaaatactatgcagccataaaaaagaatgagttcatgtcctttgcagggacatggatgaagctggaaaccatcattctcagcaaactaacgcaggaacaggaaatcaaacactgcatgttctcactcataagtgggagttgaacaatgagaacacatggacacagggagaggaacatcacacaatggggcctgtcggggggtggcgggcaaggggagggagagcattaggacaaatacctaatgcatgcggggcttaaattctagatgacaggttgatgggtgcagcaaaccaccatggcacatgtatacctatgtaacaaacctgcatgttctgcacatgtatcccagaacttaaagtataataaaataaataagtaaataaaagctccatgaaaccttttggcctagcaaggttgtaggtcaggaaaagtcatcagacactggtgctgtaagggtggggttggaagaatatgtgtgtctggaagagttgctgtaaggagactccaaattctatttaatgactgggagcctccccttaccccccgagaccccatcagaggcagtgtagcttagtgggctgcatcctagctatgcccattacagtcggatgaccttaggcaagtcaatttctttatgtgtgaatcctcacatctgtatatggggtaataatagtgcctttctcttagtgttgggaggattaagtgagctgatacctggaaagcaccgggaacagtgagtgcctgccacgtagtaaacgctatacaagagctggctgccattaataagaaagttggtgccgaggtacttctgcaacgtcccgccaaggaagataggaatacaaacacatccatttcacaaatacggaaacggaggtgttggaaggtgaataaagtttcccagggagaacgtgtagtaagtggggagataggattcgaacccagggttggtccaccatatcacacagctgccaaccagggagggaaatctaaagatgtcctacccaccgcgggagggggagttggcctggcaactcctgcagccaaagatgcttcccagagggggtgatgagagcagcccgcctccccgccgcgggcctcggggcatcccaccgccaccccagcctgctccggcccgcattctcccgttacccgttcgctgaaccccgctcgggctgcagggactggagcgcgcctacctgctccgcccgcgcagctgttgctccgacgccaactccatgggcgccccgggtctgcgccttgctctggcccaagctaaatgccaagctccggccgcctttgtgacgcgctgccgcctgcaaggctctgttcctgcccccgggtcgcagagccccaaacctgcagttgcctggtcagtggatcccatgtgcagagggcgagacggggccctggccaggcgttgggaggcgggaggctcggccggcgctccgggtgaggatggcacgcccccgcccttgcttctgcgcacagggaagacattcggccccgaacttggggctcaaaacggttcagttcgctgcctttcccatcctgacccagccccgggttttttccgaagccgccgctggataggttgcattactaggcttcccccagccactctccctgcccaaagccttcagaagccgcccctctccccttcacctggcccttatccactgtcccagcctcatttctttccccctccctgaatgtcttctgctcccctttccttgggcactgcccttatcctggggtcctggctgctgccattcctggccctggaaaaccagtgcggaacccaaagaaaggtggaagagcagcttttagagaggtgtttttattctttggggacaaagccgggttctgtgggtgtaggattctccaggttctccaggctgtagggcccagaggcttaatcagaattttcagacaaaactggaacctttcttttttcccgttggtttatttgtagtccttgggcaaaccaatgtctttgttcgaaagagggaaaataatccaaacgtttttcttttaactttttttttaggttcaggggcacatgtgtaggcttgctatataggtaaattgcatgtcaccagggtttgttgtacagattatttcatcatccagataaaaagcatagtaccagataggtagttttttgatcctcaccctccttccatgctccgacctcaggtaggccccagtgtctgcggttcccttctttgtatccatgtgtactcaatgtttagcttctacttataagtgagaacatgtggtatttggttttctgtttctgagtgagttcatttaggataatggcttccagctccatccacgttgctgcacaggacatgatcccattcttttttatggctgcatagtattccatggtgtatatgtgccacattttcttttttttttttttaaggcagagtctcgcttggttgcccaggctggagtgcagtggcaggatctcggctcactgcaaccaccaccttccaggttcaagcgattctcacgcctaggcctcccaagtagctgggatgacaggtgctcgccaccacgcctggctaattttcgtatttttagcggagacggagtttctccatgttggccaggctggtctcaaactcctgacctcaggtgaaccacccgcctcagcctcccaaagtgctgggattacagacatgagccaccactccctgccaccacattttctttatcctttctaccactgatggacatttagtttgattccctgactttgcgattgtgtatagtgctgccgtgaacatttgtgtatatatgtctttatgacagaatgatttagattcctttgggtatataaccaataatgggattgctgagtcaaatggtaattctgtttaatcatgtcccatttgtcaatttttgctttcgttacaattatttttgggatctttgtcatgaaatctttttccgttcctatgtccagaatggtattgcctaggttatcttccagagtttttatagtttggggttttacatttaagtctttaatccatcttgagttgatttttgcatatggtgtaaggaagtggttcagtttcaatcctctgcatatggctagctagttatcccagtaccacttactgaatggggaattctttccccattgcgtatttttgtcaactttgtcaaagattagatggttgtaggtgtgtagctttatttctgggccctctattctgttc

SEQ ID NO: 1244013 - DNA, 4001 bp, Homo sapiens
aatgttacatatcaacttacatcaatttaaaattggttacacatttgaaaacataacaaagaaatttagtgtttagtgaaaagtacactctgaacctcctttgaaaccataccacagcgattggggtcagtattcagtgaacacttaaattaggaggtattttaaaattatcattaaaattacacaaataggccgggcatggtgactcacgccttaatcccagcactttgggaggctgaggccggtggatcacgaggtcaggagatcgagaccatcctggctaacacggtgaaaccccttctctactaaaaaaaaaaaaaaaaaaaaaaaattagccgggcatggtggcacgcgactgtagtcccagctactctggaggctgaggcaggagaatcgcttgaacccgggaggcggaggttgcagtgagccgagatcacaccactgcactccagcctgggtgacagagcaagaatctgcctcaaaaaaaaaaaaaaataattacacaaataacaactttacacaatacagctaaacaagaagaaaaaaattaagttcacttataaacactttggtttatataatttcagacttttacatacatatatttctttttaacaaaaaagagggatcactatatataatactttgtaatctgcttttttcaatgaattctctttccatgctaataaccttctacaagtaatcatattttaatggctatgtgtcattccaccaagtaaaataatcttaatttgtttaatccataaggctgtttgtaaccttaacttttcacagtaggcgttttgtttgtttgtttgcgatggagtttcgcacagtctcctgggctggagtgcagtggcgcgatctcggctcactgcaagctccgcctcccgggttcaagcgattctcctgcctcagcctccctagtagctgggattacaggtgcccgcccccacgcccagctaatttctgtatttttagtagagacggggtttcaccgtgttagccagcctggtctcgatttcctgacctcgtgatccgcctgccccggcctcccaaagtgctgggatttacaggcgtgagccaccgcacccggccaacacagtaggtgttttaaagcatttttattacaatagcataaatccggccttggcttcttcctgtttctctgagaaatgtggacagtggggcttgggcccgtgggctcttcaaagactgtcagtcaccaggcggggacttcactgtgtcaactgtgaactacatacatgtttaaaataaatataaacaaaaatttaaaaatgataagcccaaattcttctaaaactcaagtctccacttatagttccttattttcctcactcagagctggacgtttcgtagggaaaaagcaagcttttgtgaaaattctaaaggtataatcctaaattatttctggtttccgctcacccctctagcgaataagaatcacagccccaaataataataataaaatgatgtttcatgccccctgttctatcccactaattttgaccgcgcgtgaaaggttttgagggttcaattggatgaacctccccgccccccacacctttaagataaaaactacattcacagggatgtctgttttaacataaaactcttgtaagggccccaccccatctgtcgggcagctgcccccaaacatctccaaagccgcaaactagggaagcctaaaggacaaactggtcaacaggagaatcagaccacacggggtacatgtttcgctcccttcagtccatgaaagatgaaattatcgcaataaaatactgggaaaaaaaaccctcttttaccacagattttgacagtttttccggctacagagtcacaggaaagtgggagttagtcgttttgccccaccatcctcaaatttcttagtgtttagaaaagaaaatatctcctcaagagcttcccgccaggaggcgagagggtcacactcccgtaggctccggagctgcagccctacccaccaggcgtccccgcggcctctagaatattgtagaatcttcccaagagcccccgcgggaaggaggcccgccccctcatgaatagcaagcagcctcagctctcgtagtgcccgcctccctcatgaatattgtagatcttcccagaagccctagcgggaaggaggttcccccccgcctcccgcctccccgctttatgaatagcaagagagccagctcccatggtgccctccgtctcatgaataactaacaagggcgaggttcctggagcccaaactcaggcctcagccacccttcgctccaagctgaagacaagaaggggctggagccgttacggtgtggggaaggggagggtgtagcccaagatcctgaacgtggcgagccacgtctctgctccactgcctttcccttcacctagttttgagacaatttttgagttcctcccacccccactgactccagtagggcaagttacaaggggtttcatcaaaccttttggtggaaaaaaacctccagacattcctttttaaatttgtcttgccggtgcggtggctcacgcctgtaatcccaacactttgggaggccgaggcgggaggctcccttgagtccaggagtttgagaccagcctgggcaacatagggagacccccacccccagccataaccccgctcccggtctctaaataaacacataaataataaatctgtctggaatcaaaggaagatgtgtgtctccatcctctcaagatgaaatcaagacaaatctttctagctaggccttcctggctagaagattaaattctcattcattcatttcttcattcattctgtaactatttattgaagcctgctctgggccgggcacaggagtaggccctaaggatggaatagagaacaagacagatacgtttcctgctttaatggagtttattagcctaatggggaagatagaatgaacagacagagcatctacagatgttgagagcagttccggtgagagcagcgtgacagaggaaataagacagaatgatggggtgtgtgtgtgttggcggagagctactttagatagactgatactcaaggtccctttgatatgacgatttgagaactgatggaggagaaggagccagtcaggagaagggctgagggaagagggaatgggggaaagattctacttttgtagatcaattctacattatacccaacacaaaatatataaggaactacataaagactgagtggaaatttaggattagttggcatgctgttattttatatagtcacatatattcatccatttggctttgtatctttttttttcctgacctcaggtgacctgcgtacctcagcactgcaaagtgctgggattacaggtgtgagccaccactcctggccttttttttttttttttttttttttgagacagagtcttgctcagtcgcccaggctggagttcagtggcacgatctcggctcactgcagcctctgcctcctgggttgaattgattatcttgcttcagccacccagtagctgggaccacaggtgggcaccaccattgtatttttagcagagatggggtttcgctatgttgcccaggctggtcttaaactccgaggctcaagcgatctgcctgcctcccaaagtgttgggattaaaggtgtgagccaccgggcccagccctggctttgtatccttttgcagccaattcttttttttttttttttttttttgagatgaagtctgcctctgtttcccgggctggagtgcagtggtgtgatcttggctcactgcaacctccacctcccagattcaagtgattctcctgcctcagcctcccaggtagctgggattacaggcacccaccaccatgcccagctaatttttttgtattttttagtagagatggggtttcaccatgttggccaggctggtcttgaactcctgacctcaggtgatccacccacctcagcctgccaaagtgctgggattacaggcttgcgctac

SEQ ID NO: 1244014 - DNA, 4001 bp, Homo sapiens
cttcctgaagccctcaccagaaagagatgctggtgccatgcttctggtacagtcttcagaactgtgagccaaataaaactcttttccttagaaatttccttataaattacttagcctcaggtattcctttatagcaaagcaaaacagacaccacccttattgtttcttctgcttccctgaactatctggccaaacacttccaagattctccaacaccctaggcctgtgattctcaaagacagatccccagaccagcaacatcagcactagctggaaacttgttagaaatacagaatccctggtcgagtgcagtggctcacgcctgtaatcccagcactttgggaggccgaggcaggcggatcacgaggtcaggagtccgagaccagcctggccagcatggtgaaaccccatctctactaaaaaatacaaaaaaattaggacatggtggcacgcacctgtagtcccagctacttgggaggctgaggcaggagaattgcttgaacccagcaggtggaggtttcagtgagccaagatcgcaccactgcactccagcctgggtgacagagcgagactccatctcaaaaaaaaaagaaaagacatacagaatcctgggcccacctcagacctgctgagtccgaagttctgggggaggagcttgttttaacaggtcctgctggagatcctgatacaagccacagctggagaactaccaccctagacttatttggcccttaagctatctccagccttggagaaactctactttaaggtttcatttcatggataagcaaggagcatggtagagtgaatgaaaaaaaaaaaaaaagccctaagttttgacttcttggtctggtttctgtgcagggcagctgaagagaaaaacaaaagcttcccctttacaaccctctcgagctcagtccaatccctaaagcaggaacgacaccagcattaaggggtcaggggcagggaccagccatttctgggcctatgagatgcagaaatccatgataaatgcttgtgagttaaaagttgtgtacttcctcctgcattgatcattttcaagaaggaagttacactcagtcatttctcctttggtaaacaggatcgggtgtcaggacaaggtgtcagttcaaaaaacctatgctgagttctgtgcaatctctgtctacctatgttgtctacaactgcagttccttacagatttctgaagccttgccttctggtcttcgggggccctctagtctctgcctgtggccttgtttacctgagatattgttctcctctctcagaaacaggactctgatcacattggcagcagtgagcagtaatttggggttgcacatctgcagcagtaagagagtataattcgccttggtccactgggtgctgttcgcaaaccagtacaagatctctttcatcttctgttctactgttttatccaacatttggttcaaggaggacttcacaactttcccctctttcttgctgaggttgatccgggacctgttatagatgaaatcctttccctgtgtggtctgaaggatattttggaaatagtgtaacaaatataagctatttaactgcttcagaatgccaactagaaacctcctctgtgatatgtcattgatcctgcagaaccactctttggtagagaagatcttccaggctaagacacacgtctcacacttccggcatagagggatggaatcggttcccttctcacaacgaaaatagggggcattcttgagccttgattccaggttttccatgatcctaagataaccagtccattttagccctgcgcacttgcaacggcaacgccaccaaacactagaggaacggggggaatgaataaataccccagttgtgccttttctattacaaacgtctcccagagcaaaagtaaatggctgccatggatggaaagcctatctctctcagtaactgccagcagaagtctggctttttgtacagacctccttggaaacatggctttaccgtaaatctcctaaacctggcactgctttatgtggaggcagttgctgtatattctgaaagagctggtcatctcatttctagaacaacaagaatactgttagtcaaatttaagtaatatgtggactattactggtattgcactttaattattgttgttatatatggcttctgaatattcatgaatataaaataagatgcaaacttcttatgtttatatctgttcagttacaaactggctatcccaatgatgctaaatatgtttatattcattttcttaagtcatcatcaaagtaaaaccagaaatgtttaatgtaaatttaagttatttaactgcttcacaatactaaccagaaatctcactgtagtcaaagggcccaggcaaaacatattgggcagctcacagaaagagtttcaaagtcatgctgagataattctcctactgcaggtaagactcggttcaaacattgactctggtacttaggagctatatggtctcgagcaggcaacctgtcctctctgagcctcagtgtctccatcctagttatgaggatggagaagataaaggtgggtaataaaaatgataactaccttctaggattgcattaaatatatgagatcagttgttgctgctattgttactgttactaagtattattaccctagataaaatcaaaaggtttgcaatattgtgtgcctttctaatgcccatgttgaaagaccaggcacaaccagagaaaggtaatggagtccatcgctggggttttgttggcaatggcagtcacatactagggtcagaatggggaataagaatcaggttaagaatgagatcagttctcacagctcaacctcttctgtctgaagaggaatctggagaaaaggcatgagtagattaatatttaattaatcgggaaggccagacaaaggagggtggcaaagagaagggaggcccgaagcagactctttggatctgtaaggcgagcacgttaccctaagaagtgctgcaagctaaaagtagctcttttttttttttcgtaattaacttgtttatttataattgacagattataaatagcttgtttttaaagatttaaataaattaggattttaatctatgaggctgacattcttcaaggaagcattttttttttttggaggcagagtctcgctctatcccccaggctggagggcagtggtggcatctcggctcactgcaacctctgcttcccgggttaaagtgattctcctgcctcagcctcccgagtagctgggattacaggcatgggccaccatgcccagctgagttttatatttttagtagagacgaggttttgccacgttggccaggctggtcttaaactcctgacctcaagtgatccgcccgcctcagcctcccaaagtgctgggattacagcgtgagccaccaccccaggccaaggaagcagttttaatcacccaactcagtctttatttcacatttcagggccacaaacttgggagtcagagagactagatttcagacatgagtcttatcccctctccctcaacactgcacacacacggttctcctcaaacacctgtggaccatagtatgttgttgcccctcggcacctccttttctaaacagcttctttgagaagatgacaacgggctgcctcctgagaatagagggacaaggggtgctctagagcaagtgagtgcgagaggacagcgcctcactcccttcctccctgcctcctgctggcctgcacctttcagaggttgggccatacacctgactttggggggaagttgaagccatttgggatctgatgttacagttaaaaatgtggccttaggccaggcgcagtggctcatgcctgtaatcccagcactttgggaggctgaggcaggcggatcacgaggtcaggagatcgagaccatcctggctaacacggtgaaaccccatctctactaaaaaaaaaaatacaaaaaattagccgggtgtggtggcaggcgcctgtagt

SEQ ID NO: 1244015 - DNA, 4001 bp, Homo sapiens
acttcaagtgatccacctgccttggcctcccaaagtgctgggattacagacatgagccacctgggcttccggcccaggaaacagtttctgattgaccccacctgcctcggctcacgctgcccacattattgtaattagctctttcacccgtgttgcctgggaagcatgcacgggtcacttttcagcagagtgatcaactcatcccagtttcccaagaacttccagcttagcgctgaagccccttgtcctgggcagtccaggccagttggtcaccctacatttcaagcatctgtgtgtgtgtgtataattaagatattcatcctttctcttgtctctccacggacactccaagcctctccaaagctaggcaactgtctcacgtctcagttaacctgggtatcccctctctactctgtcccaaagtctgatgtggagtctcaagtagaacctgtagccttggcttggggcccttcctgccgaggcagacactgaaagccttgagatcctggccttcacaggggaagggggaggggcagagggcaggctgaaagaacagaatggcacggaggactggagctatgggtgaggagggcatggcaaggcaggtaaagttacagaaagcggaggaggtgggtagcctcgagatgtaggatgtttgggatagagtgaagatagacgagagaggagggaagatgaaggaggacaaagtcattttgcaggtctacataagccccctggagtgcttggccagggaggcaaagctgaccacctgccactgaccactcaccaccaatgtgcgttttacacccctgtcacactgaggacgggaggggaggggagcctcaggtgtaggtgaggaagcaagtgggaagtgtccaggccagatggctgggagccccttccccataaggcaaccaggagtgctcttaaaacccaaagcgggtgaggcttgcccttaggactggagcagcaggtgaatgatggactatgagtaagtggcttacctttagcaggtgttgggccgtgtagaagccagctgggccactgcccaccacacagatctggggggtcttctcctgtgtggagaaatggtggcagaagcctggggccaggcagaggagagggaaaaggtcaaaattaacttctctccccagtcccaaaccaacctgaatatccaacagaagctggaacttcccaagcttcaccctcacctgcatcctccttctcttgttcctcaaggctttggcatttgcagggtctcttacttcatctgaacccccaaaggctgtgggttcatccagagcccacatctcacccatgaacctactacaccactgccaatggcctgcccaacaacacttcattccctatccaatcggctagaatcccacatccttccaacggcctccatatcatcccaatctcgcccccgtgggtctccccacggtgtccctcctctaacccctctctctctccacaaaacgctatattgcccatatagacccgtcttattcctacagatccctgtttcgactcagactttcctctcgccccacagacctccgtatcatcctccattcaccccgtctcacacctgtagatctcaaagtctctccttttcacctttgttgacctccgtctctaaccctagaagcctcacatctcacgcacagatctccgcccacccccgtacaccaccgggatctcgccagcaggaagacaccccttcagtctcacccttctccagccctgccccagctctgctccgacccctactcagcgctcgcaggcctccccgcgctcccatccagccccaaaggcgccctgctcctactcggggtgctcccggcgggaggcagccgggtccgaggccacgccgaccagccccaccagcgccagcagcgcgaagccatggctgggagcagcaacctgcaagtggatctgttcctagctactgctccgcagggcaagcccgctcctgcccgggcccgcccacaagcgaggccccgccccaaaccccgccccctgcgctccgggaaagcggagccttgcggctccaccccgactcccgagagaatcccgcccccaaaagagagacccgcccttaactacgccccaccgtcgaagccccgcccctcggagcatccggggtatacgcgatttaatacatttctccccaggcctcaccttccctccaaatcccggaagcctagggttggaagagagcgaatccccatcgctgtttcagtccctccccaaggaaacagccactaagaaaggagcttattttacttagccgcgcccctctcgggaggctctcgtcgctcactgatgacgcagacgcccttgccatttgattgcgaatcctcccacgtgacttcgtcctagccaatcacgagtccggctccaagcgagccttcccgccgttgggaaataaccagagtgcggaagtctggggcgagggagctccttcccggagcccagcagcctccttcttcgaccccgggtgttgtgccgatgtaacccctcaaatccccgtctttgccgggccagggagaatattaaaccctggaaagctcgtcccacctcacctcctttcccattacataggtgaagaaaagcggggcggggcagtggcttacgtatggtactaaggacagagcgtccgacccccgtgcagccgagccgggaccagagttgaggtactcccctcgggttcagaatttaagggggctccaaaacactcagtaatcaagataaatataatactgcaacgttttaaaaggtcaaaagtaatgcaaaaagtctatgatcaaaatgtttttaaaaataaggacaggatccgtagtcacagctgacccaataagcctaacccctcttccttttccccatgggccctcttgtcaaatattacttccttggagaagccttttctctgacccgtcccctcccaagttccaaggagttaaaggcctctcattccacagcatctgaccttatcccatcatgacttactacactggttgtcgtttttaatgagattttaaattcaataataacatacagaaaagtgcacaaatcatgagtgtacaacttgacaatatatcacaaggtgtaaccatataaccaccacccagatcaagaaataaaacatggccagtatcccaggagtcctctgtgcccttactggtcacttcccctccctcccactggtaagtaaatgctgtctgctttctaataggtcactgtgttttatgcctgtcccactagaccaggagtaggcaaactatagcttgcaggccaaatactgtccaccagcatgttttggatgaccaacaagaatggcttttactgtttttgtttttttggaggttttggggtttttgtttttggttttgattttgttttttgagacagggtcctgctctgtcacccaggctggagtgcagtggtgctcactgcaacctctgcttcctggcttggctcaagcgagcctcaggcctcagcctccggagtagctgggaccacaggtgcctgccaccacgcctggttcatttttgcattttttgtggagatggggttttgccatgtcacccaggctggtctcgaactcctgaactcaaagcgatcctcccacctcggccttccaaagtgccaggattacaggagtgagccaccacacccagcttgtttttatatttttaatggtaaaaaacaacattttgtgacacgtaaaaattacatgaaattcagacttcagtttgaataaaactttattggaagacatccatgcttacttctttacatattgtctatggctatatttgtgctttgatggcacaattgagtagttgtaacagagatcatatggttcgcaaagccccagatatttactatctggtcctttacagagtttgaccacccctgcactacattataagctccatgaggatggggacccagtctcagctcttatacccccagggcttcacacactggct

SEQ ID NO: 1244016 - DNA, 4001 bp, Homo sapiens
accccagcctccaggcccagagacacccaccttcacctcggggtgatcaggcgccacaccaaagcgcaccaggccaaagggcacaggctgtttctcgtagatgtccacgtgggcctgggggtgctgctggggaacagggtggcagctggtggggccgagagagagaggctgggacgcccccaggtcctccccttccccagacagagcaggagagttcaggaccctgggctgagaacacaaggcttccaccctctgcaaggaaaaagagcactcactccttgggtggctcgcgcctgtcagcccagcactttgggaggctgaggcaggtggataacctgaggtcaggagttcgagaccagcctgaccaacatggtgaaaccctgtctctactaaaaatacaaagattagctgagcgtggtggtaggcacctgcaatcccagctacttgggaggctgaggcaggagaaccgcttgaacccaggaggcagaggttgcagtgagcgaagatcgcgccattgcactccagcctgggtgacagagcaagactctgtctcaaaaaaaaaaaaaaaaaaaaaaaaaaagacgacgacggccggccctcagagatggggagaaatgtggccagctgacaaggccgtggcttcccccgactggaattatatcagggcggcttctttatcttctcaggtcaagcacaacccacagccctggcctccaacccttcgacacttgggaccctcaggtcccagccagtctgaggacctgagggccaccctctgaattcacaggtgccttagctctagtgcccaggaccatgctctggggaaaggggagcagcaggacagggagggggcacggctgggaattcacgggaaagagaggtggaaatgggcctgctcccactcttagaaagacagtctcaggcactggttctgcatgaccgccttcccagggcaccttgagaggccgtgtgaaaggcacagggtcgggggtccagcaggcaagtctggtatggctctgccaccaaccagccacatgatcccagcaagtcccagggcctccccaagtctcagtctccccctctgcacactaggatggatgacagctctctctcatggctgctggaaagcaccaggaggtcaggatggtgagactctgggccacaggccggttagcagtaaagcagtcaggggtcccacagctgacacgcccagccccccatcctatcttaggtccccgctatgacacctccagcttcactgggactcaaggcaaagaagcccctgcccatcagtctccctacccccaacaaaggctcccacccacctcttcgcctttgcccaaatccccccttcccctccactcccctgcctgcacccaagtccaccctcccccacctcctgcctctctccatcccaggccagccacagggggctacccaaaccacctccctcaagccccacgatgttgtacccacaaagcgctctgggcttggagtcaaacaggtagccttggatgccagtcccagctctagcactagctggctctgtgcactggggaaagtttcttctctgtccaaaagaagagccctgtggtgtcctgctcaaggttaaatgagtaatcaggcagcccggggtgcaacctactctgagtgttcaatcaagaagagagctatcattactattctgttgttgtatgtcactgccttgctcaaaaatcttcgctggggcccagtgccacagcataaagttcaaactgctcggcctagaggtcaacacctcacccaaccaacctctctgtccttatcttccattctttcctgcgacagatccttcactctgggtcacgatgtcctctccagggccacctccggaacgctaagtctgccggatgttcttaccccttatctctcgtggctgacctcatcttccaggtttcctccttccttccttccctccctcctgtccctctagctgctccccgctaacaaggacattctctgaggttcttccgattggcccccctccctcctccctgaggatttaacccactccctcctgcgaccccaaattcccctgaacttgctgatgactttctactctctctctcctgcccagacatctccccaagctccaaacctgagacccttggatgtcccaccccagacatctcaaatccatccagtttcaagccaagtccccttgccccaaaccgctccccacttctgctcctgttccctcgaccccatccactcagagcccaagctggaacctggggctcctccctgacccccgacctgatcccatcaatcccccatcctcccagtcctcttcctcactacaaccccagcagctccccactgctatctggccaccagccctgcctggacctacgctgcaggcagagggggcatcctgaaggaaaacagcagcccgaaaactctccagtgaagccaaccatctacagctgtgggcacaagaatccttcggggtgtttaacattgctgactcttgggcccagccacagagtttgattaggtccaagttaggcccaggaatgtgcattttgataagatgccccgggagactctgatcagggaagaggaggcagctgtggacacctcccagcgaaacctgcctccagagcctggtcaatggcttccaagccccccaggatctgggtcctacctacctctcagcctcggctctcacctcctcacgccttactgcacacaggcaccttccagaacttgccctttccccagagagccattctcttcctctttgttcacgcagttctctgtgcctgggacactcctgctattgtcccccaacctgacatctactgtccttcagactgcaattgggacatctctccctccagactgggcatggaccccctccccgcaccccagtctctgtgcttatagccgtcagagccctaaaataccttgtaaattatccacctgtcccctccacattcgaatgtcaggtcctcgagcacagggaccacgtctgtcctgttcacccccatgttcccagtaaagcctgcgcccagaacatgttacgtccagtaaatgattactgaatggattaacatggatggcctcacatggagctgccttcgctcagatcccagtgccatccctgctccacggtggaagcttggacaacctcacttggccctagcatccttacctgtgaagcaagaggcacgacacctgctttgcaggttgtcatgaggatgctacgagatgctgtgctcagtgcctgactcaagctaagggccactgtcccaaacgtgctgcatgtggtcctgtcttaggagcacagccagtagcttggagctccctgtgggcaaagatcagcccaaggatcagaacaaggattgtacctggcctgagcccctccccatcccattccacaaggaaagcatgtgcacgtgtctgccagctgaatacagtcgtgctaagaacactgcctggccgggcgcgggggctcacgcctgtaatcccaggactttgggaggccgaggtgggcagatcacttgaggtcaggagttcaaaaccagcctgatcaacatggtgaaaccctgtctcaaccaaaaatacaaaaattagctgcatgtggtggagtgcgcctgtaatcccagttactcaggaggctgaggcaggagaatcgcttgaacttgggagatggaggttgaagtgagctgagactgtgccactgcactccagcctgggcgacagagccagactccatctcaaaaaaaaaaaaaaaaaaaaaagaacactgcctggaaagcttactctcctcccttccaaaatgtcaggatcagctaaaaaaaaactgtcccttatacaaagcccttcagggcctctccagcccccatgtgctccctgatctccatcccagagcccaggctgtcctccctcccacatggcagcgtgcccaaggccttgcattccaggatgactccccacatgtgggaggccctcaccaa

SEQ ID NO: 1244017 - DNA, 4001 bp, Homo sapiens
gaagagggtcccagggccccagctctcttatcctccaagcacgctctctcccacctctctttcactcctgggaaagctggtgtgggtcccttctgtttcctataaccaggagctttcagtgtaatttattgaaatttatttaaatggcttaattcctaccctacagctcaaccagaagggggaaggagtgggggaggagggaggggagagatatatcaaaaggcagggacagagggagaccagcaggggtactgaaggggcagcgtgtttgcgaaggtgggggatcttggcagcagcaaattgaccacagggtaggggctctccctcaggagtgggggtgggactgggcctgacgctgactcagcacctgctgcggctgccgctagcttggcgagagccttgccttggcccagcgccggcctgtctgacactgacccatctgtctgtctgtctgtctgtctgtcagtccgctggctcccgggggcccagttctccctgaggctcagcctctccccttcggccaggtaactcgcctggggtaagggggaccttaccaaggatatggggggtgggagctgaggagatggagaggcaggctgagtcacgtgggggcccggtcctactcagagggtgggctgcggattgtaccactatgggcagccggtggcgcggggaggagggcgcgaggtggctacccttaggggagctgggagcgggcgggagcagggccagagggactccctgactgtcgtacatggacggggaccaattctaactctcacaactctcctcccccatcgcttgctctctgccgacttccctgtccccccttgtaggtggtacgacccccgagtcggcgcccatctctagccgtgaactgtgtctgagttcctgccagcgtagggtcccctgagcctacgggacccgatttcggagtggcgcgggggttatgggaggggtgcccagctccgttcttgaagcgcaggtcacaggaggagggcgcatagagggctggctggcgaggtagctgcaaggacacccgagggagagctggggagattggctcggagccagcagagctcgaccaggaggaaccgagcccaggcgtggaggagcgggagaaccggggcaggcgggggctgggggggggcgtgcggctggagctgcagaaatccttggggtgacccaggcatctggaaacccccgggcccctccgctccagattgaaagaatcgcgagaaccggcacgtaggcggaggacgatgggggtggggactgctgtgttgggaaggggggacgagcaggaactacgaggctttcggggcgccaggcagcccctcaagccttccccttgacctcgaaaataaggagactccgggttatggacaaaagagaagggaaactgaggcacagtctggcagggactttgtcgtcctggcccacccccttccactttcggggagcccctcagccgggccctattcttcagagtccctggcctcaatctcccaggcagagaaacctctggccgggagaccccgccccagccgcactcacccgggccgcggtccggccgcgcgggccgccccccgcacagtcgcaccttggacagcaggatgaggagctgcttctggcaaagggacttggtgccgcggggacacacgcgccgctgcgccgacaccggccggctgcccccgggctcgcggacctcccgcttctgccggatcaggctactggccagcgccgccatagcgccccgggaggagacacccccaaaccggcaggcgcccggagcgcgctgggctcccccagaggagcccgctcactagggcatgctcttgacgctcaggccccgactcgctgccccacccacaggacctgaggataagccccagaccccccccctcacgtacccccctccacagcagccagttaccacccgtgggcccagtgctggctccaccagatccagcagcctatgtactcctcagtggatcccaccctcgagttttgcctcctattgaaaacgtcccctttccctcctctccagtgtctgtcctcacttcacctatcccaaagccaagacccactaaatttccaagacgtggtttaaatatcttcaggcacctttccactgtattttggggcacactcctgccaaatccactcttgtaatctacagggtgtgggactttagctttgggaatattcgctcatcccacccctactggggcactgccaatgtcaggaaggaacccaaccttggtgttttttcctttgctacactctaaatggaggggatcccccacttttttcactgaaatccccccaaaatatgtctcagaatatccaggttgcccaggttcagtaagacagggctcccagaccctctggctggataatacctttttcaccaagtcccccccatgtctagtagcatagaattctagcggccaagaccctttcttcaccttcacaccctccgctccttttgaagtcacctccaaatccacccttcctagtggatacaccaggtagttgactggagggccttccgccacctcaaaatgaggagcatccgtgtttgtttttgtttttgtttttttctcccctggctgccccttaaattttcttggggacagctggtgctgtttagatcccacgccctccaatctaaccagccccccaagagaggagtgcacccacgttgtcaccagtccccagatgtgaacaggccccctacaagtcagagcggatcacagcttcctgctacagggcttcctcgtcctccccgggattgcctatagcaccccctcttccttttcccgacgcccctcaacctgtcctgtcctgttgatccggcgacgggtggcgctggcttcggctccaggctcctccctccctgtcccccgcaaacggagcttccccccacgcccggctaggcgtcccggaccctcgggaaggagtgagggtgtctctgcagagctccccggtccggcgaagtcagagcactgggccggtggctggaccaggcagagcggcggcagcggcagcggctgtgggaagctgaggcggcggcggcggcggcgacagcagttccccctcctcggagagccggcccgggggcggggcagggggcggagacgctgggaaataggagggtgaagccgggcaggaggaaccccggggttccttggaggtagagagtgcggactgtgtcttacaagcaggcaaagccgaggcaaggccgcacgtctcagccttcagaggaggagggacaggaaggcctcctgaacgcacccctgggtaggaaggagaggttgggcctaagggagatggaatggcggacgctgggagaagggagagagaccctactggccgggatgttagtgaagaaagaaccgcacgagtaaagtgggggaagaactggagagatggaggatggggggtggtgagatccagccttgggcgaaatccggcctccttcatatctctgccgttgtgtgagccaaattgatcagaccctggtctccataactccttttcgcgtttggtcagcaaatatgtttctcccatttctattggcccttaagagaaatgaccaaaagaactggggacagacggtttctggaagctgcccctgggcggagtgctggccacagatgtggagaatagcgaggctggaatggggcaacttgtgcgggggcaggcgggtgggcgtagaggaggaaccaacagggaggtcttccagaaggggggcttcaggcccagggcacacagtcagtccccctggcgaggggcgagcagggccccccacgtcccgctcgcccacagaggcactttccactggtaggaacagcgtctttaatgggccccgccccccacgcccgccaaaccgccccccttgcgggccactttggcctcctccaccgcggcacggagggcccgggccgggtccccgcggagccgggccaattctccgagcagcgcagcggagtcgt

SEQ ID NO: 1244018 - DNA, 4001 bp, Homo sapiens
agagtccccatcagggatgacatcccctaaatcccaacccctgcctcactcctagcagtcaagggctcagggctgcacttctggctactaccctatatctgaatttgcccaccaagcagacaggttttaagtctggactgtttccttctcagtgttgttatgaaggcttaagctctgcattaagtttctacaagttccacagcatcaggtcatatggttttcctcagggtcaatgttaatgtgtgctgaactggctggaggactgccaggccctgtgagaagcctacgttcattcatccatgtccttggagtcctaacatcagccttagcaagtaggtcctgtttttgtctccacttttcagataaggaaagtgatgcctaaagagacaaaattctctgtccatggtcatagcctggatttgaaccagggtcttgggactcttggagtttgtaggcttaccccaatatatgcctgcctctaaagtcatggccactaatttcctgtgggctgagttgtgtgtttcagaggagggtctaagaaacactgacttctttcagtgtgctgtggggtctgtgtgtaactgggaccctagatttacccctgaggctggcatacagccctgccctgtccccgctaacaaaagtggacttgctggggcagaccaaaggcctgggtcagaccaggaggccaccttacaaaccccaaggctggcaaaaatgggcggcctgtgcctctggcctggtgtacctaaaatggagagagatgagggttccaggagaaccagagagggaggaatgaaattcctccaaggagcccagggtggcatgtccgactgtgtgacacgtagacagggcctccgcagggagccacgcgctacccccaggtccagccggctgtcttcttataatacccaccagcctttttccctgcccaccagccgctgaaaactcccaccccctccaaaaaaaagttctattccctcttctctgaccacaaaggcactgaaaacagtggaaccagaaggggagtcagggtgggtggaaaggtacggggtccaggctgatagaccatcccagggttcttaagcagcagggaccacccccttccccccaacactgtagatcagaacacccctctccatcaggtcattacatacagccctggtaactacacaaggcagttcaccttgattatcgagtcctttccgggatgtggagagcttgtgagaaagaaatgggatcctttgagaagtgagggtttggaagtgggggcaggagggtatctttggggagatgggtgtctgggaggccccaggggtgctgtctagggttagagtattgggatgcagagcttaaaagaggcaacaaggaaacaggaccccgggttcaggggacggagtggtgaatccgggggcgcccaaccggggttaccttgaatcaaacttcttgccatcttcaaaagtgccgttgtagtggtagcgcacaaaatcccccatctgcacttcccggggacaggccctggggatgtggtacctctcgatgaccacatcttccagggggcccccggccgggctggcgcggcccagccccctccccacggcctgcaccaccagtagcagcaactgcagcagggggagccggaggaggctgtggctgggggggcccgcggggaacatggtgcctggagttgggaccgccggcagtgagggcgagcgagggagtcgccaccaacctccttccccccgcctcccagaactggctccccctcttcctgtcctctttccctacccccgccctggctggtccacgtggaatgggggctgggaagactgagctggcctggccgggaggagcgggggagggggttgcaataggaggagggggccaggctgagtgtgttagagtctgagggaggcactacaaagaactctaggttccccctccccccatctccatccctggctgcgagacctggggcctggccagggagagaggctcgggaaagatgagaactctgagtggacaccaaaggaaaaaaaaaaaaaaaagttcaatgactttttccggagcccccgggtcctaaagccgggcggagatgaaccttgcttctttcgcgggcacttcgaattctagtcccctccaggtgggtggtgaagccgcggagtgtgagaggcatctccgtgctcatccgtgaccccagctgtactccaagggaaggcatctccagggaagagcagcttggtcccgcaaaagctggactgaaagaaggactttgtgacttgggatgtgacgggcacggagatggagtggggggtggtggcagcgcaaggtgtgcaggtgacagcaggtgtgtgcctccgacgtgggcgggggagacactcggagggtgcaggagggcgcagcgacggaaggcccggctccagggcttccttctcgtatgggcagcgcagaggaggcggccctcactcagtgtcctgatctcaggcgggggcactgtttgcatggggaggggcttcctgggcttcccatctctggcgggaagcgctccccgacgcattctctacctaggggacacccccaaggcaggagcccgggccgacggagaggacttaacgacactatcggaccctctgggaaaagaggggagacgtcgtgacccaggccccgccccaccttgccgcctcgtgcccggcgctaagacccagcgggcgcgccgcccgcccggggcccggccctgtccccttccgtccgcggggcagccagctcagctccggagagccggcggcgcggcgggcatggctcgggtggcgtgggggctgctgtggttgctgctgggcagcgccggggcgcagtacgagaagtacagcttccggggcttcccgcccgaggacctgatgccgctggccgcggcgtacgggcacgctctggagcagtacgagggagagagctggcgcgagagcgcgcgctacctggaggcggcgctgcggctgcaccggctcctgcgcgacagcgaggccttctgccacgccaactgcagcggccccgcgcccgcggccaagcccgatcccgacggcggccgcgcagacgagtgggcctgcgagctgcggctcttcggccgcgtcctggagcgagccgcctgcctgcggcgctgcaagcggacgctgcccgccttccaggtgccctacccgccgcggcagctgctgcgtgacttccagagccgcctgccctaccagtacctgcactacgcgctgttcaaggtgggagcccgcccccacccggggacctgtctcgggctgggcgtcgtggctccccacagatcggtcgaaggagcgttatcttcacccaaggcacgaagcccgccgtgcgctcggggccgcgagctccggtcttgctgacccgctcccccaccccctaccccccgaccaggctaaccggctggagaaggcggtggcggcggcctacaccttcctccagaggaacccgaagcacgagctgaccgccaagtatctcaactactatcaggggatgctggacgtcgccgacgagtccctcacggacctagaggcccagccctacgaggtggggtggagggtcaggaggaggcttgtagaggagggctagtagaggaggggagatgttgggggcgccctgactccccctgccacgccccttccaggccgtgttcctccgggctgtgaagctctacaacagcggggatttccgcagcagcacggaggacatggagcgggccttgtcagagtacctggcagtctttgcccggtgcctggccggctgtgaaggggcccatgagcaggtggacttcaaggacttctacccggccatagcaggtatctgccacccagaccacggtgggcggtcctctcacccacagggcccggtaaggcagatgtccccttcatgcacgtggagcactgcgaatgcggaggagccagccgggaggaaggccttgtctgttgagaaagacgctgggtgcaggggcc

SEQ ID NO: 1244019 - DNA, 4001 bp, Homo sapiens
agaattgcttgaacctgggagacggaggttgcagtgagctgagatcgcaccattgcactccagcctgggcaataagagtaaaactccatttcaaaaaatacaaaatacgaaaattagccaggcctggtggcacgtgcctgtagtgccagctactcaggaggctgaggcaggagaatcgtttgagcctggaagcggaggtggcagtgagccgagatcgcatcactgcactccagcctgggcgacagaatgagattctgtctccaaaaaagaaagaaagaaagaaagaaagcaaaagcacttgtcagacgagagctctgactctgactccatggatcatgtgcaccagaggcccaggcagcccctgaaagagagggaggtgccctacagagcacttagctttgcggtcaccggagcctgccctcaccagccaggtgacaccaagtgttactagacctctctgaataccacccaaaagctgagaaacagaggcctctcagaattcgcattacacatggaatcagaattctgggcagcgtgaggtcattcttcactcactgttcaattccaatctctaccaggtgtttgctgaagaaaacaaactggtttgagtgtgtctcacgagtctgtttccaacaagctttccagaacccacataggaagccgaaatgccctggctgacagtctcttcatcaacatatccaaagacagtattcaaattccctgatgtggtagagtgtctgttcatgtccccctcccacaatggctgagtcccagacctggacagtgacctcaccaccacccgtggtgcgccctggccctatttcaaccctacttcctatggtgttctcatagcaccgtggagaattaaagaggccactaagtaagggcactctaaataaacaaagcactataacggatcttaaccagcagtggacacacagcttctataactagtctcccactggggagcctcattaagttagcagctgggatcccaacaagcccagggtgaaaagttctgcaggggatgactgccagttcagatccactctcactgtggctctatttccaccgtttccctggatttccattcacagagctccctgacataggacactagaagggcaaacgcagtgtcacctgccactattactcaattacttgatgaccacggtgataatctggcactaaactggctgtggccaaaggctagagagccagaacctacttccagcaagctcctccttgccctgtgtccccacttgaagagactgctagtgaccacaccttggacttcaatccacaagccaatccattctttccaggagacaaggacgcgactgacagtactctcaactggagagaagcgcggtcttccaccctccctggaggacacggtgctaccctattagcgcatcagaggaccctcctgaacgccaaactgggagaagaggatgacacacaccctctcctccaaacagagcgaagacaaaacctgggagaagggaaggcaaacagtcccgtttcatggcaacatcaaatgagatcacagtcctcatccccatagacttggttaatgggcgtgcccccaacctatcttcaaatctcagggtctcggcgacgccctggactctggccctaaaccctcccccattactcgtccacctgggaccaacgaaaactcggacatgcccctccgccaacccctcagacccccgcctacctgctccccaaatcgaggcccgcgggacacctggactcggcagccggggtcccgctctgggtcccagccccgcccctgactgcgctgggtaggtggtcgctgcgggacccggaccggcggaatcacacccagagcccccaagcccacggcagggatgtcacccggggtggcgaggctctcaagcccgggttcaggctctcaggggagctggcagaaccaggagcgaccacactcactcgcggtcccgcagccccgccgacacccaggcgcgtgactccctgagccgtaccaccacccaacactgcggtgggggtgcgggagccgtccgagcgcgtcctgcaccgcgaggagagccgggcctccctagctctcgcaagcccaggaacacagtccgagtcctacaactccgaggtctgactgggaagcaggggccgctgcccgacaattacccttttccaccgcccctattccggtgcccccctctgggaagttccgaatggttcagaccgcaccagctggggatgctgggggaaaccatttcattaagcgcgggagtatgctgaaacttaaaaatcattttaaaaagagatttgagggtaaatatagccaacctaaggcttcctgtccacataaaagagaaaaataaagaaaaaacgttataagaggttggcaggctttttttttttgcttcaccaatggtttttattaaattgctgatggaacccgtcctctccctacattgagagtatggaaggtgcgggagacggccgtcacgtgacgcggagaaggcgcggcgcccgtgggaggttggttgcagaactcggaaccgctgtgcgcgcgcatgtgtgggattcggtcttcctccctcagtgggtcttttttaaaaatgtgaaaatcagtttttgaataatattctttttttgagacagagtttcgctttcgctcttgttgcccaggctggagtccagtggcgcgacctcgccttactgcaacctccgcttcccgggttcaagcgattctcctgcctcagcctcccgagtagctggggactacaggcgtccgccaccacgcctggctaattttttgtatttttgcagagacgggttttcacccttttggccaggctggtcttgaactcctaacctcaggtgatccaccagcctcggcctcccaaagtgctgggattacaggcgtgagccaccgcgcccggcctgaataatattttttaaaactagagcgcccattactaaatttagctacttagaagttaattgtaaagccattagtttgtgatgtagtgtgggtccttccagtgaagaccggagagagatgggaatcagagcctgacccgcctgtgcgcgctgccccctgaggtgtggctgccccctgaggtgtggccgccccggagccttccgccgcggccgaggctatggttgccgcagagtctccagaatgtgctcaccaggaatagaatagaaaagtgggtggttgtgtttttgaaatcagaagtcacttatttttttctctttaaatttccatgttctggtcgggcgcggtggctcacgcctataatatcccaacactttgggaggccgaggtgggcggattacgaggtaaagagatggagaccatcctggccaacaggtgaaaccccctctctactaagaatacaaaaaaaattagctgggcgtggtggcacacgcctgtagtcccagctactctggtggctgaggcaggagaattgcttaaacccgggaggcagaggttgcagtgagctgagatcgtgccactgcactccagcctggcacagagcgagactccatctaaaaaaaaaaaaaaaaatccatggtctgttgaaaacgggacacgagaaaagaacgaaagtgcagcttgtgttttctgccgtcttatagtggcttggtaaagattaaggaatatggggtggcgttacgaggttaggcattgcctttatgtgtttaattattcttatcaagcgaattcctcttgctgttggacagcgcaaacttaatttctgaggaggtagtaagttacagggtgattttattttattttattttagagacggagtcttgctatgtctcccaggctggagtgcagtggcgcgatctcggctcactgctacctccacctcccgggttcaagttcttgaaactaatgtttgttaatgagatttttaagtcaagaacaaggtttttttcaccttgtaactttaattccaggaattacctttttcagtttgttagtggagttcaccacc

SEQ ID NO: 1244020 - DNA, 4001 bp, Homo sapiens
tgaagcgtggtcaggttgttgtggctcacagacaagtgttcctgggccggaatggggagcacaggctcagcagggtgggtggggtgtccagagtccctgcctgcctccacaactctgcaccatccaggaaggcctcagccacactggcccaactacccctgcagcttccctccctcactcacccggcctcttcttgcacacctccctggacagggtgcccactccctttcttccagctctgctcatagctgtcggtgttcctctctctggagaagttgtctgccttctccacaggctctgcccacctggctcatccacagggaccctcccctgcccgcccaaacccccttaccagcttctgcagggcggccagctcctcgggcaggtagcagaggccagtgcggttcagcttcagccaccgcaggctggtcatggccttgacattctcagggaagtagccgccctgggggaaggatgtcaaggtgaagcacagagcccctgctcaccaccttctatggctcctccagcccatgggagcctttggggagccacagaaccaactctcaccatctgtgagaacacagacaagtcatttcatcattgtgcctcaatttcttcacccatagaatgggaattttaagcccccccgtgacaaaagtgttggcctaagatttgtctctcctactggattctgggccccaggagggccaggacaaaactggcttgtttcaggtgaaagcccagcatccggctctgtggttagctcggctcaaattccttcacctagcattccacactctgactggctgcctggggtgggggatcccccttccaagcctttgcaaaggcgccacctgtgccctcatcctgccatcagcacactggcaactcacggccagggtcaaacccttgcttgcggagaccgtggctccccaccctgcagggcaggccagcatcactgcactcccctggtgtgtgaacgcccacctcggcacctccagcccttgtggcaccaagtctggggcagtaggtgccttcagtgcctgcggctgatattcctttccccctagcgccacattcccagctggtgactcggactctcccagttcagcaaagaggaacggggaccccaggttagggtggtggggatggggtcagggaaaagtggtgtagccacttgtacttggggtcaaaggtgtgtacacaggcaggtaaacgcaggaaaaacctgcctcctcggccccagccccagaccaacaacccaggccgaccctgccagtcacccaccctgaaggtgaggctgaccctccagccagctctccctccctctctttctctgcttcccctttggtcaggcaatgcctgtctcattcttgagtcctggaaccaccccgccgccccacccactggctgcggagggctgggctccggtcccttttctctcagtccagcagctgctcagacaactgccacccagcacctggcacaccggcctgacacactctccacaccaacaaatctcactatactccttgcgtccaaggaggagacttttaagccccttcaccggctgagaaagcctaggctctgagaggggaagtgatctgagaggcccaggatcacacagtatggcgggtggcggtggcggggagagggcagtgatgagtcggctccacacccgcccctgggcagccgggcagccatccctgagtcagggcctggcttgggcgtgtgacctcagaggggcggggaggctcgcccgatccccaggccaccatccagcctagaccgagaacacggacgcggggtgggggctcccggccgggcccccggcgggactccgagcccaagcgtccgtccccggcctgcccagcctcggtctccccgtacaggcactgggcggaggcctcggaggtccattcctggccaggggagagccccaccccgccccggccgcagtccctgggacacgcagggcctggagccgagcgggacaggaagcggaggccaagcgggccgggcggaagagaaggcctgcagggaggcccggcacgcgcccggcccggctcaccttgaagtcgttgccgctgaggtccacgccacgcacgaacggcagcaccccggtggcctccatggcgccgctctcgctgccgggccgcgccgggctagggagcgccggggcgagggcgctggggggagccgcgggctgggccagcgccggccccgcccctttaacccgcccgcgcccgccgcattccgcggggaagtgtaggctttaggcctcttagggcctcagtttccccgtctgttcgaagactgcggaggcaccaaggagtgcgggccccccctgtgctggagttggaggcttccacgatctccaggcttaagtcccagcgccccagggcaggggccgtaacggccgctggtcgaggcaccgtcacctgcgctgctgcagcacatgaagctggccctgacctcagagagattctaaacctcggccccggggcgcagaggcccaggaagtgcctgtacttggctgaccggtggtagtgagacacctggatcctcgggtcctagctctcctgcttctggacttagtttcctcatgtgttgtttttgttttgttgagacagggtcttcttgctctgctgcccaggctggagtgcagtggtgtgatcatagctcactgcagcctcgaactcctgggctcagcctcccgactacctgggattataggcgcaggccaccacacctggctaaatttatttattttatttattttttattttttttgagacagagtctcgctctgtcgcccaggctggagtgcagtggcgcagtctcggctcactgcaacctccgcctcccgggttcacgccattctcctgcctcagcctcccgggtagctgggactacaggcacccgccactacgcccggctaattttttttttttttttttttgtatttttagtagagacggggtttcaccgtgttagccaggatggtctcgatcttctgacctcgtgatccaaccgcctcggcctcccaaagtgctgggattacaggcgtgagccaccgcgcccggccttatttatactttttgtagacacggggtgcttgctatgttgcccaggctggtcttgatctcctggcctcaagtgatcctctggtatcagcttctcagagtgttgggatgacaggcgtgagccaccgcgccctacccagtttcctcatttgtaaaatactttctaaggttgtcaccatgagcaaattaacaaagaatgcacgtgtagctcgcagcatacagcaggcgctcagtgagtggcaggttattattccgttttgttttgttttgtgcgccaggttattattcccacttagtgtcagcacccctgtgctcgtacccccctacaaagggaggctccagaagagaagcatccgtcttggtccttgctgttcaagggggctcgccctggctgacacatagcaggaccccaataaatgagccacagctgttatatgcccaaccatccttcgcaggggaggagggggtctagtgtccccattttacaggagaaaaactgatgcccaggtggagaatggcccacacaagctcgcacagagcaggtggcaggggtaggcgctgtgcccctcaggcccacaggtaagaatgaggccaccaagacactctctcgcagaggtgacctaagaggttggatgtgccgggcctctagccatgtgcagcctctctacctggtccccagaaggaacggggcccagacagcttcctccacaccggaggctcacattacaacgcacagacgtcctggagggtcgcctgtcacgtcacctgttcgcggtctcggaatgcagccctgcacctttaaatccagactgcgtcagggagtcccgccccagagggagtgcggctgtcggctggggggcgggacctgcccttcattggctgaaccgcgcagtattttggcacctgtgcgctgga

SEQ ID NO: 1244021 - DNA, 4001 bp, Homo sapiens
gcagggcggccagctcctcgggcaggtagcagaggccagtgcggttcagcttcagccaccgcaggctggtcatggccttgacattctcagggaagtagccgccctgggggaaggatgtcaaggtgaagcacagagcccctgctcaccaccttctatggctcctccagcccatgggagcctttggggagccacagaaccaactctcaccatctgtgagaacacagacaagtcatttcatcattgtgcctcaatttcttcacccatagaatgggaattttaagcccccccgtgacaaaagtgttggcctaagatttgtctctcctactggattctgggccccaggagggccaggacaaaactggcttgtttcaggtgaaagcccagcatccggctctgtggttagctcggctcaaattccttcacctagcattccacactctgactggctgcctggggtgggggatcccccttccaagcctttgcaaaggcgccacctgtgccctcatcctgccatcagcacactggcaactcacggccagggtcaaacccttgcttgcggagaccgtggctccccaccctgcagggcaggccagcatcactgcactcccctggtgtgtgaacgcccacctcggcacctccagcccttgtggcaccaagtctggggcagtaggtgccttcagtgcctgcggctgatattcctttccccctagcgccacattcccagctggtgactcggactctcccagttcagcaaagaggaacggggaccccaggttagggtggtggggatggggtcagggaaaagtggtgtagccacttgtacttggggtcaaaggtgtgtacacaggcaggtaaacgcaggaaaaacctgcctcctcggccccagccccagaccaacaacccaggccgaccctgccagtcacccaccctgaaggtgaggctgaccctccagccagctctccctccctctctttctctgcttcccctttggtcaggcaatgcctgtctcattcttgagtcctggaaccaccccgccgccccacccactggctgcggagggctgggctccggtcccttttctctcagtccagcagctgctcagacaactgccacccagcacctggcacaccggcctgacacactctccacaccaacaaatctcactatactccttgcgtccaaggaggagacttttaagccccttcaccggctgagaaagcctaggctctgagaggggaagtgatctgagaggcccaggatcacacagtatggcgggtggcggtggcggggagagggcagtgatgagtcggctccacacccgcccctgggcagccgggcagccatccctgagtcagggcctggcttgggcgtgtgacctcagaggggcggggaggctcgcccgatccccaggccaccatccagcctagaccgagaacacggacgcggggtgggggctcccggccgggcccccggcgggactccgagcccaagcgtccgtccccggcctgcccagcctcggtctccccgtacaggcactgggcggaggcctcggaggtccattcctggccaggggagagccccaccccgccccggccgcagtccctgggacacgcagggcctggagccgagcgggacaggaagcggaggccaagcgggccgggcggaagagaaggcctgcagggaggcccggcacgcgcccggcccggctcaccttgaagtcgttgccgctgaggtccacgccacgcacgaacggcagcaccccggtggcctccatggcgccgctctcgctgccgggccgcgccgggctagggagcgccggggcgagggcgctggggggagccgcgggctgggccagcgccggccccgcccctttaacccgcccgcgcccgccgcattccgcggggaagtgtaggctttaggcctcttagggcctcagtttccccgtctgttcgaagactgcggaggcaccaaggagtgcgggccccccctgtgctggagttggaggcttccacgatctccaggcttaagtcccagcgccccagggcaggggccgtaacggccgctggtcgaggcaccgtcacctgcgctgctgcagcacatgaagctggccctgacctcagagagattctaaacctcggccccggggcgcagaggcccaggaagtgcctgtacttggctgaccggtggtagtgagacacctggatcctcgggtcctagctctcctgcttctggacttagtttcctcatgtgttgtttttgttttgttgagacagggtcttcttgctctgctgcccaggctggagtgcagtggtgtgatcatagctcactgcagcctcgaactcctgggctcagcctcccgactacctgggattataggcgcaggccaccacacctggctaaatttatttattttatttattttttattttttttgagacagagtctcgctctgtcgcccaggctggagtgcagtggcgcagtctcggctcactgcaacctccgcctcccgggttcacgccattctcctgcctcagcctcccgggtagctgggactacaggcacccgccactacgcccggctaattttttttttttttttttttgtatttttagtagagacggggtttcaccgtgttagccaggatggtctcgatcttctgacctcgtgatccaaccgcctcggcctcccaaagtgctgggattacaggcgtgagccaccgcgcccggccttatttatactttttgtagacacggggtgcttgctatgttgcccaggctggtcttgatctcctggcctcaagtgatcctctggtatcagcttctcagagtgttgggatgacaggcgtgagccaccgcgccctacccagtttcctcatttgtaaaatactttctaaggttgtcaccatgagcaaattaacaaagaatgcacgtgtagctcgcagcatacagcaggcgctcagtgagtggcaggttattattccgttttgttttgttttgtgcgccaggttattattcccacttagtgtcagcacccctgtgctcgtacccccctacaaagggaggctccagaagagaagcatccgtcttggtccttgctgttcaagggggctcgccctggctgacacatagcaggaccccaataaatgagccacagctgttatatgcccaaccatccttcgcaggggaggagggggtctagtgtccccattttacaggagaaaaactgatgcccaggtggagaatggcccacacaagctcgcacagagcaggtggcaggggtaggcgctgtgcccctcaggcccacaggtaagaatgaggccaccaagacactctctcgcagaggtgacctaagaggttggatgtgccgggcctctagccatgtgcagcctctctacctggtccccagaaggaacggggcccagacagcttcctccacaccggaggctcacattacaacgcacagacgtcctggagggtcgcctgtcacgtcacctgttcgcggtctcggaatgcagccctgcacctttaaatccagactgcgtcagggagtcccgccccagagggagtgcggctgtcggctggggggcgggacctgcccttcattggctgaaccgcgcagtattttggcacctgtgcgctggactcgagcgctccgattggagttagggcctgcttgtctgcgtgctgcgaagtccgcggctgcccccggggccctagtcgttgggttccagggtccttcacgttccattcccaggctggtctgagctccggggccgtggtcccgctgcctcctccggtcgtcgtgcggaagctgcgacgcaggtacagctggagcgcggcggggcggcccccagggtcaccgggctcggggcttggcgcgcgacggaacgcagatcgggggcgtggcccgcgatcaccgctggggaaggcggggaggggacctttgggggaccaagggcagcgttcgaatcctagcccagcccccttcccctctcggtctct

SEQ ID NO: 1244022 - DNA, 4001 bp, Homo sapiens
aattgtggccttggaggtacttttggggagaggctctgacgagggcaggggataatcggcagtgcagaggcagaagatcccctgcatggctgctgggagagcaggcagtctgcaaggcaagttgtctgactctctaccatgggtagattcaaggctatgagccctggcctggcagacctccgaagtgtgtgtgtgtgtgtgtgtgtgtgtgtgtgtgtctgtgtgtgtgtgtgtgtgtgtaagaaatacttatttaacacacggtatatctctggcactgtctgaaatgctttataaatattaactcaatcctcccatcaacctcatggggaaggtatcatgactacccctcatttcacaaataaggaaactgaggcacagagaagtcaagtagtttgtccaaggttgcacagcttcaaaagcacaactacacactttgcccaaggtctgattctgtgtatctgtgcatctgaggagcttttccagaattttctttcaaggggatcaacttaaacaggaccactatttggtctcacatgtagaaatgacccagcatctgcactacccccactcctgcctgacaatctgattggggaggcaaagatcctgacctcaggcgttccctaatcagacaagggacagataccaacaagccagagacaaagacgggtaaataagaggccagtgctcagggaaggcttccaggggggcagacaggacaaggctgggcctgactcctcccattcccaggatggtaaggacactggggtggccttggcttgcggtcctgggccacgatgaggtcctcggaggcgcttagaaatggagccacgggaagagccatcacatggacagtcctgcatggtgggtttcctttccggtttgtctgaacctggaagtgtgtgcagtgaggagagggcagcagggctaggagtgtctccactgatgcctgcttctttctggacatcagtttcctcacctgcaaaacggaggagggaagtgaccccccaaggcttttctccagctttgatatgcttttatagtcagtgccaaacatcagggtacctggtctagagacagaagccttgctgggtgatgggcctcactacgcagccccatgggaaacgttaaaaacttcaactagtgctgctggactgtttcccaaaagcacctcatcctgcagctgggtctaatccttactctcctttcactctcctttaatatcacatccctctgcttcccaaaatacagggcttggaatatgggaggagactgggttagaagtcaggaagaacttacaaatgctgtgggatgctaagcataacataagtgacggccggctgtggagtctcatgcctgtaatcccagcactttgggaggcagaggcagaaggactgctggaggccaggagttcaagatcagcctgggcaacatagaaagacccatctctacaaaacataaacaaaatttgccaggcatgatgatgcacatctgtggccccagctactcaaaaggctgaggcgggaggatcactgggacccaggaagttgaggctgcagtgagtcgtgcttgtgctgctgcactccaacctgggcaacagagcgagaccctgtctcaaaaaaaaaaaaaaaatgaggtaacaggaatggggcatgatcgcatcacttacctcccttgctctcggggctcccccaacctgtagtcatccctggagttggggatttgggttaaatggatatggagggctccggctgggggcaggagtcctgtcggagtgaatgggaaaccaatgtctccgaatgcccccccaccaggcacagaaacccagtgggggagaaaggtcagtcctattgaattcataagtggccattctctccagcttgcacctgaaggctgcctcttaccaaggcaaagtggttttcatgagcttttcagaaatgggtccaaatccccaaagagacttttccagttcttggccaggctgggtgactccagctcaagatagatgccccagccactgacgtcctggtggggtgggagggaagcagatgggaagtgagtgaattagtccaaggcttagaaaacaatccattcctgatcctgaaaggtgccacaacacaagttgtgagagacaagagggtttatgtcgtccctagccaggttcctgctggtcccaggagctccagcgctacccctagggaaactggggatggaagaaagagcctctgatccaagcccagctcccagctcctggcaggcggctcgcattactctagggctctgtttgtctatctttagctttcctggaaaaggggactccccagccccctccctattcccagactctcagagaaaggactcctcatttggcattctgtgtcccatgtgtgctgggctcctatgtgtgcaaggctcagtgccaggagctggggatacagacatgtgaagacagtctaatgaatgttacccactgtcactctctcaactagggagcgactccctttcagcagaactgagcaagccccagttcagaagttcaggttaaggtcagagagggagaaggctttggccaaggtcacagaggctaatggaagaatgagaatgtcaatccacagtccttggttgaggatgccatcagcacaacgattaaaatgtctttgcccagggtaatagcctccacccccagaccacatgccacttccttccgggaggcccaggctctaaggcaaggaaaatctgggacaatgggggaagtgcctggggaagagaggtgagtggggataaggaggggaagcagtcctgccttgcctcctggggacccaccgtgagttcactggctgccctctcctcatctatgttggagacacttcccatgatagagcagaaccagtactgtgaagtcagactttgaatcttggctcagcctcttcccgtgtgaccttggacaagtcacttaacctccttacatctcagtttctccatctgtaaaatgcaggggccgggggaaatcatagtttctactagttatggtggttgtgaagattaaatgagattatgactgcagtgtttcagaccagcctttgagcctgagttcaacttctggttccacctctcacttcccagctgggtgaccttggacaattctttctttttgaaatggagtcttgctctgtcacctaggctggagtgcaggggcaggatcttggctcactgcagcctctgcctcccaggttcaagcaattctcctgcctcagcctcctgagtagctgggattacaggtgtctaccaccatgcccagctaatttttgtatttttattagagacggggtttcaccatgttggccaggctggtctcgaactcctgacctcaagcgacccacccatctcggcctcccagagtgccgggattacaggtgtgagccactgcgcccagctgaacaattctttaacctgtgtctcggtgttttcatgtgtaaaatgacagtaacagtacttagggtactgttttcctggtgttttggtgaggtttaaattagttactagatcaacgtgctcagaacatagtaggtgaaatgttagctattattacaaagatgtgcagtactgtgtaaaatatgctgaggtgcccagtgccagtgcacagcaagtctctgctgaccaccagctgtcactcctgagattgccattgcccaggctggcctcccgtctgctggacaacctcccaactctaacactaactctctgcttcttcaggaaggcgctggccccagcattcagctccagctgcaggaggtgaagacgggcaaggcaagccagttctttgggctgatggggaagcgagtgggaggtgagtgacaatgacaatggagcccagcaagcaggggttctgagtgggttctgcaacataaagcagaggccctaagtcaaagcccagtaactggggtcaggtactccagtccagtaggggtcgctcatgagatggggtggcacagactgtccat

SEQ ID NO: 1244023 - DNA, 4001 bp, Homo sapiens
gcttttctccccccttatccccatcccccgaccccatccaaatgaaaaggattcccctttaaaattttcaaaagtagagagaaaaaaggttttatgttacaaactgaaggagggaagttagataataagaaaggatggaaaagatgaccatgagatgtattagcatcctccttctgaaactgggctgggtgagatgcctctggtcttagacacaggtccaaggagcaaggcagacaggtgggggcaggggtgggggcagttgctctgctctcgcaggagtccacacacaagagggagctggatctcagcttgatcatctcaaatcccaaggtatcattgtgccaggcattatctgtcacccccgccaaccttctctgcttccctgactccagcatcctcagttctcagcaagatctcctcttcccacccctaaaatagcgttgaagctaacagtgcattgacttctgttctgaagaccaggttctcagtaactggaaggcacagagcaacccatctctggggctcttcttgcccctcagtcccaagactttccacaaggatggaactggagcttttgtcttctcagctcagagtctgggcttcctgaaggaaattccacaagaaaaacaaagtgcagtgcagattctggtctctaaaagccttctctaagggtggggactgggagacaggtttaggtcttatggaggagcaagtctgcatttagtgttctctgggagtctcccttctgtcctcaaggctatttctggtcttcaggggggtagggtacttatctcccacacactggggatgtcccagtggagagattgattttgagatccaaagtgagcctgaagccatgttttggaatgaaaattcccagtggatttatcacccctctccaagggttggcagctgtgaggcctggctcagggcttctatccccttctatctcttcagtaaccagttctaccaaatctgcacgcaggctgaaaaaatcagcactgatagtgggaagatagagaagagaaattcctccagctccaggcctccaagctgtcaggcaccaggacccccgtcccccagctcctgagagcaaggagctgcacaacccggtggcttgcaaggtgtcagccgcttctcaaagcgccccaaatataaaatctcaatagcagttccttttccccagtaccgcagtccccatgccccacctagatagaaattctggaacttgcagcattttgcaatcccaaactgcactgcccagaaccgggtttcccaacctgtagaggccgcatccgcgtctcctgggcgggcagtgccggtaatccccaacaagccccagcctgcttggaattaacgggtctgactgtgccgagaaacgacctctgtttcagggcccctccccatacaggcacctgccctccagggctgcgcgacccgccccccatcccgggcgctggaatccagccaaacctctgcgttcccggaaccaccagttccctccctcctggaaccccgcggcttcagttcgggacccccaacctcacagtagagcggcggggaggcccgcctagggagggggaggagaagcaaataaacacaggaaaacccacagcgggagggggagcccctggtgggtgcccgagggtgcgcagcaaggaaagcgtgagcacgagatctctcttggaaggggcctcaggtgcggcccgggggccagcgccctgcgccgcgcggtggactcaggcccagctcttccccgtgcactccccagccctgcacccaccccgagcaccctccacagctcccaccttcctcgccgccccctcacctgaaaccaccagcgcctcgttgggccccaccgtgtggcaattgcccatggcgccggcggcacggagggccctcgggaccgcacagacccggacaacagcagcgggtctgcagcgccggccgcgcccagcctatcccgccacccccagcggccggccgcccgctcgctcgcccgcgcccctctgcggtcgcagccccgccggaagtgtggcggcggagggcggggccggcgcgttgaggcaggagtgagcgcagcttcggcggtcaacgcgctttattccgaggggcttcagatacagatgaccccagccctgcatccgcccggaaggcgtccccttactcccatggggcacctcgataccagctgccctgccctgactcacttctcagcacccatcttacggcagtcggccctggcctcagacccttgggttcagatcccaggccctcctcctactcactgtgagaccctaggcgagtcccttagctcgggagcctaattccgcttcattaacatgggggtaatttaactacctagctagacggttgcaaagggatcagttcactaattctcaatgttggcagtgcatcacattgcaaactccctgcctctgctccagagctgatcagaatcaataagggtggggcctgaaaatactacatccaaatttccgagaagcacagtgtctagcatacccctatctctccatctggggttactgtcactctcaggaagaaataatcacccattattccttcaaccaggaaaagagatgtccagggcacagcttggggccccagaaagtaaccacggaggtcaagatcacaaacccgtcagtgtccagggcatggcctcgcacacatccgaggttttcaaggaccatgaagtgccatggcaagcatcctggcctgagggttaggagagctggatctcaggctcaactttagcctgaattcggtgcgtcatcttagacaaatctggtgagctctgagggctggggtaaggttgagaaactgtgggctcctcagggtggggggtgcttagagaagatggggcctctgagtcctcagactgggggtcttcatcgggttcagcatcctccccaggcccaagccctgccagcctcttgctggcctcccatagccgatgggctgcccggtcgtctcgggcagctggaggcacctcttccacatggcagttggcaaaatatctcccactgaggggctcgatgccctcttgtagagcacaatacaggggtgtctgggcaccccctcttggtgcccggagcaccagccaagccaatgggcgcaaaagtgggcgcagccatccaggaacatggcgcaggaacagctccgagttcacaggccctgtaggcaggaagaaagaaaggagtcgggctaggcacagtggtgtgtatttacagtcacagctactcgggaggcggagcaggaggatcacttgagcccaggagtttgagaccagactgggcaacatagtcaagctctgtctctttaaaaaaaaaaacaacaacaaaaaaaatagaacagagctagaagaacagggacagaatctggtttcaagggaaccaggatagtatttaccaggcattcggggcttctgcgaggtgacttcactcatttcctgcatgaagcctcttcgcttccatccagactgcttgttcaccccacatcccagattttgttcatgctgtgtcccatgtctgaaacaattctcagtctctctccatcttttcttctagctcaagtcctgttccttgtttaaccagcatttattaagtacttgcagtataccagccactattttggacattagtgatatggagtgtaataaagacttaataaaggctaattgtgatcatcgctattataattactaatgagccttaggcagtgactatctaaaatgcagtatggtaatatgaatatgacagatcttgttatcctggtataacctcttccataagacaaagtgttgctctggatccccaattatctcactcagagtaaaagccagaatgcctatagtgaacctccctccaaaccctacaggacacagtgcctctctatgacctcacctcttgccactctcccccctcactctgttccagccacattagcctttctcaagcacaccaggaacttctgccttaggg

SEQ ID NO: 1244024 - DNA, 4001 bp, Homo sapiens
cctacacacacatcagaacctcaccatttgacttgtggattttcccctggtctgaattattcacagggctcctccccatcagcgtgctaaacagaagattggggtcaggacctcaccccaagagcccacacccgcgaccatagacacacacttggcggaaagacagacccatgtccctccaaccaggttggcaggggtccaaggacccaccaccaatgcaggctctccagatggcccccagagactgtgtctcctcattctcccccctcccccatctgctcagctcagctcagctttgtgaagtcctatgcttggggagcggggagcagggcaggtggagagatggagaagtcaggggccagcctggtgtgaggcgtccctcagtgtccctgccctcctctaatcaagcaaggtgtcttcacaaggatggatccctcgccaccccatagctcctccaaactccccccagccttctcttgggagaggacagaagccaacattttcaggaactgttaggaggtgaccctctggagccatgctgaggatctagcacgtatggcctaatgaccagccaggcgaggggaaatgatgtcaaggagatggagggccaccaactgagccagaaccctctgcggcctgtgtctccgttgagcccccaccctcagacctgcagggactgggaaatgcatctgggagaaggcacagcctcattttgcctgtcacccagcgtccagcaagggaaggctgacagcaggcaggccaccaggcaattagttagaggagggagccagggccagggcgtcgggggtggggagagtgagagtgagcagctcttcctctccctacttctgccttatgcagggtcttggagacccctgagtctgctctggagcccccaccccactgaacatgttgactgtttccaggctcggcctgagctgctggttccctcccagagacctattccccagcgaccccgctccaattccccaggtaggcacagaggggggtggttccagattttgctccacccctagcctgggcgacccacccgtcctgaccccaccctccctcatcttactcccttcagtggcttggaaaggatgccccaagataaagacccacaggcaccctggctctgacatatggcggggtagaaacacagatacctcctggccatgatccgacaaccccattccccgcagcccaggcgcccaacaaatcaggacccaacacctccagcaggtctcccgctcccgggaggttgtaaccctttcatctttgactccagacacagaaaggcagatgccccagacccgcgcccggtggctgggcctgcgtgcagtggggaagggggcgacccgggacccctgtgcgtgccccgctcccaacttcttcacaggacatacttgtttagaccttaagacccagctggggtggaggcgtcttagggagggagaccgggcgataactgaagaaagttttggggggagagtgctaagtcactctgaaaaaaaggccactgtcgctcccacctcctggagggggcagctgccggaccggggatctccaagcggcacctgagtccccgggggcggggacgcgcgcccagcccctgccgcgcccctgccgccccccgcccgcgcccgacccgcctccgggtcgcactcaccagggcgcggttgaacctctcctccagctctccggccgcgggcatcggctgcttgggaggcgcgggctgcttggggggcggcgcggcggggcccgcgggctgctcggcgctgccggccgcgttgcccatggtggtccccacccagccggccaggcgcctccagcctcggaaatccagctttccgggggacggggacgaggctcccggcccgggcgggggcgagggggcagcggctggcggtggcggcgggggtctcggcagcggggggcgctcggctcagcggcgcgcaggggccggagcgcggcgtcccatcggggcggccccgtccgtgggaccgggcggcgagctgcagggttgggggaggaagtcaggctgcaggccgccggggccagagggctgggccgggggcaggaagctgcggcgctggctcccccctcggcgattttcgaacttctgctgtcgctccccgtgcgcgcaaaccgcagttcgccgccgccgccgccgggcacccagccccaggggggcgggctggagggagggggcgggcgctggccgggggacccccgcaaccatggcgggcggggagtgggctgccgagccgcttcacctgccgcagagggggcggccggcgccgcttcacctgccggagcgggaggccaccgaggcgaggccgaggcggcggcgcgctcggcggcgcctccgggtcctagaaccgcatcctcccgctcgcctcgggcgagggattggccgggtctgggtgaaggggatcacggcctggggattggaggggcacatcttctccgcaccgaggatctcagcgactgcgagcacggctcggagacccacggtggtgcagcgttggggcgccagggctgcgttcccgtctcgcgtcccggactgagaaggtgggaacccccttccaggccccccaccttttatttctctcctcccctgcttagcccagagacgagctgaggacgagggggagccatctccaaacaggaactcctaaacagggtggggggcgcggacgcaggccagtggagacccccgccacctgtcccacctcgaccaaccgtgcgcctgtgcagggcacccctacaggttttagaatgggggcacctatggaatatggcaggctgcgagaagctgggcccgccaaggtggtcccaaggaggagtggggggttgcggaaaggaggatgagagccagccacaaggctggaaaaggagtgggcaccgcagaggagggaaaaagaatcttgacactgtcaccgccagggatctaggggggcctcttaccttggagaataacaatctctgatgtctgctaattacagaaatactttcagagctctttcattcatcctgacaatggccagagaaggtaggtattggtagccttattttagagatggggaaactgaggctgagagtaggtaagtaagctgtccaagggcactcagctaacaaaggacagaagcaagcctcctcactgtctacctccaaaacctacactggcttggagttgctgtcctggccctccactgcccatctcatgtaggacgggagagtatggggggctggggtcccatctatagcctgaatttgagactttcagttgctcctctcattccccatttaatttgtggggatccccaactgacccctccctacacttccagggcactgaggagggagggcccgctgaaggagccccgaattatctctaggccaggtcaggagccattagtgtcccctcccctgacagcatcctcctccttctgccctcacattcagagccactgacaagactttaagcaagagacggagagttaacatctaatctggaggaagaccctggaaggagccagccccttcccccaggctgacctggtttaagcctttcttctgccaaggtcaccagcaccccagatgggtgagagatgtgatcactggtttcgtggcctgaccaaggacctccaaggtgagtcaaagcagaattctccttgggcatgcagggaaaatgatccattccctgcacactgccatattctccttctcagacagaccagagccttgcccttgggtccttgcccttgagattagctaggacctcctcctcttcttctccttctttcttcttcttcttgtctctataagataactgtcgtggaagacttttttttttcttttaagatggagtctctcgctgttgcccaggctggagtgcagtggctcggtctcagctcactgcaacctccacctcccaggtccaagcaattatccagtctcagcctcctcagtagctgggaccacaggtgcgtgcc

SEQ ID NO: 1244025 - DNA, 4001 bp, Homo sapiens
gccggggtgggcggatcacaaggtcaggagattgagaccatcctggctaacacggtgaaacctcgtctctactaaaaatacaaaaaattagccaggcaaggtggcgggcacctgtagtcccagctactcgggaggctgaggcaggagaatggagtgaaccgggaggcgcagcttgcagtgagccgagatccagcctgggcgacagagcaagagtccgtctcaaaaaaaaagagatggaatttcaccatgatggccaggctggtctcaaactcctggcctcaagtgatccacctttcctcagtcgcccaaagtgtaggactgcatgtttaaaaaaatcaaacctcatgaatgagaccaaagcatctgctggtgcacacgaacagaacgccctttccttcaaagtaccccagggaaagcccaggcacagcctccccagcctggcagccctggccagcctgcaccgagggtgggtgtgagtgtccacaggtgggagggcggccggcacaccccagccctgctccagggcgagccccccatgcaccaggccaggaactcccggccttggggctgctaagccccaggggccccagcatcacctgctcttatgcatggactgagcagctactatgtgccggcccctcgtgggggtgggagggaaggaggggtctcaccctgcagagctttcaggaccagctgaggaagtttcccagagcccgtgggaagcctgaaccaaaaactgcttccctgtgagtaggactccccactttgagggatttggttctgagccggcagagcaggtgatgccggaggatccgatcgcacgcccaggctgcatggctctggtgttcctcctgccagcactccccaccaggacccctgctgcccctcagagagctcccccaccagagtgtgcagggccttctgagcccactcgggccgggagggcacccaggcctgcctttctccacctgccggctctcaaggctgaagctaaccttctccacttcctccgttaacattttccatacttttttttttttgagacggagtttccctcttgttgcccaggctggagtgcaatggcgcgatcttggctcactgcaacctccatctcctgggttcaagcaattctcctgcctcagcctcccgagtagctgggattacaggccagtggcaccacatccggctaattattgcattttttggtagagacggggtttcaccatgttggccaggatggtctcgaactcctgacctcagggatccactcacctcggcctcccaaagtgatgggattacaggtgtgaaccaccgcgcccggccttccatacattcttaaacagaactattttcagcaggagatagaaatcaggtctaaacacagacaaggcctgtgggaaggagaacgctggcctggcccgtggggtccctgccaggggcccagccatgtctctgcttctttcccactgccaggaggacggtgggctgagaggggcggcccagagctgagccaaggaccccaagcctcacatcccccgacgcttgctggataggaaagttaaaaccacccctagaagcctgtgcgctgcgcatggaggccaaaggaaggtcacggatcgtgcagacacaaaccttcacagaacgcttgagccgggctcacccagcaggtgccacctcccaagggccaaagctgacccctccccaggcccagccccaggaaatgcgcctgcccccgacccctccgccttcccaggccccgcagagacccgcagagcccccgcctgcgcacgggccagcacctgcgtcctgcggttgactttgacgaacactgggcctgcgtccgtgtcgtaggctcggccctcgctgatgcagccggcgccggggccgccgaaggcccgcagggtcgcggtgcgcagctcggcgcgcagcagctgctccatggagtgcggggcgcgggactctgctcgctcggaagcccctgtcggctgaggcgctgcggggcggggcggggcgggagcgcgcggcgcgtgaccccgggcggcgggaggggcggcctcaggcgggctcgccgcgcgctccccgcgttcgtccggcttcgcgcttcctgcgcccgggattcgggggaagcagccgggagtccgcgcagctcttcgcgggcgcgctggggcttgagctccctgcagggacccggtatccctgccccgcagcggacgcaggtccggccctcggcccgggcgctggtcacaggcctggccggcttcccacactgcagaccaggccgggcccagcggcccccgtgatgacgtggggcttgcgcactgggacgccaggtgccgatcggagagagaggctgacgtgggggctccgatggcacgcgctgacccggcccagggtggggctgctgattccaggatgtcctgggaaagggacttgagacacaggaatgcccacgcgcgcccatgcatgcatacacgtgggtacacacgcgtgcacacgagcaggtgcgcacctgagcccagtccgtgctgaagtcatttgacgtgaggtttttttattgtttgttttttgtgtttttaagagatggagtctctgtctcccaggctgcagtgcagtggcgcgatctcggctcactgcaagctccgcctcccgggttcaagccattctcctgcctcagcctcccgagtagctgggactacaggcgcccgccaccacgcccggctaatatttttgtatgttttagtggagacagggtttcaccctgtgagccaggatggtctcaatctcctaacctcgtgatccacccgctcggcctcccaaagtgctgggattacaggcgtcaagccaccggcccggcctgcccagctacattttgtagttttagtagacatggggtttccccatgttggccaggtgacctgcgtgcctcagcctcccaaagtgctgggattacagccgtgaaccaccacgcccggccatgcatgaggttttaatcaataaatctgttttttttagggccccaacaattgtcttttcccacagagatgcaggggtcctgccgcggggagggagcctttgggagctgcctatccccgcggtcctgcccacttgctcagctgggctggggtcatcgggaggctccttaactcctacatctggcacctcggccaggatcactggaacctgggcttagcggtcactgtcaagcaggacatgtccatgtggcctcctggtgtggcctgagcttccctgaacatggaggccaggttccaagagtgagcactgggagagccagagctcccagagagctggcagaagcaaaggccttttctgacctggcctcagaagccacacaccatcatttccacctccttccatcggtctccaaagccgcaatcaaggcaaggggatccgcagccacctcttttttttttttgaaacagggtcttgctctgtcacccaggctgaagtgcaatctcggctcactgcaacctccacctcccgggttcaagcgattctcctacctcagcttcctgagtagctgggattacaggcacgcgtcaccacgccccgctaatttttgtatttttagtagagacggggtttcaccatgttggccaggatggtctcaaactcctggcctcaggtgatccgcctgcctcagcctcccaatgtgctgggattacacatggcacccggccaagcagccacctcttgacaggagtggcagggctgccgcagaacagcaggtaggacaggaggatgactgtggtgtctgcagaaagggcatgtgccagtccctggctttttctcatctgaagcccaccctgctatcgcatcttgacagaaggttcctgacaggccagtgtgagctctcgtacgtctgtaaatttctttcttcctagttgacagtttggctgggtatcaaattccagcttggagatcagaccatgttctttaggaaccaagaagctgccagctccagttttgatgttgagaagctt

SEQ ID NO: 1244026 - DNA, 4001 bp, Homo sapiens
agggcttgagctttccagtgttggactacacttgtgtgctgtggttgaattgggaggttctctggagagaggaaaatcgaaggcactaatattccactaagatccggcaacagtgggactgtgaacatgggttacctgtcagtgtcctcagacgacacctcaactgcagtcctgttccacctacaggacacagactcacccgacctctcaggtgcaggcggcaccctggctgcctatgccagtgacctggggtcacttttcacctgaagagaccaccaagttccatgccacctcctgcccagcactggaaaccacctcatcttgagatgccgtttccatccaactccccgggaccacagcaactcctcccttgggtccccctggctcaccacacagcagtgatccctagagtagaagtcagagccagcggcctttcctttcctcctgctacacacaccactgccctgcctgctctcccatcctcatctggggctccacccttacacacacagacacataacacacacacacaacatatacagacacacaacacacacacaacacatacagacacacaacacacacaacatacgacttacagacacaccatacacacacaacacacagacacacacacacaacatacacagcagtgatccccgcagaacaggtcagggccagcggcctttctttttctcctgagacacacaccactgccctgcccactctcccatcctcacctggggctccacccttacacacacacagacacacaatacatacacacaacatacaaacattacaaacatacacacatacaacgtacacacacacaacatacacatagacacacacactctcctcgtgctcctgacttccagctgtcttcatccttctttcagttcttcagagtccccacctcctcagcctcagagccccaccacagctgccatgtcaccgctgctaggaacactcttttttttttgagacggagtctcattcagtcacccagcaggctggagtgcagtggcgcgatctcgactcactgcaacctctgcctcctgggttcaagcgattcttctgcctcagcctcccgagtagctgggattacaggcgcccgccaccacgcccagctaatttttgtatttttaatagagacgggggtttcaccttgttggccaggctggtctcgaactcctgacttcgcgctccacccacctctgtctcccaaagtgctgggattacaggcgtgagccaccgcgcccggcccgagaatgagtctaacagaaggacagagcatgccagggtgtggtgaggcgcagcagctggcctgggggcagcaccttcgccccgtttcacaacgtactgaccgaggctcacgggggatggacacctccagagtcacttaagctgaggacttaagcagcttccccggctagaacgaccccacttaaccagcaccgcagggcaggaaccccgggagcaagactgcagcagccagtcccgccccatttcacgtagcgcccccgagagaaagttcacggagaacaggaggtgtggggcggccgcggttcctgctccggacagttccccgcaggtgcaaactcctccggacgccccggacgcttccgccgcccccgttcaccgctcgccccgcgcaaagggttccccgcaaggggcggcggcggcagtcccgggagagccacccacggcctccggcgggagaagcccaggccgcgccccgcgccgaggcccgcgaccctctccggaaagaaaccggtcccccggcccgcccgacccgctgcctgacctccgccttggggttcactttcacgaacactcgtccttgatccgtgtcgtagctccggccctggctgatgcacccgccccccgagtggcccgtggccctgacagagctgcagcccagctcgcgcctcaggagctcctccatgttcccgccgcggccgcggacccgccccggatctggcggagactcgagagacggcggccgagcgggcaaacatgagtccgcgcgaggattgggcggggggcgggtgggggcggggcccggccgcagagacaagcgctaggattgggtggcgggaaggggcgggcgtggccgcagagatgagcgctgggattgaggggcgggaaggggaggggccgggaggcaggtaggcgcgggggattgggtgggggtgagatgacgtcagggggcggggcctgaccgaccccgacccagacggtttgggttcaactctcctgcacaaaataagtggaaatgctgatggaaatagttagaatatattttctaaagagctgacccactagcaaggggcatcagcccaaggtctgggtgccgggagcccagaatgttaagattgctttcgcccgggcgtttgctgaacccgaggaacagagctcctgatgtggggagtggcgggcgcgctcggggtgcacgtgcaacggagacaccgcccctaaacctggggccctgaggctaacagctaacagtggccctgccgttacggccagtgtcaggtgccagctgggctggaccaggaattcccagaaacctggcaaggcatgatttggggtgggtcgtgctgagggccacaccatccgcttccccgcttctgaggccttccgacctgggctgagcccggctacccgagtcccggggtctccggctcacagacttctcggcctccgtaattgcaaacgccagctcccccagtccatctcctgtcctggatctacgtctatatcctactggatccgtctctctggagaaccctaatacagctgtcaacacaaggatgaactaactacaagaaggcctgaataggaactctcccaggggacgaagaggtttcagccttcagcaaaggatggttcatagaaaccgttcgcatagtcggccctccacggactgcaaccctagttaatattacctacagtaaacaaaaaattcaagtatagattttagtctaaagcaaataggaaatgtcgcttccctggacgttgggagaagcaaacacgaatcctctcctgaggccggaagcggtggctcacgcctgtaatcccagcactttgggaggctgaggcgggcggatcattttataactatctattaaatggtacatatgtgtgtgttcacgcacttttctgtgtgtataccgcatttcataattttaaaaagcaaaaaagattagcggggcgtggtggcgggcgcttgtaatcccagatactcgggaggctgaggcaggagaatcgcttgaacccgggaggcggaggttgcagtgagctgagatcccgccattgcactccagcctgggtgacaagagcaaaactccgtctcaaaaaaaaaaaaggcaaaaaagaacagatgaaaatccgcagatggtaatagataaatcaaggaacacattagagaagagtgagagaattaaaaggtgctccaaaggcggtggagtgggtgaaccactccctgtatgctcctcccctcgggccagggcctgcggatgtccctgttttaatctgtggccttgaccgtttggacattttaactccatgccatgaacatgaagattttcatcagaactatgccaccgttaagtttttgttgagaaacttttttttttttttttttgagatggagtcttgctctgtcgcccaggcgggagtgcagtggtgcaatctcagctcactgcaacctctgcctcccaggttcaagcgattctcctgccttagcctcctgagtagctgggattacaggcgcacaccaccatgactggctaatttttgtgtttttgtggagatggggttttgccatgttggccaggctggtctcaaactcctgacctcaggcgatctgcctgccttggcctcccaaagtgctgggattacaggcatgagccactgtgcccggccgagaaagcatttttaggagtgacttttgggccgggtgcggtggctcacgcctgaaatcccagcacttt

SEQ ID NO: 1244027 - DNA, 4001 bp, Homo sapiens
gtgcgtgccaccacatccagctaatttttgtatttttagtagagacgaggtttcaccatgttggccaggctggtctcaaactcctgacttcaagtgatgcatccgcctcagcctctcaaagtgctgggattacaggcgtgggctaccccatctggcctccgatcttaattaagttgtctaagaccataaatctctaagtggcagaacttggatctgagtttgggcttctagtccaagattcccagtataccatgaagtttcctacgagcatccatcactttagccatacctgcttgcttacgggcactttggggaatggacaccacatccctctcacatactcaagaccagctatgtagtctgtggagcccagtgcaaattgaagtaccctgagccccttattcaaaaattctgaatttgaagatagtaacagaaaagcattaaactaagcacaggccccttgtaagtgcagggctatttgtgactgcacaggtcattcacccatgtggtgggtgacctgcaagtaattccctcagcccacatcaccctgtaccaccaccccttcactggctaactcctttccttccttggagactcagctcaaatatcacttcctccaagaagcctccttcaactgcacccagtctcaagctatactaagcccctctggtccctcaaggcatcctgtcctggcacttaccagaccatgctatatcattctggttattgcatgatccccatcctttcacccctgacctccacatgccagactgggagctccttaaaggcagggactgtgctttccagctctgcgttcccagaacttaaacactgggacagacaccttgcaggtgctcaaagagttttgtggaatgaagtagaggaaaaccagacttggtgaggaggaacagcaaaacccagtccgaaggaaggcaggctactggggagcagtcaggtagatgaaggtaccaaagagagagggttgaggaagaggagccatgggtgtgtcagggatttggtgatggtgaggaccacagccagtcaaggcaggataaggagcactgtcaacaaactgactaatccaagaaggcctcctggagtgggagctccatatgcctccaagaagtgatttggggctcaggaatacataaatagatccaacctgcccacacgctcttctctgggagtcaaggaactgggttgtgacaagtcagggaagtatagattctttgtctctctgcccagccctcggctccagcctttcttagaaactataggcatggtggctcaagcctataatcccaacactgtgggaggctgaggcgggaggatcgcttgagcccggaagttcaagaccagcctgggcaacacggtgaaaccccgtttctaccaaaaaaaaaaatttatatatatatatatatatatatatatatatatatatatatatatatatatgaaaattagccaggtgtggtggtggcgcgtcaatagtcccagctacttgggaggtggaggtgggaagatcacttgagctcaagaattcaaggctgcagtgagccgagattgcaccactgcactccagcctgggtgacaaagcaagatcctgtcaaaaaaaaaaaaaaaaaggaaggaaggaaggaagggaggaaggaagggaggaaggaagggagggagggagggagggagggagggaccagatttgtgacttacagtaggttgatggtatcatcctccaagaagttgaccaaattgccctttgaggctagtgggagtcctttggtagtgacggtccggttcatagacttggggtttgaaaagggttttggcagttggtcaagggcattcatcatgttgaagttttctttcttcagtacagcctcctccccatctcccacttgatggagtgcctctgatgccatctgatttgttcgggatgacacccgtcaccatgcaggacaacccagctgaccagaagcagagagaaactgtgggggcagtggcccacctttagtttggacagtctgcaggtgcaatgagctgacttcataatcatcacagagtgtaacaattacaggccagcctccccccttgatttgaggctactgctgccaggctagctatgtggctggccagaccaagggccagtgtgactgtgaagcagcatcatgagaggggtaaaaccaaggaacagactgcatgagcccttgggccccttccagctctaatactccatggtgatggcagccctgcccttctctgaagatctcaaaatgcctgacacctgtgtccttccgcactgccctgggaaggagaataaggatggtgagagatgggcgtgggatgtagaggatggtggtgtggccctgagagataggcagtattggaaagtgtctgctggggagggaaactttgtccgtagaagctaaggctctctatcctgaaaccataggctgcagactccactgtgcccagtcggttagtgaaagggaaagcccacatggttcataggggttcatggctcacatatgatcagacttcactgctagaattctaaatgtgccacacccacactcccaagtactttcctgtgtggagtgacaatggtggcagttgcagtgggatacagagatgggccacacatgatctctgctctcagagaaaccaccttacagtaggaaaacatgtacacagcttcaggggtggggaggggggctgttagaaagcactggctttgcagagtcagatgtggatgtgaagtccagccctgtgccgcctagctgggtgacctttggcaagtgatttaacctcactgaacctcagtttcttcattggtgaaacagggataaaaaatagcgcctccctcacagatttgtgatgagataaccatgtaaagttttatttcttcctatggatgaggcaaagcaaaggacatttaaaaataccaaatcatatctttttgtgtgtgttctatataaccaaggtttcttgcccttaaaaaaaataaaaaataaaataaaaaatagaggccgggcacggtggctcacacctgtaatccccgcacttcgggagaccaaggcaggaggattgtttgagcccagtagttcgagacctgtgtgggcaacatggtgtaaccccattttgtagaggcgaaacctctacaaaaaatacaaaaattagctgggcaaggtggcacgtgactgtagtcccagctactcaggaggctgaggcaggaggatcgcttgaacccaggaggtcgaggctgcaaagctgagatctcaccagggcactccagcctgggcggccgatcgagaccctgtctcaaccaaaacaaaacaaacttttgaaaaatagacgcaggtgccctctggatgctttgctgcttcttgacacctgtcgtataatctgtaatgatgtgatttctgcgattccttttcattgtctgtctttcccttgctcacagtaagctccctgggggtaagggcgggtcgtcttgtgtcgcattttgtctccagcggagatccgttccgtttggaacggaagctggcgcacagaaggctctttagaaggtcggtgtgtgtgttgcggcagaaggtagaggccgaatgtggccgcgggtggcgtgttgagcgcggagggggtcgtgggactcgggaacctgtgcaggcggtggagaggggcgcagcggctctgccccgtgcggcccgcagatggcgctgcaggccaggtcctcgccgcgcgccagcctggaacccggaagcggcagcgcggcgcgacccggcgggcgggctctgggcgcgggaatcccggcggatcccgggcgggcggatgacccccagccctacccttggtgccgcctcctcctctctcctttctcctccggcagccagcgcgcctgtgtcctctctaggaaggggtaggggaggggcgtctggagaggaccccccgcgaatgcccacgtgacgtgcagtccccctggggctgttccggcctgcggggaacat

SEQ ID NO: 1244028 - DNA, 4001 bp, Homo sapiens
ttgaggtggggggctgggacagcagctttaggaaggccccttaccccctccaccctccattgggacacacctggccctcacatgctaaggcaccccttccattccaccctccccaagccaactgcaaaagggcaggacgtagagcctggcagggaggccacgttccagtttccgtttctgactcccggccccgacaaaccatcccggggcagggcagtgtctaggaattctaggacttgggacaagaatgcgccttcagttcatcgctctccccaaggagattctgtccacgcagagtctagccctggtctttggcctgggcctgctggatgaatggcaggttatttccccttgaatctcagcctctgcacccctaaagccctccacctctggacattctcccttctctctctctctctctctggaagtcaaaggaggggcagttgcaagaactgggctcctttgcagggctcccttctggggcgctggccgcaccgcagagcctacttggcctgcagatttgggatatgaatccagtgcagcgtggggagcgaggagggaatggggagggagcggccgccgcccgtgcctcctctacctgccaggtgggatctgcgtggcggaagtagcagaagttgtccgtgatccacttgtagatggccgacagggtgatcttggtggccttgctggcctgcatggccatgcagatgagcgtggcatacgagtagggaggcttcacgtgcggattggtggcgtagtccacgtcgtcggggggtggggcctgcagccccgggggcgcgctccgcgacgtgcacgacgacgtgggcttgcccggcgtgtgtggctgccccaggcaggcggggtcggccgccaggggggacccgggcgccgctgaacctggcacctggtggtagccgtgggggtcggtgccccccgggggcagggcgggggccttggcgttgagaatggagaattcctgcagccactgcaggctggtcaggctgtcatccagggcgtcgggctcctccaggccgccctccggcccggcctcctccgccggcccggctcccgagaggcgcagccagctctccgccatgtctgcggggactctccgagggggcggtcagcatccacgggctgagccgggggtggcccgccgcgctctctggcccgctgagtcccgcagctcccgttacacggcctcccggacgcgcgcttccatctcgcgaccccgggggcgcctcctccgaataagtatgtggtgcctgcgaggaccacggtgggagctgagcactaccccacccccgaggggacagtgtgtgtacggggacgccctctctaacatcatccccgcagctggggaggatcttttagtgccgaggtatgggaaacagaagcaaggccctggggtcccacccccatcagatctgcctccctcttcctttcctcttcgaggttttattagccaaatgaagagggtaggggcatccgaggctatccttttctcccgaagagcaggaaatcaggacccccttcctcctcgcaacaaatggaagtggggcgagaagtttgggagggcggtacgacggggcgggggcggtggaggtcctctgatccttgaaaaggaatattatgataggggatcattgggaaggaaggggacggaacagtaacggggggcaggaggcgagtttcccccagacttctccgatgtcagtccctgggcccaccacttccgttaaggacgaatgagagagcgggttggtaccgttgcccacccttccccctggcctgcagccctccccatcccttacctggctcagagcgcagcccgggccagaggaaggttctggaagaagttgctcccaccccctgcggctctctgcccccagctcgggggccctgccagcgcctcttgccgcccccccgcccgacggcgcttctctgagctaccgcggccccgggaccggcattaagtagccgctccaaaggcttctcctgctgccatggcgacgctccgcccccataaacagcttccgcctctgccattggccagcacgtctccaaggagaccgcgggcacttgccactctccctggcggcaactctcttcgaactccctccttctgccgccctctcccgcgccacccaaccccctacccgccgctaagtcccggctcggctcattcccgcccgagggccccgcgctggggtcggagaagcgcgcggcctgcggcaccgggaaccgctatggatccgttcgttctggggaaccaagactctcgcccccacccccttcctgtcccgtacgctttgaggcgtcgactgctcctgggacggagcctggggttggggggctaaggctgggagcgggctcaggctcgggaaccgtatccttgaggttttctttcctctccgctacgagtggcactttctcatgtttctgcagcctttccctctcccccgactcttagggtctttctctggtgtcccaggcaggtctgactttccgatgccacctgccgcttacatccacagaggcggcagacacaccaagggggtagggtaatccagtgtgtcccagtaagcagctccttccccacccgtatcctcgaggttccaggaagctgacattccagaggcttctgcagaagcgcactcactcctctggagacagctgatgaagcagagcccgtgggtaaaactctgaagtcatggacttgtcaaattctcctagcggggtcatttgcccaattaatttcaccaacctttaagtcacagggattaagagtagagggactctggggactgtgtcccttcctcctcccttcccctggcctccctcctgtcaccagctttcctgctctttaattattgaggagctgcagggttggacgttctccggtttaaggcggctgcagaggcagtggtgggggctgggttgattaccccgcctctgcccaggagctggagagccggggtcggggaggctggtgcccagaccatgaagaaggcccggctatggcgcatcactcccccgccaacatgcctttccctagcccttgcctctcccactcctccaactccagatcctcttgagtaaaagtattaaagagtgctggcgaaagtcagacagaaactttcacagataagctcactttgcagttagctctccttcccttgtaaacagttttattcatttttaagaatcatgcagcaatccataaatattgcattcttgatgtccccactgtagtgtgaccacaagtgtactccagggagaggggtacacagatggcacaagcagtatacacatgcacacaccaggtgtgcagaccaaagcaaagtgagcgaccagcgtgctaaactccaggtgggcaggaccccaactcccaggtgaggtgggcaggaccctaactcccaggccagccggcttagagtgtggtggtctgtgcccaggagatgcctcagcgggggtagaaactctggtgggatggagctgggcagaaggaaaaaagggctctgtgaggaagccgggatcacaccacctgaaggcaatagggagagcacaggcctagtgcagcaggaaggagccctgggtctccatagttaggctgtgccctgtgggagaagccaggccccacctcttctctttgggtgaactgttgacgtgactatgtgactgtctccagatgaaggactggggcaaaagggttggccactgacctgtcctcatcaggctgactgaggaccagctccttggatggagtatttctgtgggccagagagctaaatgacagccaagagaaggcagggggagggaggaagaggagaaatagtaactgagaaacaagtaaaggacatttctaacctaggtatgccttggacatgggactgaggccttgaggaatctttccgtgcttctccctaggagaggactaagcacctgctgcgaggaaggacagggatcctcaggaagggggtcctggccactgtggctac

SEQ ID NO: 1244029 - DNA, 4001 bp, Homo sapiens
acctcgtgatccacccgcctcggcctcccaaagtgctgggattacaggcgtgagccaccgcgcccggcctgaaaataacattctttaaaatgctactaccaaagtttaaggaatatgctggtgcacctttccatgctaagaaacagaacagcgcatgcacacacacacaacacgcaagtcaagaagaaaagcaacagctcttaccagcatctccaacaaccgaaagcgttaaaaattccaatttgtaggccgggcgcggtggctcacgcctgtaatcccagcactttgggaggccgaggcgggtggatcacgaggtcaggagttcaataccagcctggccaagatggtgaaaccccgtctctactaaaaatacaaaaaattagccgggcgcggtggcaggcgcctgtaatcccagctactcgggaggctggggcaggagaaccacttgaactcaaagggcggagattgcagtgagccaagatcgcgccactacactccagcctgagcgacaaagtgagcctccgtctcaaaaaacaaaaaacaaaaaaattccagtttgtgtggacaaaggctgtacttgcaatgatctagaagtgagcccctgaggaataattagcatttcctagacagcaagtttgtgtttcaagcagagtaaacgataacttcataaaaccacaggaccaagctaaattgttttgtagcaggataggcagttccctatcaggctgacttaacactctacatgaccttgtaataattcctaatcaactgtctttttgtagaagttatgcgaaaagcatctagttttccctaaattttaaggttcagagcacagattgaaaatccatcatgcttgaagcgtcttccaatttggcctactgaaaacacggcagggaaaaaggagtccttcctgcttaaaacaccgcactcttgaaacagctcactactgaaaacgactgaacaacaacaacaacaaaagacaacagacaacccttcatcggttaagagacatagattttagttcggggcagttcctcccaccgcacaccgttttcacatttctgttcagcgcgacctcgctgcagaatagaaacagcacacgtgaactccccgcacgcacagaacccagaaaccttgacccgcgcgcgcagccgcccgcagccccggctccaggaagggggaaagacggggggctgcacctgccaggaaggggaccgggaggacgggggtcggggccaggggctgtcgagggttgggatccagccggggcctgggtcccgctggtggtcccggctgtgggagagtcgggcccccgctcgtgggtggtcccgggcctgggcgcgtgtcccgtcccgtcctgccaggcgctgcaggccgcagaccccgcccgccccgccccgaggccactcacacgcgcggcagctgcagcggcggcgccccgcgcctctggaacacgccgtccacgaataccccgttcttgcccaagcagcgcaggtagaagtcgccgccggcgtcgggcctgggctgcgcgggcggcagctccggagcggccccgccatggccgccgccgcccgggggcgtgaagatctcgaggtggcgccgggagatgaagctcgagtggcccatgctcacgtccaccgagccctgcgacgagttgcggccgatggtcaccgagcgcttcttcatcagatactcgaactcgcggccctccaggcgcgccacggcccagccgcccggcggggacccgccgcccccggccccgccgcccccggccccgccgcccgcgggtggcgtgcccgcgcccgagagcgccgccgcggccgccgccatgggcctgcgtgagggcccccgggccgctccgcgcgggcgccggtggcgcgggccgaggcccaggccgcgcgggtcgtcggccgccgcgcaccggagctgagggagggggccgagcggaggccgccggccggcgagcgagcgagcggcggcgaggggcgggagcacgcgcggccgcgccaccgagccggcacgccgggcccgcccctcgctgacggacggttacgccggccaatgggggcggcgtacggcagtggggctaccgaagcaggccaatggcaagacacgtcgcaccaagctgccggcacgtccggcggcgacgcccgacgcagtcccgactccgggcgccgcggaaaacccggggcggacagtcggcagcccgcgcgggatcggggctggcgcggggttggcgcgggcgcgggagctcgggggtctgagcccggcctggcagcgccttaggcgcggcgggcgggaccaggcccaaggtcacagcgggcgccaggcacgcagcggcccccaacccggcgtggacgccggggtgcggataggcggcggcccgcgagcccaggcccggccgccgagcggccttttccccgcgaggtgcgggaatatcgcggaggggccgcgtgccgcgtggcctcagacccaggggacccggtgacacgttcgtttttaaccagcagctccaggactggatgtcgttatctttcctggctagcgagtcatgtcattgtgtcaaaactgtcctgcaaaatacgcagaagttctgaatcacatttacttaactgtcgtcagcacacagtttaaaaatatacacgaggccgggcgcggtggctcacgcctgtaagcccagcactttgggaggccgaggcgagcggatcacctgaggtcaggagttcgagaccagcctagccaacatggtgaaatcccagctctactaaaaatacaaaaaaaaaaaaaaaaatagccgggtgtggtggtgcacacctgtagtcctagctactcaggaggctgaggcaggagaattgcttaaacctgggaggcggaggcaggagaattgcttcaacctgggaggtggaggttgcagtaagccgagatcgcgtcactgcacttcagtctgggcaacaagagtgaaactacgtctcatatgtatatatatgaactatatatatgtgaactatatatatatatatgaactatatatatatgaactatatatatatgaactatatatatgaactatatacatatatgaactatatatatatgaactatatatatatgaactctcatgaacgaatagttaatatcttaaccaatctgatactaagtttttaaaaaaagaatttcgccaccgtttaaaaaattacaagatcccatctaaatcaagatgatcaatagtccagatgttcactaatcaatgaaactcctaacattaaaaagaaaaaatcctgtggccgggcgcggtggctcacacctgtaatcccagtgctttgggaagccgaggcgggtggatcacaaggtcaggagttcaagaccagcctgcccaacatagtaaaagcccgtctctactaaaaatacaaaaattagccaggcatggtggggcgtgcctgcagtcccagctacttgggaggctgaggcagtagaatcgctcgaacctgggaggcggaggttgtggtgagcagacatcacgccactgccctccagcctgggtgacagaggagactccgtctcaaaaaaaaaaaaaaaaaaaaaaattgggaaaagaaagaaaaaatcctgtaaatgtatctcacgggtacttaaccagttgtggagacgttcaaggttcaggatcatgaaaagtctacaacctcttaaacaggaagaattccgtgggaagtcagtgtcagccctagaaaccatggcttgggctccaagcgcgcatcttcgcaaaactgaaatagcaacaaatggtaccaatttagtctctgctggggagggactgccccctgaattgtctcacttctttcagcatggtggttcctgcagggtgtgtgaggagaagatcctattatagcctatatatacaggttatagcaaacaccccagggttcctctatttgctgcttgttaaatagcaaagaacaattagaagagagaaatgatataatttaggtacagaggcctggcac

SEQ ID NO: 1244030 - DNA, 4001 bp, Homo sapiens
ttgagtggaggtttgggggcagtagctgagatgatggtgccctatctgtaggctgtggtcatgtttaaggggcctgagaagaagtggtcaaagggccagaataaagtcctgttttggccacacctggtaggacccaaccgccttctccatcttccttctaagcctttgttggggtggcttggggctggaatgggggcctgtttgaaagcaagaggtgaggggggctggtgggcatgtggagtaggcactgctgaggctacgcccactcagtcactgcctcagggacctccaaaccagagcgggggagcagggagcaaattccctttagcttttatcttccctaagcaacaatcccatgagacaggtaatgttgaccttacttttcagatgaggctcagagacgttaagacttgtccagggtcacgccgcttatggaggtcaggctatggaaggacatgttaaccttccaaggtatttccaggaatacacccaggccccactctgggcaaagaatggggccaggaagggtccctccacacttaaagtcctctctcaactctgtatgctaaggctggggagggaaaaactgtgtactatggctcctccccaaaccctttcccttggcctctggaatgtgtttttcttgtcacatttgcatatgggtgtgtaggtctggctggagtttctggacatttaaacaaacagtgagaagtcacacactggaatcctgactcaggagcctctgggaagctgccagcttctttagcctggcctacctcccccacttgcccccctccatgctggccaggccaacacccctccccagctgaccaggaggccccaactctctggtcttgagtggcaaggtctgcaaagagaaggtgggactttggtctcagaggtctgactctttctaggctgctaggaactgggacagtgggaagatgggacactcgctggccactagtactcaccaggacttgggggccatgctcctggctggggtaggggagcccgttacaccaggcctctgctgagaagccaggcaggaaggcctcggcctccgccacgtccactgggatctcctcgaaggcctccagcggccctggggtcttaaaggagtgtcctttgagggccagggtggtctcggcctctgggaagacgtcctcatggaaaggccgcttgtacgggtggaagggcgcgtggctgcccttgaggaatcgcccagggctgcttgctgcggcctcctcaaagccaaagccaggatacttgtctgagggtgagagcctgaagggcccagggccggggccggctgggcagtggccctggacttgctcgggccctggtgacgcaatgcgggggctgtgtgggggcagtgagggtgtcctctctggagggccgtcggacacaaatgacgagcagctgaagccggcatgcttctgggtagacagagagtagcgagcctgtgagtggaggctgaaccaggcctggggactggctgggaccctactctgttctggggtaaagggggtctatggctgagctctgggaagaccctaaatggtggagaagaaatagcctacccttggccccgatttcatgagggcaccctgccatgaaacctggggtaccccaaatctgatggggctcacagccctgggacaggctcagactgaagggatgaggagtgacccctctggatctcggggtccctgaggacttgtttgctggtggaggggacaagacaggccctgggaggtccctgggggcggtaaggtgactggtcttcttgttgcctgggcagccgcaggccttggcctaaacccaggcccagatgccgggtacttacactctgtggggcaggggagcctgggaggcccggtgcctgcatgaggtccccttggcgctcgccctccagtctggtggggcccggcagcgtgacgtcagactgcggcgggggtagcgacaccatcacccagtcctggcctcaaagaaagccgtctgccatgagagtgaggaccagcatccagtggggaccaacccaggttcgccacctccaccccaaccccatccttgggctgggaccctgcctccagtcagccatctgatgagagagagagagagagagagagagagagagagagagagaaccagagagcgagagagagaaagagaaatagtttggaaaagcagagcagagagatcagacccctgtggagaaagggcaaagtgagccaggtaggagcctcaggaggggcttggctgatctcaggctgcagctgcagagactgaccgactgaccagtgaaaccccggctcccagctgggctctgcctctggctcctcaagatcggtctcctgtgtctacagagaagggcctggcaaggtgaccacagcaggtggtctccattcagtgactgggcaagtcggtggtcctgaggggagagtgagctggtgcgtgggtcagactcatgcttggggtgggagcaaccccctccatgcaggtgagccagccctcagcagaggctggtcctgcagtgaccctcaggtcagcctggctgatgtgaccacagtgtgtaactggggacccaaaggcccccggttgcctggaggccctgtgagcccagcgggccctgacgatgtcaccacccacactgcagcgcctggcaagtgctgttccacctgtgtcctccaaactctaacctgtgactttgtgcaggccactgcccctttctgatcttcagtttccccatgaagacctagagccttgggtacatgatatcggagggctttttctgctcagaccttctgcaatcataggggaaccctgtccctaacacagtggggtggttaagaggactcaggcctcaaagccggggttggcccttcctctcaagcagtgccagcaaagctctctgaacttcagcgtcatcatctaactgggagagtgacaggccccacctcacacagatgttgtgagtgtcaaacaaaatcatgcgcagaaagcattcagcacagtgcctggtgcacagtccgtgccccataaatgccagttctcattatgaatattattgtgagtgtggttctcactttttttttttttttgagatggagtctctctctgtcacccaggctggagtgcagtggcatcatcttggcttactgcaacctctgcctcccgggttcaagcaactctcctgcctcagcctcaagagtagctgggactacaggcttgtaccaccacacctggctattttttgtatttttgtttttatttttatttatttgtttttttggagacggagtctccctctgttgcctaggctggagtgcggtggcatgctctcggctcacttcaacctccacctcctgagttcaagtgattttcctgcctcagcctcaagagtagctgggactacaggcacatgccaccatgcctggctaatttttgtatttttagtagagaagggatttcactattttggccaggctggtctccaactcctgacctcagatgatctgcctgctttggcctcccaaagtgctgggattacagcctagccactgtgcccggcctctcactcttactatcctcagctttttgccttcctttaccacctgcaagagcaattcctcttaaatgtacttctctttgcccaagtggcctctgataaatgctacagtttgctgagggtctgctctgggctggccactgtgtgaacaatttggatggttttctcattgatctattagaacaatgagaggaaggagcattattgactccaccttccagatgaggatgctgaggctcagcggggttatgtgacttgcccaagtcgcccaggggcaagaactctggtctgtccgactgcagactctgcactctgcttatggtttcttcattgggtgggtgtcaaagttggggtaggctaggctgggaggccaggcatcaagaaaagcatgaggtgtacactcactccttctacccaagaccccctcaag

SEQ ID NO: 1244031 - DNA, 4001 bp, Homo sapiens
ggagggagtcacacagacaggcaactggtgacctgggaactggggagagccaggccacgccccactggggcagggaggtgcctccccaccaggagcccaggccccgggtaaagctgcctgcccaccgtgtcctccatcactggagctgaccttaagcccccccactcctgaggacacgaggctccactggtcaggcacgtggtggtgctatccccgcccgatccccagctccctgccctaccctgggctcctccccaatttcctttaaagtccagaaaatgcagccgggcacggtggctcacgcctgtaatcccagcactttgggaggccgaggtggacagatcacaaggtcaggagatcaagaccatcctggctaacacagtgaaaccccgtctcttctaaaaaatacaaaaaattagccgggcgtggtggcgggcgcctgtagtcccagctactcgggaggctgaggcaggagaatggcgtgaacccgtgaggcggcgcttgcagtgagccgagatcacgccactgcgctccagcctgggtgacagagcgagactctgtctcaaaaaataaataaataaatgaagtccagaaaatggggtggagaaaaagaaggggagatatggaccccccacagcctcctgcccacatgcccctcatggcaccaggccaggctgtgggcctcctgcccctgctgggcactgcccatcgcctggcccacacctctccagtctcagactccgcagctgcccagggcttggctgagacattctccagctatgctgagaaaggccaggaacccttgcctctgaccctgaagccaccacccctcagtgggggtcgcctgggcatggcccgaggcccacccacctacaccctgagtggccacacatgtcccacatggacccccagcccagaacagacatgtgaacgcacagacacgataccactccccgtgagacccccacggcctcctccctgaagcaggggggtcccagcacccctcaggaggtcgccacctgtgccctccctaccttgccgcacagagacgtagcggtggttggcagccaccagcaccacctgtgggtgactctcctccagatcaaagagctcatccttgccaggtcgcgtgtttcggccggccttgagggtgcctgcgggccccacgggtgccaggtagtggccgtcgcagtccttgaaggccagcttgcccgccttgaactccagcgtgtagcaggcacggggctcaggctcccagaccagacggccgtcgctgcgcaggtagcggctgtcacaggacttgaggcagtaccgtcggctccggaagatgagggtgaggagggcgtccacgccccagggcttgtctccgtctgcggccatctcgtcctcccgcgggcacaggtgcacgtagcgccgccggctcacgctcagcaggtgggcctgcgggtggatggccaggtgcacggtccacagctcggccggggaaacggctgtggcgaagcaggacagctggtcctcggtgcctccgaagaagcggccgtgcggctcggaccgcagcacccagcgcccatctggctgcggcaggaccaggaagcggcagtcacggcccggctgctctgcctcacaggccacgcgcccgtcctcttctgccgacaggtagcggcccaggtggctgctgcggagcagcacagccgtgccttgtcctgggtcgggttccagcacccaggtctgcttcctcttgaggctgggtgccgaggcattgaccttgaagccgaagctctcagctgtcaggtagcggtcagtgtcgttgacgaggccaaactggatcttcagcacctggtgcaggccgttcgtcggcatcttcaggctggccgggtccccggaggggcctgggatgcgccctctgagtgctcacggcccccgcggtcccccagaagcccgggtcggctcggctggcccacagcccccagacccagccggcgtcacgaaccccctgcctgctctgacccgcctctgacccgcggcagcagcctgggcagctcttagagggcccgcgggcagcagagggcgggcggggagggcggatcagagacgtgcggcttaggagcagcacctttcattaccctcagcttggatttcagccactcccggattgcacagagcccagagcccgagggcctgagggcctacggggctggagggcagggttgatccccttttcctcatagcgtgggcccagcgcccctcttcacggccctgcaccttttggcctctctcgttcctgcccccctcctccaaccccgtgtgggctcccggcccggcccggcccagcccttccggatgtagaagccgtccagtggaacgctcacggctcggccgcaacctgatcgccgcccgtaccctcggtggccgccaggccctcagctggatccagttactgcttctctgattcctgctgccagaagcatagcaaggaccccagccacaacctgcagcccaggtcgcctccaccccagaccggcctctggccacactgctcaggccccagaatgacgcactggactgccacccacgctggagggtggaacacagtggccgtgcagccctgcaggcagggggcagagtcagaggccctgggccaggctggcccggccccagcgcactcctgtgcgctctgagcaagttgctgggccctgaggctgccccctcctctgctgtgagctggagtgaagccagcctcacttcactttggagtctttacggatgtggatccaggaggctggtgggacgatgtccaccccatgctcccagcggtggcccttggaatctgggagaggatgaaggccagcaggccgggagagactggaagtggtcacacctgtctacagcacctccttgctctgggccacctggctgtaccccttccccagagcctgaggggcactgggccctgctcaccgtgcctggctcctgcacctgcctcaggggcttggggccaagtagtgaaaccagagctggccaccctgggccagggccagcccggtgtcctcttcctcataacagcgtgtgaccctcccgtctccctggggactgggaacaggggccacaggccccttccggtcatggcctggagtcactcccctgtcctcctgggcccatctcctgagtggccatcatgggggtccccgtagggcaggagtctagccaaaagcaaggggcctgggctgggcacctgtgggctccagaggtgggcagggccatggtggcagagtgtgcacagactcaggggctcttcctctgtcctctaagccctggacagcaaccgtgccaggcacctgcagacacaggggaggaaaaagaggagacctgtccccactgtccccacgctcaggggccagggtgggggcagagagactcccacatgcaaataccccccagggcacagcgtacgccacgacgccagggcctgctctcgcctctccctgtgtgctggcctcatccgcctctatgattcacacgcatttatgaggcaccaactgtgtgcgaaaccaggtcacgtgccaggcaccatcctggggagacgcagtctggggtttcacccccttcccagagacgatgcccacacacactctcccacagtttccaggggactgaggacacaggcctagcaccgatgccagggaactgtctctggtttagggatacaagctagggtgctgcctgcacctcactttcccattggctcttctttttaaaaaacttttttcttgaaatagggtctcgctcctcacccaaactggagtccagtggcgcaatcttggctcactggaaccttcgagctcaagcagtcctcctgcctcagcctcccaagtagctgggattacaggcacttgctaccgtgcccggctaatgtttgtatttttagtagagatggggtttcaccatgttgcccaggctggtctcgaactcctgacctcaagtgatctgcccgccgcggcctc

SEQ ID NO: 1244032 - DNA, 4001 bp, Homo sapiens
ctggaatggccctggttcagccatttgtccatctagtcatttgctgagtgcccatcatgggccaaatgcagtaccaggcacaggagatacaatagtaaacaaaaacagtatgtctctaccttcatggagattacagtctgacactgaattcacaggagaagacttcactaaagatctctgcccttctcccaattccaaacacctttatccctgactctaaataaagcctggagtggacactacgaatgccataggtcttgtcgtacagatgtcaggcaagaacgtgctcaaagcacggtaaaaaggaaaaacttgcctttagaggatttcagggatgtagatgtttccgtataaagggggaaggaagagagagactcctattacctgcctacaacgttctgttgtgatgtcctgctggagagtcaccacattggggagaggcttgattggaaccaggtccactcctggaagaaatcaggtcagagtattctaaaaggttgcttcaagcagggaggagagaaatacaggacaaaataccttatacacccaccccttaaaacaccaaggagagctgtccgttactcacccacaataaggctggatacaggcataaacttggcagctacctgcagcctataaaaggaacagaaatttaaaaacctagagccatccttttccccctcttggcaactgatctctcatccctggtgttacgtgtactggccaaagcatatcataggcacgtattccaagccctttctctgcaatcaagaaaggaaacggcccccaagaggaccgggattcgggttcccctcccgcagtgaaactggaagccatcccagctcagaacccagaaagcggccaccaggagcaacctgtggcgagtgttacgaaccatccccctggcgcagcacacaggtccagcaaggctcgggctttctgcaggaactgaaagcggcgattgagctggatcagcttgaaagcagatcgggaacggtaacctggacaaaacaaccaagtgcgcaaactgcttcactagtaggatttctccggcctcgcaaccgaccaccccttctgcaggagaggtacataatggtcgcaaagagcaggcgaaccgggcagagatcgctcgctcgctcgcagactgagcgaatccggactcacccgtctccttcgccaagtgataaaacttgtctcgtcggctcttgccaactttgcccttcttgcccatggtggaaagggggagtatccctcaatctggggagaaagtagaagttgggaacgtctctttccggagcaccagattccacttccagtttcccacttccagtttcccacttcccgcagcaattccaccccgcgcccctctccgcacactacctagacccagagccgctttctccacacttggaaccgcacaagtatgcagctaactacttccgcttccgcttgcgtcccctgcgtccctggctcgaggttttccgccattttgagtgtggccctagattgttctcaatactctgtccttgggttttgtaagttgaaagttgagactaggaaggcatatcacaagaactataaacagagtttcaatgaggcaacactgaggaggagttctactccttcctcatccccttccaaagcccctgaactcgagtagccgcccctcccatcatggttcccttagtgtggtctcgccgcacaccccgcccattgacccggaattcttctctgcctggtcttcaggtcccaatcctccgcttccgcgcttgcgcgccaagacggctcggatgccggcggtctctgctgaagagagaagatggcgcttgacggaccagagcaggtatggcgggtgcagtggcggcccggcaggttacggggctgggtgcggagcgagcgtgatctgagtggagagcgggccggggcaggagcgtcgggtgggtcggaggtgcctggaccagtccatgctggacgctgcctgcgaccggatctgctgtgtcagcgccgccctcggtgagtcagggcaaggctgggagaggaagacgcggtagaagcggagtgagtgagggaagcgatgggcgcgggaatggccggcccacgggtcgcaggagacgggacgccagtcctttggctccgttccgctggctccttcgtcagtactgacacctcgggcttgtagagcacttcacgcagtgcaaagcgccccccgtctatatcatatcgcctctcggtcctcctaaaagtcgtatgaggtaggcggcgttcccattcttttattttagtcctgggaaaatggagggttccaagggagggagggattagaacccagatcctgagcctccgaagtccaaactttttctactacgcaaagctacctggtgtcaagccttattcaaagtgccctgcaagtggctttaccccctcggatgtttaacctgtcgtttaagactcactctgtgtcttcagatggagctggaggaggggaaggcaggcagcggactccgccaatattatctgtccaagattgaagaactccaggtgaggacggactccagagggagctaggaagggtgatgatgggggatggaaacggacttccacaaatccatctaattcctttgggagtgcagtggaagaagctgctgcttctcctttcttgtttgtttcttagctagtagggtgtatgtatcagaagtaagcaatctcttgttctcctccagtcccatctctttgagggtcttagtgttcacagtttgttacacatcttcgagtcaaatcttaatagtaaaggtacctctagccaaaggtcaacccttttggaagaagcccgaatgaaaaggattcttataaaagggaaacataagctcaggagttgaaatttatcaccaagaggttgggtgagggtgaagtgagaatgtgaggaagggcatcattgagggatctggacaatgctaattccatagagactgaatgaaagaaattgggcaacccagagccctagcctaaagcgctaaaccatagaaaaaggaccgtttatgttgttaatcaaatgtttgtgttaccagtaaggcttccagcagtaaggtatggcttccagtagtaagccttacagacaacataaacagtagtctgttagtgttacgttatactgttacggtaggctgttagtagtttaactttggacaggtccatggattttcaatttcaccctaaccccctgcgttgttcaagtgtcaactgtaatataaattggatgggggaaagccacaaaagacaattctgaattccaagtgcatttgcaggtattatgtttagtttaccatttttgaatgctttttcatgtgtttttattcgttcaccttagtagtcttgaagcagggtagctgatgctatacccatgtgccgtttggtaacagatctagatttttaaaaatagattgtcttacctttactttgcttttgattgacagcggctgggctagaactcaggtttctcacctaacaatctttccaccaggtgttgttgccttcctgcaagaaatttggtgttacatgagccagctgtaacttttctccattagattctgttactcctggaccagtattggacaagcagccttctttgatggctgctgtaaggtccagagggactcttgaaggacagggcagggtcattaggatcatactggagaatctgaaacaacatgcaggtgccctgtgcccttccctcagctcattcagacctgtgaggtcttggccaagatcctacctcctcctgtctcctgcccttgaataatggaatttgtctcttgtctgccacagctgattgtgaatgataagagccaaaacctccggaggctgcaggcacagaggaacgaactaaatgctaaaggtgagtggagaaagatgggaagccgcatgtgggcagtttgtctgaggtctgtccttatctccctgcactgtgtcttcacagcagtgcttactgttttctccctgtcatc

SEQ ID NO: 1244033 - DNA, 4001 bp, Homo sapiens
aggcaggagaatggcgcgaaccagggaggcggagcttgcagtgagccaagatcgcaccactgcactccaagcctgggcaacagggcgagactccatctcaaaaaaaaaaaaaaaaaaaaaaaaaatgactacaatgcacttagcaactgaagtacaggcagaaaccacccaagagaaattacaagaccctctgcagttatagaaaaatatgacttagagaaggagtcaaagaaagacatttccaagggcatgagaaactagagaggactacagtgggggaaaaaggcctgaggggaactgaaggaaagggggaagggggatccactcttaacaagtgatgccatgggaaggtatctcttccccagctccccagggtgaaatcaaagaatgagacagaaatcaggagagtctctaggacaattccaggcatcaaatccaagaggttcagaataccaacagtcacacaaagaaaaactcttgggaggcaagaaagggctctctctggcttaatctaaatgggaaaaaaatgtcctagaaaatagattcagagcagataaggaaggtggtattataaggagttctaaggaaccaaatcctgggcaaagggggaggtgaaataaggaagggtctttgaaagatgatcccgtcttccaaaaaaggttgtcagattcccgaactgggatagttggccaagagtcttcaagaagtggaaatcttaagataaacagaagggaacctcataagcttcctttcagagatccttttagagattatgactatgaagcttacatgcctcaagacgaagaaactatatgaatgacctgaaggtatctgaggtctaagtgagacctcaaatccattcctgagtagaatggtagagcagtgggtcttgagatcaaggtgtggtggggagagagacttgcgaaagatgccaccttatggctggctgggaagcaacttgactgatccaacccagggttcctgaggtcaaagatgccaaacgtcgtaaatggatctgaccatttctccttggcttgggaaccggaatataagatgaaagtggggtgagtgttccagagccagtaggcagaggcctctctgaggaagatgaaaggatcttttacgggacagagggccttcccaaagggaccgtgtggaagaaagacaattctccatgtgcttggatcgtggggaagatgtgattaaggtctaaggtatgtcttccaccagacaacggacacagtcaattagaagctgggtaaaggggtctctcctgcggagcggggagcgccaagccagggacaataatggcctgaagttcattctcccggagatgggggtagaagcaggtgcaggtgccttagaggggtcaaaaataagaggaacagggttcactctaagcggtctcccagggaaggctgcgggttggagcaagggtccaagattctaagggccaggactcagctccagaagctcgatcccgccccacgcgttcctgctccggccaggggagggggctaaggaccggcgtccccagtcggcgcgccgtctcaccttgtagaaggccccgttggagccgcgcacctcgacgggcagtcccggctccacatcccccccagaggccaggccgcccatggcgccgccaccgcctccgactcccccggcggcggctgcagcagcagtctgagtgcgggccgggccaggcccccggcgtctccccggaggaggagccggagggggagccgcggggggcgggagccgggccggccccacggcggccctgccacagccaacgagcagggggccggggccgggccgctccccgtccgccgccgccgccttggtctccgccaccgtgagggaaacggccgccgccgccgctgccttcgtcacctcagcttccgcccgccgccgcccccgctgctgcctcagtcccgggacccgctgctgccgctgccgctccacagcctccacctccccctgccaccgccgcctactgcgcaggcgcaccgggcacccgcccgctgcgcgcggggccccgagggccaccgcgcaggcgtcaaggttagagccccagctagcgccagctagcgcatcggggcttccacattccctttcactctctcactccccctcctggtcgcttgctagcgcttgcgcagaacaagattagccttctttcttcaccgctccaccgcccagccaccccgtctcttcctttccccgccccacaacactgagaaccaaccaatcagggggagggaggggccgggctcgctcagtccgattgggcggcgtccgcacagtcacacagcgctcaggccacacccactccgccgccgctggccccaccgggcttggacaagttagggatgggcatgcgcctgaacgactgcttggtcactttccccacctttgtctttcttggtgcgcacgctccaaaaagaaaaaaaaaagaagaggagtcgccgcaaggaaaaaggtgcttggtgcgcacgcgctgagctttaccctcttcgcgtatgcatcgccgatattttaagaatctgtaactctctactgtagtagatttaacagtcatggctcttaccttgaagagattgtgatacaatgaaagttttggccgggcgcggtggctcacgcctgtaatcccagcgctctgggaggccgaggcaggtggatcacctgaggtcctcggatcacctgaggtcaggggttcgagaccagcgtggccaaaatggtgaaacccacccccccccccaccccgcatctaataaaatacaaaaattagccgggcgtggtgacacgcgcctgtaatcccagatactcgggaggctgaggcaggagactaccttgaacctgggaggcagaagttgcagtgagccaagatcgcaccattgcactccagcctgggcgacagagcaagactcagtctcaaaaaaaaaaaaaaaagaaagaaagaatagaaagaaagctttaagaatagtttcagacgggcgctgtggctcactcctgtaatcccagcactttaggaggctcaggcggtggatcacttgagcccaaaagtttgacaccagcctcaacagggcgaaaccctgtttctactaaaaatacaaaaattaggacgggcgcggtggctcaggcctgtaatcccagcactttgggaggccgagatcacgggcgggcggatcacgaggtcaggagatggagaccattctggccaacatggtgaaacctcgtctctactaaaatacaaaaaattagccgtggtagttccagctactcggaaggagtcccagctactcaggaggctgaggcaggagaatcgcttgaacctaggaaggtggaggttgcagtgagtggatatcatgccaccacactccagcctgggcaatgagtgaaatttcttctttaaaaataataataatggcagggcgcggtggctcatgcctataatcccaacactttgggaggccgagacgggcggatcacgaggtcaggagatcgagaccatcctggctaacacggtgaaaccccatctcaactaaaaatacaaaaaaaaaaaaaaaaaaaaaaaattagctgggcgtggtggcgggcgcctgtagtcccagctactcgggaggctgaggcaggagaatggcgtgaacccaggaggcggaggttgcagtgagcggagatcgtgccactgcactccagctggggcgacagagcgagactccatctcaacaacaacaacaacaaataataataatagtggcccggcgcggtggctcacgcctgtaatcccagcactttgggaggccaagatgggtggatcacaaggtcaggagttcaagaccagcctggccaacatggtgaaaccccatctctactaaaaatacaaaaattagctgggcatggtggtgcatgcctgtaaacccagctacttgggaggctgaggcaagagaattgcttgaacctgggaggcagaggttgcagtgagcccagattgtgccatt

SEQ ID NO: 1244034 - DNA, 4001 bp, Homo sapiens
taggggccccaccccgggcggaggaaagcgccgcgcggttccggcctgggggcgtccctcacacggtggtctcaccgtgtcggctgttggtgaggcgagtgtagaacttcctccacgagtgcagcgtcttgcccgaccagatccagaagcccgacgtgatgcccacgatgagcgtcatgaggtatttgatcatgtagaccgtgaagtcgggcgacatgcgcggcgtgtagtgcgccgggcacgggatggccaggctcttgcagtgctggctcacccacgagcgctcccagtgctcgcggaaggcctgctcgtagaagtagcaagcgatgacgatggtggcgggcactgtgtagagcacggagaagacgccgatgcgcaccatgagccgctccagcttttcggtcttggtgccgtcgtgcttcatgatggtgcggatgcggaagagcgacacgaagccggccaggaggaaggacgtgccgatgaacaggtacacgaagagcggcgctagcacgaagccccgcagcgggtccaggctgttgaggcctacgaagcacacgccgctcagcaggtcgccgtcgatctggcccatggccaggatggtgatggtcttgacggccggcacggcccaggcggccaggtggaagtactgagagttggcctcgatggcctcgtggccccacttcatgccggctgccaggaaccaggtgagcgacaggatgacccaccagatggagctggccatgctgaagaagtagagcatcatgaagaggatggtgcagccctccttcttggtgccctgcaccaccgtgcggtaaccgtcctcggagaagcgctcgttgcacaccacgcgctcctggagcacgaagcccgcgatgtaggccaccgacaccatggtgtagcagcccgacagaaaaatgataggccgctctgggtagcggaagcgctgcatgtctaccaagtacgtggtgacagtgaagaaggtggaagcgcagcacagcaccgaccaggtgaggatccagaggcgcgcgaaacgcgtctcctcctgtgagaagaacatggaaccatcgggccgcgcaggttcgcagggcgcagcacaatcacgctcgcccagaaacttgtagctgagataggatggcaccttgaggacgcgcgggcagtggaaggggtgctccagcgtggcgtagcgcgggggagcgccgccgccgcccgggccacccggggtgcccccggcacccggctgcagtcccggcggcggcgcggtggtgagtagcgcgggagctccgtcctcggagtggttctggccgacgcagatctgctcggcgccgtggcgcgggaagtgctcgcagcgcaggcgctcgggccactgaaaaccgaacttgttcatgagggcttcgcagccctggcgcgcgcgctcacagatagagcggcacggcgggatggcctgttccagcacggtgcacacgggtgcgtacatggagcacaggaagaagcgcagttcgggcgagcactgcaccttcaccagcggatagaactggtgcacctctaggcctgcgtcctcctggttcgtgtggcccagaaggttgggcatgatggtctggttgtaggcgatgtccgtgcacagcgggatggagatgggctggcagaagccgtggtccgggatggagatgcccttctccccgtggaactgggccggcccggcggcgggcagcagcagcagcggcagcagcaggcggggcagggcgctgcggggccgcatgctggccgccgccccccacccggctccttggcgccccccccgcccccgcccccaacccggagactgcgcttcttccccgccgcctcctcgctgcggctgccgcctcccgcgcctctttgcaaactttactcgcggccgcagagttggggaggccgggcgggggagggggcggtgcgcctgcccgcttgcttgccgcggtcggactgagcagccggagacaccgcgcgctgctgccctctctcctcttcctcctcctctcgcctctcagctccccctctcccctcccttctgcacccagcgacttctttgtgcctcctccagccctcacctcggcctctccgatcccaattagtcggtttcaagggggcccccgctggcggccccgccctctcctcagccccccaaaaaagggatccttgaaaccgccccgtcgagctctaagcaccaacccaaaatgtgctctcggccaatcagatttaaacccgaggaccaggcccgagggctggattggtcgaccacaacataatgagatcagaaaccagatgccaacaaaactttcccccccttttgctttttaaagagacaagctattattatattaagggctgtttgcccagcccgggatttctccggagttgccgcggcgagatcgggggacactactcgaccctggctcactcctcttcccgggccgaggtgctctgccgggtggggactctttaaacccttgcccccgcccccgatcctcgaaccccacctattcctagtccaatttttcaaatcgagtgaaaaatctcaaatttaaaaattaaaacagactttaaaaaaactaacaatttacaaagaccttttctgtccgctctttctggagcccaggcgaaagtttcacttcactttacacgtagatccctcgccctccccctccacacacccttaaaaaaccctctgaaaaatgggatcctgtctctttaagagactcttaaagggaccaggactccgaggcgtaattgccccgtagccaacacaaaggagcccattatggttctttgtgttcggtggcacctcaaagtgagaaaactcaggaactcggaggcccggagctggagggttggggcggggggcttggagggagcgagggaaaggagaatggcccggagctgcggcttctccctcccgcttcttctgcggcaaatcttaattgtgcaaagtaaagtttagttgccctaaggaggaggtcttaatcgaaagttaatggtggggggcggggggtgacgggcaattttgagtgaagggacgactctcttaggcctgacgaacgtttgagggaattttccttctgcctccccacctctacctccgccccctaaaagcttccagatcccgtctccagggcgagaggggagttttacccaaatcttaagtggttccacaccagagaggggtggcgtgtgtgacgcgggaggaaactggggggttgtggtgaattatcccctccacatctctcacctggtaaggggtggggtgtggccagcagggttcctgctacttttagaatttttcttttcccttctaggattttaaatttggaaaggggtcgaggaggaatttgcatgtaaatctcctgggcctgatactggatgatggatcaattattttctgttgtctctcccgagggacaggggaaaggggggacttaaaaagaagaaagaaaattgagtttagaaagcccctttgcttcacagtatgggccaaatcctcacagtctggtgaaatgtttcttgctccaatatagaaaagaattgttttaaacaacaacagcagaagaagaaaaataacaaaaagaggaaaggagtagggagaaggaaaaaatattctaagtagatggatacaaagggatccaggtttgacaggattcaaaaaaaaatttttttttcctgatcgaatgaatgatataaagatgttccggtttcttacaacttgaaaatgttccttattacatcctggggaatttgccttttccctacaccaggatgaaaattttccttcaaaattggggcatgagtgggtgtcgagggggatatgcctttttttgtgcatcccatttccagcccacccatctctattccaccagcaagcccattttctctcagagcagtctaaggatgggaatgttgtgctctctctgctccatttgagcctgagcttttgatcctcagatctcctgcctagtccatctcaaagcatc

SEQ ID NO: 1244035 - DNA, 4001 bp, Homo sapiens
ttgaaacagagtatctcagacaaaccacttcccctttaaaagtactagatatatctttcactgtggaaataggtgtcaaccgccagtcaggatgccttttatcccgtgatggtggaatagtgatttctcaccgaaatcagggagagccactaactctggcctctatcaacccagagagattgcatggttcttcaatggagatcagatgtttggaataacacttcatctttttattttttagaatcatgcggctgggtgtagtggctcacgcctgtaatcctagcacttagggaggccaaggcaggcagatcatgaggtcaggagttcgagaccagcctagtcaacatagtgaaaccatgtctctactaaaaatacaaaaaaaattagctgggcatggtggcgggcacctgtaatcccagctacttgggaggctgaggcaggagaatcacttgaaccggagaggcagaggttgcagtgagctgagattgcaccattgcactccagccaggcaacagtgcgagactccatctcaaacaaacaaacaaaagaaagaaagaaagaaagtggccagaatgggaatgtttacgtgatagaaattggcaaatgctaaactcagggctttcccctgctccccagagagtcagtttatcagcactggacgtaacatagttcataagagcattgccgcggaagccagcctgcctacctgggcttccatcctggctcggcatgtactaaccttgttggcctaatcatttaactcagcaccttggtctctgcatctactgtttctgtaaatagcagtaactacctcacagaaaagcacatagcacatggactggcacacactgtttaataaatgttaaccctgattattattaagctgccagagataacctatttgtagattataaaacagaaactcagataattgatatgacttgccaaggacatgtagttggtgggtggcagaacgagggctggagcccagttcccagggtgacttttcattaccccacaaaacaggctgttgaatcatctgtgtgtttccttttttcatacagcatacatcatctatcttttttttttttttgagacagggtcttactctgttgcccaggctggagtgcagtggcatgatcttgactcactgcaacctcctccgcctctcacctcagcctcctgagtagctgggactacagcaccaacacgcccagctaattttcgtaatgtttttgtagagatggagtttcgccatgttgcccaggctggtcttgaactcctgagttcacccaggagtgattcgcccacctcggcctcccaaagtgctgggattacaggtgtgagccaccatgcctggccccatacatctttctttatgttacctcttctgcttcatactaataaaactctttgctcaaagcctatataactcagacttttcacgaaattcaactgtcctaccctttaacccatatgaaataggctttcctgtattttcaactcactggtaggattttttctgtcttccccctttatgtagatgatccaaagtcagagagaggggttggaagcatgagtagcccgtggcttcctgaatagcctggggaaagcaacttctgatggacagacattgcgagagcgaatgccagcctcttttcttgctgatctcctctctatatggttcttaccacttaaagacgaggttgagccagtctccaatcacagctacccaaaggagtttaatgcccacagcttcctgaagatggaaccagatggggaagaggacgtagaaggcattcctgaggtctgcgatcacggacaccaagatgaaccagtcctgggagtcttggtaattcacctggaggtaatgtgttgactggatcccaaagtcatggagaacattcattccttcctccatcctcatttccttggcacctcaggaagatgtcagcagagcccttgcagttattccaggcttggtggtgattgctctgctatgagtctgtgccttgcccctgttttatatgccctgtatccagtattcaggtcaacccagccctgatctttggactcaaaaaccacgtttgtctaaaatgtattgatcaaaggtgcatcaccagtaggttgatgcaaacatgttcagggtgatttacgtaaaatagaaaaacaggcacacaaaaacagcctgatcggccatgtactcagcagggccaatgattaactttggcatgcttcttggcagtgcaagggtctgccctcctggtccccgaaaccaggccagagacacaggacagagtctacatccacgatgattcttgcaaagatgtcagattttctatgcctgcaactgcacttatttggggacaaagaaaaatcttggtgctctagctattcaagttttaagttcttaattttaaaattagtaaagttctggctggttgtggtggctcacacctgtaatcccagcaatttgggaggctgaggtgggaggatcccttgaagccaggagttggagaccagcctgggcaacaaagcaagaccctcgtttctacacaaaaatttaaaaaattgttttggtgtgtgtgatggtgtacccttgtagtcccagctattcaggaggctgaggcaggaggattgcttgagcccaggagttggagtctgcagtgagctattgtcccaccgctgcactacagcctgggcaatcgagcaagaccccagtctctaaaacaaaacaaaacaaaacaaaacaaaacaaaagaaaaacaacaaataaaatatagtaacttctattgtattggggactatcatcttgctggtctttccttaactgtattagagtctagggtctgcctctggtttgggagatcaacccccttcctggtattggcctcatgtctcttagggccagaaagtaatcgtttttgaatgcagtgattaattcatttaatgaccttaaagttacagcccttggtgttgttttcttttttaaattttctctctcttttttttgaaacagggtctcactctgtctcccaggctggagtgcagtggcataatcacggctcactgcagcctcaacctcctgggctaatgtgatcctcccacctcagcctcctgagtagctgggaccacaggcacacgccaccatgcctggctaatttttctatcttttgtagagatggggtttttccatgttgcccaggctggtcttgaattcctgagctcaagagatctgccagtcttggcttcccaaagctctgggattacaggtgtgaaccaccatgcctggccaagtgttttaactcatacgtttaagcaaaataatgaatgtatagtcttactgtgcaacaatatgatgaatgtatggttccaaataagaataccagcaaaatggtaactggagacttaaagagtttgaaactttcagttatttttgaaaaagggcttctatatcttgagctttcttatacatatgtgtgtagatatacaaaagaaagctcaagatacactgtgtgtgtgtatatgtgtgtgtgtgtgtgtgtgtatactatatatcagcctacaaatagtagagagaccaaaaccctaacacttgggtcacggaggactgtgaaaggaaccagggaatgaatcaggtaacgaactcatgcattttaaaaaatagggctatttaatcatgcttcatatcactattatttattatttatttatttatttttgtagaaacggggtctcactatgcggcccaggctggtctcaaattcctggcttcaagtgatcctcccgcctcaacctagcaaagcattgggattacaggcatgagccactgcctccaaattcatgcattttttgaggataagagccagggggaataaaatgtttaaaaacttgcctgaatttcccatcattaagtccatattgacatgtaaggggtagctggggacagaaaaaagaaactcagagctaatgaatctgtggcaaaagttgacagcattcca

SEQ ID NO: 1244036 - DNA, 4001 bp, Homo sapiens
gagagacaaagaggtttcagtgagccaagatcatgccattgcacgccagcctgggcaacagagcaagactccatctcaaaaagaataaaaaaaaaaaaaaaaagaatgccaggttgctcacgcctataatcccagcactttgggaggctgaagcgggcggatcacctgaggtcaggagtttgagaccagcctggccaacaaggcgaaaccccttctctactaaaaatacaaaaattagccgagtgtggtggcacacgcctgtgatcccagctacttgggaggctgaggcaggagaatggcatgaagccgggagacggagtttgcagtgagccaagattgcaccactgcactccagcctgggcaactgagcgagactccgtctcaaaaaaaaaaaaaaaaaaaaaagagaaaatgaaaatgaatagggactttgccacttgggggacattaatagtgtctgaaggagattgtgatctttgggggacaaggaatagagggggaggcttatacagactttgagagaggagagcacaaagcaaagggcaattaggcaagaaagaagtgaacagatcactgtggttccctttacataaggatgaggccctcgtggaaaagagtggaagggaggggaactctatgttgtttttcagcaagtcattccagctcattgaaatacctcctatgagcctcccttccttcccccaggctgaggatctggcaacagaggctgaggtgaagggaggtgtggctgcatgcccagccccaggggccacagggcctccacccatgtccctgggattcctggcttctaagtctcagtgtgaagagtctactggtgaatgaaagagaaagaagagaaagtgttccctggaaagcagtgctttagcccaaactttactgcatacgcacagggaatcacctgggaaccttgttaaaatgcagattttgattcagtagctctggcccggggcctgagagtctgcgtttttagccagttttcaagtgctgcctatgccgttgggcatggtccagggaccacaccttaatctgcaaggtgtctctgtccttagcagctaccgtgatgcccagcacaaagcatgcttctgaaaaattatagcaaatgaatgaatacatgaatgaaaaagtgagttgagaggtaggactctccactacttaaatcaccatatttgttaaaatatgaattcccataaaccaaaaataaaaaataaaaaataaattcccaaccccttggagtttctaaattagtaagtgtgagatgaggatgggatatttacattttagacacgccccttaggtgatttttccatcagaccagtttgaagaacactggtctaatgagtaggatggttggactctgaggtttgagtccaagctgcacaaagatgctcaaggggaaaaaaaatcagggactacagagtaggggtgggaaggcccttgagacagttgctgaaagagaccagggcttacacatgactcagggccctcgggggtggggaccaggatgccggagggcttctctgtctcaccacttgaagatgaggttgagccactcggtgatgaggctgatccagagcaccgcgatgcccacacggcgggaggcgtagtaggccgcggggaagtagaacagaaagaggatcttgggatcgcccagaaaggtgatccagagccacacgttctccagccaggctagctggttctgtagcgcctcggctatcacgatgcccgcgcccagcgtggactccatggcggcccagctgccgaccaggccccggcttgctccagggcggaaaccagagtccaggcaacgaagcagcgtcgaccctctgatctccaaagcccacccctctgagccccaggccccgccccgccagcggtcaccaccaagccccgcccccagcagtcccccgctcctgcaagaccggcctccagccggtactgtttcctcctgcgctctcctccggttttcctccctactgggcagcgcaggggacaaacctttgtaaaggcgtttcctcagggccccacgtggccactgttgcaggcacgtgggcagccggctagcggcggcaccagtgcggttccgggtcaggggactgactagccggcgggccgcgcgcgctcccagcgtccctgctccgctgatgcgaaggcggatatataatctccagggccgggattctttccccaccggacctctcttctccagcaccaatacccaccaaaaaaaaaaaaaaaaaaacaaacagcaaaaaaataaataaatctgagatcctttggagaaaaggctgcagacagcccctcctcctgggagctgaagcgggatcctaaatttgcatacacccctaatcagttcactccttcctccccagcctcaagactccccctttctaattcgcctgctattaatctggaggctgacagataagtctcttgattttgaggggtcttccctaaaaaggcgaattctcacatatagcgcaaagtcacacttccttccagttcttcccttgcttcccccacccccatcctcctgccatccaaaaccctgcttaggcagatgaaaccaagagatagtaacagtgttggtatgggaagaggattggcacacacccgcgacagagtttgaaacagtcatctgggggaactcacatagaaaatagaaatctcagctattctaggcgaggtcctgcctagaatactgttgaacagtgtctccttagtttcttcctacctcaatcaactttgttcttgaaaagttttttttttttttttttttttgccgggcgcggcgactcacacctgtaatcccagcactttgggaggccgaggcggtcggatcacaaggtcaggagttccagaccagcctggccaacatagttaaaccccatctctactaaaaatacaaaaattagctgggcgtgggggcacgcgcctgtagtctcagctactagggaggctgaagcaggagaatcgcttgaacccgggaggcggaggttgcggtgagccgagatgggaccactgcactccagcctgggcgacagggcgagactctatctcaaaaaataaaaaaaaataaaaaataaaaaaggtgctgggcacagtggctcacccctgtaatcccagcactttggaaggccagggtgggtggatcacctgaggtcaggagttggagactagtctgaccaacgtggagaaaccaaaccgtgtctctactaaaaacacaaaattagctgggtgtggtggcacatgcctgtaatcccagctactcaggaggctgagagaggtgaatcgcttgagcccaggacgtggaggctgtggtgagccaagattgtgccattgcattccagcttgggcaacaagacagaaattccgtctccaaaaaaaaaaaaaggtgtaaaggagggaagctggatataaatcttcgtttattgcctttgtagtgaacagaatttttattcctattacaatgattataccaatacctccaacaccaggaagtttttttttttttgagacggagtctcgctctgtcccccaggatggagtgcagtggcgcgatctcagctcactgcaacctctgcctcctgggttcacgccattctcctgcctcagcctcccaagtagctggcactacaggcacccaccaccacacctggctaatttttagtatttttagtagagacggggtttcaccatgttagccaggatggtcttgatctcatgacctcgtgatccgcccgcctcggtctcccaaagtgctgggattacaggcgtgagccactgtgcccggacaataccaggaagtttttaattgccgaagagaaagcctacattgtttaccgagtctttgaggtttgccctcaaccttaagcagcctactcccacactccgctttgtaatatttctgacctatacattccttgaaatcaccaagttctctcctcttaggggtcctggcccgtgcagttccctctgcctgg

SEQ ID NO: 1244037 - DNA, 4001 bp, Homo sapiens
ttttatggcaaacattctattagcctggctcctcccaggagcagccggaacccacatgcgattcaatatgcatggatttcaataggggagtccctttggtgtgtgtaatacaccatggggagggcgtggggaaggctgggagagccaccgcacctaggcaagtctgaccccagggaaaggaggaagaaggtgtcctaggagcaaggccatgggggagggatgcagagaggtcctcaaaccaaagtcagccatcagaggggtctgcgtctctgaggaacgggccttggagcagaggcaggcaaggatttcagaaagcagcccctggccagtgaagctccttggagcagaggactgtgcaaccttctctggtactgggagctggtcacataccaggaagaagtgaactcagggcccgagggagtctgacctgtcatgtcatgttacagaaggcttggctgggaacgctctgcccccggccggacgtggtgttccaccgtgggccactggtaaattagggctctctgggctggagggtgaaacattttacccacacttctgacattaaatgtgtagggtttttctcacacccatcaattctgcaactttctggacacggctgggtgtcctacaattcaattcaatcttgacactacctggagtcagcacagactccacaggttaagggctcagtcccacaacactgccttcacttcagaggccaatggcaaatcccaggttgtcacttgtactttcgatcaactagttataaattcagaggttcccaggactccctcttcagggtcacagaactcaggaaagtgcgtttcttacagttgctggtttattacaaaggataaaactcagacagccgtatggaagagatgcgtagggcctggtgtgaggtgggggcagtgatgctgtgctctctgctcgcaccaccctccagtgccttggtgtgttccacaacccggcgggaagccctctgatccctgtggtttcttacggggttccattgtgcaggcatggttgactaagccactggtgattcactcaatctccagcccctcaccccttttccatcccaacccgtcatcaggccttggtctttctggccatctgcttccatcctgaagccacctggtgtccccggtcatcagtcacctcatgagcaaaaggctctctcatcactcggtttccaagggtttcgggtgctatgtgccagcaaccagggacaaagaccagagacagtcacccctggcctggcctaagggggtctttgtgattgagacattcagatttcagagctggcccaggggccccctctcaggccacggtgctcctcaccccagggattcagacccagccatgtgcgtcctgcaggagcaggagaggtggctcgggtcccggccaggactgagcactgcgtcgatcaaaaggggaaaggaaaccctagaaacgggaagatgcagcctccagccccaagcccagcacaggagggcggctccccgttcatctctaagctgaactcagataaagaccgggaggactagaggtctggggctcaagctccgctcaggggaagaggctgggggcacggctaggcacgttcaaacccgcttctgggatgttaccgccggcagcgcggggcagacgtcaggtgtctcacccgctccgtgcctcagtttccccgtcagctgcggcacgcgcagagcctccctcgctgaacaacgggcggacgaggagaacctagaggtggccggggtccttcgcgtcaccgaggtcactgtcctacctgctgcctcatccccgacctccacccgcggccccggcgacaacctcagctttcccaactgagaggccgcgcgggcagccgaccgccccaccgacccggcccgcgctcagggaagccccgcagccccggcccggctcacctccgcgcacgcgcgccctggccgcccgcggagactccggggtcgtgcccgggggcgcgcagaggcgggtcacgtgaccggcgggagctcgtcgcggggcggggccgcggtgggtcacgtgacgcggcctcccgcgcaggcgcccgaggcaagggtgcgcgtccgcgctacgccccccagtggcggctccggcagagcgggcctgggcgcgtcctcgctctcggagggggcctggggagcgcgtctggctgcgcgtccggcgtcccgcggggagaggcccacgcgtgctgcccgctgccggttcctctggggtcagagacggggcgaggcccccgctggcgcagtcccggcccggtccccgtggggtcggagatggggcgtggcccccgctgccccggcctgggtccccgcagctcgtagggctttgtaaggggctggcccagccgcgccttgcgcccagggattcctcctgccaacgcgtcccgagggcatcatcggaaaggcggccaaaggcgctcagcgccaagttagaaacagccaacatttggaaagtccttaagtgtgctccataactcacagttattccagaaaggaataatcaaaacattgtgataacccataaaactgacaattgagaaaacattaaactgacacagggggaattttttcataaaatgagaaaatgcttacattaagaggagcacatttttacatgtgagatacaaaaaacacacagtataaccttaacttgcctaataaaatgtatgtgcagaaaaatacaaaaggagccacaccaaaacacagaggtgttgttcctgggtaggggcataggggcattaaaagccccctttccagcttgcagcgagccgagaccgcgccactgcactccagcctgggcgacagagcgagactccgtctcaaaaaaaaaaaaacaaaagcctcccttccacctctgttgtggtttctgtatttctacaatgttttaaaataagtaaggctgactcagaaaggcttactagatattcagaaaaaagattttattcttctgctgaaatgtttgaaagtgaaattattttgtagagcattttccctttaaactgcaaagaagccccaaggtcattggtacttggaagtccagggagaaagagcgctgggttaatgatggagaaaagataggtgggcagactggggcgtagtcccttggtgtggacgccccagcgtgctcttatttcagtgctcaccctgttacgtgtgtctggggccactgactttctcctgcaagctgtggatctgaatttaactcaaatggggacatgggggcaggaaaagggacctgagagttctaaggggtggggatgggaaaactggtaaagaaggtggtttgtgggttttcagatgcacctagtagagggaagtgctggggggaccagcctcccgggccaggctggctggagctgccttaactttcccacctctgctcagcccaccagcttgtggacctgtggcagcgttgtgttgtgagaggcacgtgcagatttgggagtgctgcaaaccaaagtgttacctggacgagtaagcccagtgtgggagtgtgggtgtgtgggtctgcagtcacaggctctgtctttgcgatgggatgccatgggaaacgctaggattttacctggtttattaaattgctgagtggctaaaaagattcctatgggtggggctggcttatttctcttaaacgatgcccttctgagggtacatgtggtttttaggaacacaaaagattccaagtccctcatgacaaacacaattccggatctcttcctggaggccttgcaaggcggagtccaggctgctccctaggagggccctggtgactcgagcttgttggcgatcatctggctgaccttgtgcagggcctcctggaactgggggtactcgtcccgcacgcggtccaggatggtggcgatgagagccagtcgcttgtccaggcgctggcgctccagcactagggactgcttggagcggaacaggaacacgtagcgcccctccttcacagcctgcaggtgcttaaggcgt

SEQ ID NO: 1244038 - DNA, 4001 bp, Homo sapiens
cctctttattgatgtgcctcctaccttccccccacaatttcagtcccttccaactacccccaaaaaagaaggtagtgaaaggaagggattgctggggttctgagccccttgggcagtcagaaagggaacagaaaccaaaacaatcactggatgtgacacagactgacaatcaagaagtctacagcaggatgggaaaggcgggcagagaaaggggaagaaaggagaaaggagagttacaagatgccaactccaccattacccctcctaagagaggctggagagaaagccacaaacattaagaagtgccggtcctgaataagggaggtggtgtttgagcttgaaggaggaggaggtcaagaaaggggggccacctctctctttgtagaatgagacccccctccagctcaggggcagcagcttcacagaccgtagacactttcgtcactgtaggcaatgtagagaaagaagtcttcttcatggtgttcctgggatgaaagcagaaaactgttcagcaactgggctccagtaacttaaaccaaccacgacccagacacgttcttctagaaccacaaaccattgcctgactccttcactgactccaaggcctaccacacgagcagtataatctctgcagtcctgggcaaaaaggcctcaaactgttttctgctgctttggaatggggagggggactgggaagagtcccgaacagatagtttctctagctcactgttctctttccttctctctactcctactgttctgtccaaacccccaacccacggctattatgaaactttaaggcaagccaggaagctagtccaaaactactgatgtaacaacactttcttcccctcacgctcttccaagattcctctccaaagcctccaccacttcccagtcaccatacctggtacagctgacccattgtggcactggtgggtggaatgacattgttgacaaagaaaaacaaggcatcctcagctcggagatgaattcgcttccggatcaagaagtagaactgaccaactgcaaaagatacaagatgcaagaaagtcacagaggtcaaaaatgccctcaaaagaacagctgctaggtggagcctcctcccgcagagactgcactcccacccacaggaagcaagcctgagtcttggatcaggttcccacctgtgagatcagaaggcaccaggtatttctttttgtccaggtctcctatccgagctttgggagccttttctactatcacctgataaagagatgaaaattaggagacagaaggaatgcagccccgaagctgcacctgtcaagaactcaagaaacaatattcctagcacctaaatctaccccagattcatctctttgtctttgtacacgcggtgcagcactgagtcccagagatcctgacctcactgactggagctcatttaaatatccaggatccatcccccaatagggcgtcaccataaacaactatcttaatcagacggaggtgacttgtttgggtcgactagtgattcaatctcgcaaccttagctagctggggggatgaccatttgaagctcaggctgtcaaactctctaaggcctcaaatgctaaggtttctctctcctgtccacatccctctcaaccccacatccaccactaccccactcctttcatcctgggtcccaaggacagcagtttcaggctcgctgccaaccccaccacagccagcagcctgatccctgcgctgcctgtcccgatccaaggccaggctgtggcgtcagcgtaagcgtcccgcgccctcggccctggctactgtcctcaccggcacccggtccgggtatttctttcggatcttctcgccctcagagcggcgcttctcgaacggatgctcttctttgtacacgaacttcatcctcccgggaaccgggctggacagggctgggctgagggaacccaggggggccgggacggggggcggcgacgacggcggcgacgcgcgggcggattcagcggagcgatccacgaatttgcgccacttccctattcaccaaccccgcccccgactatcggggactgccccccccgctaagatacgccactacctcagcggcgctaacgctgctagcgtagcaccaccaactgaccggccccctcacgccattagcgtaatcgctttggaatcaatttgtgggctacgcaggcgacgtagcaaagacggttggcttttgctcatcgaaaattactctaaacctattccccaaccgtcccctcaaggaagctggggctgaagaggagtaaaagatggtaatcatcatacgagacttggttctccaagttcctttcgttaacaacgtagaggaacagcagggacaattacaaggttagctattcacgaaccgtgttgctacgctgaaggcggccgttgacaccaaaacaaagtagtacccaagtggcggagatgatctccagaaataagaagtcaaaaagaaaacagatgtttggagagatctacagaacgcttaagtgccaaaatgagtagaccaatagggactggagaggaggttggaaaggtagggactacgccagcgcggaggaacactgcgggacttgagttaaatcatgtgatctcaaagagggcggagcgtcacgtggcgggtgcgcgaagtagggccggcttgggagggcgccggggaggcggggccggctgggcgacagctgggagggggaccgacgccttcccggacagcggaggtcggggcgccagccacctgggggcagcgcccgcttaacctgtccacgtcagtgccccggacgaagcccggtttctccagctctacgccctttggccgtccaggtttctcctttcgtgcttccatagccggtttctcctttcgtgcttccatagcctgcttctccgaaggtgtccttccactccccaccagcgcgcccatcctgtcactcggcccttcccgccaaagcatctggtgtcagcattattgtatcccaggcatctggtgtccgcattattctatccctatactcaacgccacctttccccctgccccttgagtccaacagcagtctcttccccctctgcctgtgggacagggtgcatgtgaacaaagtcccctctcttcacttcccaaaaccccagagaaggacctaaggccgctttggtttcaaagttataatgcatggtttaaaagagagaaaaggaaaaaagacacaaagctggttacaggtctgagggagtctaaggagagaaaaatagagggagagtaaaggggggacaaatttagggaaaatccagtggcccaaaatcccagtatcccacccacagcccagcccttggagcaggagtgaagaattagatcagttttgtacaagagttttttaaaaaaaatcaaatcacaacaaagctgacttggcttctctttgagcctcctggatcaccgtatgtctgtcactctggccagtcctgcctcttcacaaacactgattcggctctcctaggcttccgcctgtgtcccagtctggggtttccatggagtgtgaacacgaagttaagagtgaggctgcttcagagcccctggcccatgtgtccatccagactccaagtggagtgtagggctcccagggcagagaggggtgggaggggcagaccctgcccaggcagtcctcacattggacagggcatcagacggcatcccaagggctcgccctccctttcccccccaccccaactcaggtggagggggagcagctgtcaccagagccgatgttggtgaaggtttcggctcagcacggaacgaacatcagcggtgaacctggggtgacaataacttgcattggtagagtaccttatagttcataccctcacaacactcttgtaaggcagcatcactggagatgtgggacctaaattatcaccatattcatgattagataggttcaatttgcccacagcctactagctaaagtgatgagctttgaagtaagacgacctgggtccaaatg

SEQ ID NO: 1244039 - DNA, 4001 bp, Homo sapiens
gcttcaatgacactccagggagagtccctgccaccccctccataaggcatagtagaagctgggaccacctggagacctcagggaaggagggctgggtcagggctggggcctagctggtacctggacagagctgctggaggaaggtgtacgtggccacttccaaggatgctgagctggacaggccaccccccaggggcactgagctgaccaccactgcactgaagccagggaggggggcagctgcaggggaaagaacaggtgatggtaagaggggctgcctgggaggatggcacaggaagggcaggtgtcctggcgggaagggcagcaacggcctagcagctgtttctagggtgtgtgtctcaattgtcagaagccaccaacctgctgggccaagggacccactgccctccattttcccaccctctgaggttgctgggacacttctaattgtcctcctggtttagggctctggagggaaaaaaggctggggttcaaatcctggctcctccaatcaggtcacgggaaacccagggcaagttcccgaccttctgggggcatcagtttcctcatctgtacaatgggatgctccactctacaagccttccccacagtgtatcagacaaatgaatgggctctgtggctgtgaggtggcactcctagtatcagtgaggacttggctcaggcctgggccccatacctgggtagtactgaatcactcccttgacatagttggcccaccgaggagtcccaggctccagcgagcgctgggctgtgggcagtggaaactgcagccgctggggctcatcggcaccctcagaggtggtgaggagagacaccagcccatccttgcgggggctgcccaccagcaccgtcatgagctccagagcctggcaggagagacaagcagtacgtgaggcttccgccagctggagtaagcctctccaatgacactgcctccagccgaggttctgatgcctccacagtcatcaggttctgaacctccaggttcagcgtcgcagggaagatcctgagggccagctgaccttgggggcttgagccctgcccccttaggtcttcaggggcggggcggctgcagctggagcacagacctggactctgccctgagctgtggggcaagggggagagctagcccaaagggaaaacagatcactggagctccaaagcctttacattttggggtggctctggacatcctgtacctgtgcactccccaagctgcagatggggcggaaagcgccccccgctgaaagctgggagtcctcactcccaagtcgcagccccgccaagaacctgctgtgtgacctccagcagttcactgggcctctctaggcctcagtttcctcctctgtaaattgaacgggctgggccagaaggctacgttcgcccaggtctgcggttggggccccacggtggccggaggcgcggagtgtccccttctgcgtggcacacagggcctcacagtttaaggggaacatgctcccaggttgaaggcgaggagccccagcccccagagggcgggcttgagccaagaggcggccgcgcaccctctcccggccacttcctcgcttcctcccttccaacgtggggaacagcctgtcccggggactcttccgtgcaccggtgctccaggcgcagctgcccgccccacatctcccgcgggaagaactcgcccccagcgtccccgaggcccgccctcctcggcggccgggacaggcggcggcgggctaggggctccccgtgcagcccctcaccataggcagcaccaggccctggttgtagtccgtgtgttccccgatgaggttgacgcggcccggcgctgacacggccagctcgggctcggccccgaactcctcccggaaggctcgccgggcctcggccagcagctccgcgacctggggctgtctcaaagcagccatgacgcgcgcctgcagctctgcacagctgctccggcacagccccgtcggcgcgggatgctcgggcggggccccgcgcgggggtgcgcacattcccgccagccccgccccgcgcccggacgccccgcccccagacctcagccggttccgcccccacccgcaactcccgtgggaatccagctgctgggtggtgggtggcaggggctaatggtgccgggtgggatacagcgcccccgatggtgtccttccctctggacttcgggaagaaccaatgagcactcactagagtgagaatagccctgagtggcacttggcatgaccaggatttctgagctgcccttccctggcgctggtgactttctatgtgcctcaccacccaccaccacccacacagccagagcaatggagctggcacccggttgacctgggattcccaaagggatcccctaggtccccagggccagcagctgtgagaggtcatcagcctctgatcaccggtctccaagagggtgacctgacactcactgtaagtagagataaagacagacaagtttgggccgggcgcagtggctcacgcctgtaatcccagcactttgggaggccgaggtgtgcagatcacctgaggtcgggagttggagaccagcctgaccaacatggagaaaccccatctctactaaaaaatacaaaattagctgggcatggtggctcatgcctgtaatcccagctactcgggaggctgaggcaggagaatcacttgaacctgggaggcggaggtttcggtgagctgagatcacaccattgcactccagcctgggcaacaagagcaaaactctgtctcaaaaaaaaaaaagacaagtttggtggtgaccagagagtcaattttacaagctccttttctaggtaatacgcaacagctcctagcaatggagaattggactagggtggcggtggccagcagtgggcccagcccctcccttaaggacctgccacagctgtccaggtaggttgtgctgttggccccagcaggcactacttcagcccagaagcccttgtctcagaggcgtggccttgttcccagtcaggcactcttctcttgctatcctgcatcctaaacctgctggccggccccaactgctgccttgatacctgtccacagctgcccaccctacatggaaccttgaaactgaaagactgaaatgtaagcagcttgcttggggttagggtgggagtagtgtggggagttatggccagggatttagcttggggcctgctcaggggtgtgcccaaagagtggggaactgcattccaagggcaattctgaaaactcttagaagaaaacataggggtacagttttgtgacattggttaggaaatgtttatttggtttctgtttttgagacggagtttcgctctcgttgtccaagctggagtgcaatggcgtgatctcagcttactgcaacctctgcctcccgggttcaagcgattctcctgcctcagcctccggagtagctgggattacaggcacgtgccaccatgcccggctaattttttgtatttttagtggagactggggtttcaccaggttagccaggctggtctcaaactcctgacctcaggtgatccacccaccttggcctcccaaagtgctgggattacaggcgttagccaccacacctagtcatgtttttttatttttatttatttacgtatttatttattttagacagatcttgctctgttacccaggctggagtgcagtggcgcgatcttggctcactgcaacctccgcctcccaggttcaagcgattctcctgcctcagcctccccagtaactgggattacaggcaccctccaccatgcctggataatttttgtaaaagcagggtttcaccatgttggccaggctgctcttgaactcctgacctcaagtgatttgcctgcctcagcctcccaaagtgctgggatacaggtgtgagccaatgcggccaggcaatggttttttagatatgacatcaaaagcacaagtgacaacagaaaaataaactgtacttcatcaaagtgaaatat

SEQ ID NO: 1244040 - DNA, 4001 bp, Homo sapiens
cgcgggatggcacacggtcaggttggccagctgcgactggcggtagtagctcaggtagggcccggagaagagcagcgacagcccccagatgagcccgatggctgccagcgcgtttcgaggcgtgcgcagctcgcgggagtgcagcgggtagcggatggccagatacctgcggtcagaccgggaagggagacgtcggctgagcgggcacattcatgctggagggccgcgacccctgcacctcggtcccaaggctgctctcgaggaaggtccttagcgcatggttacaccgcacacagaggaggtgggggtgaggctcggcgtgagggcggaggtgggggcctcccagcgtgtcccagacactcagcggagcctggaaatggggcgggcccggcagcaggaaaggtgtgccttcaagccattctcccgctgcccccggggactgcaaccacagtctccactgagagggcaccccaaagccactgaagactaaaggttggagaaccggctatgggctccgggaggctgtgactacccactggtgacggtgccgcgggagggagggcggaggcgcctgaggctctagcagacagcctggagaagacatgttgggcaagggacagttaatttctcaggggattcctgagagaatgcgagctttgtggatcccaccagcgcgctcggaaccaacgcacttcgcgctcagtggctacaggaggtgtgggggcagtctggcctcgcctctctgtttttccagaggatggagaggggaaatacccggatttcctccccaggaaccatcccagtgtcctttcaagctccacctgagtcccgcgctctcccgaatgtgcgtctctcgctctcctctggctggggaggaagaaccccagggcacgctcctctcccggccccgacttgttttggattttattttgttttgttttgtttggaggcgagaggcagagtgggctgggactgagctagggacctttaggcacgctcgctgggactccggagtggatccttgcaaaggacccaagatccacagcctggacctgagccagctgcaccaaccaaccaaaccgtggcttggaggcgagcgcagtggaggcgcctgaagttggctgcaggagacagacggtcacttcacgcacccgatccctggctggcgactctgagcgagttacttaggaactcaactcttctgtatattgggcactttgtcctatcccaccctcacggagggcattaagctcaagcgagatgaacgcgcacaaacgcgtcgtactgggaaacgctgcgcgttgtcaggcacgggcggcgctggagagccacattctccaggcttccaggccccaggacgcatctaaccgagggacaccacggtcccccattcttattcctctttttcctcctccgcgcccgcttgtcttccactgccttcttagtgtcctgtcccactctgcgcgtcccttcttggtccccagtcccgcctcccgctccatcccccgcgtggatgcccatctcccagggaggccaaggcgctggctcacctgtccagggagacggcggccagcgtgaagctgctggcgtgcatggtgaggaagatgaggaagtgcaccgccttgcacagcagcgagccgaacacccagccgtccagggtgtagatggtggcctggaagggcacgcagcacaggatgaaacacaggtcggccacgcccaggttaaggatgaacaggttggtagtgctgaccgcctggccgccgcgcagcagcaccgccagcaccagcgtgttgcccacggtgcccacgaggaagatgagcgcgaagagcaggggcacgatgaccgcctcggggtgccagcctcccccgccgcccgcctggctcgcgttcccggcccctgggcagcccgagacgttcatggtgccgctgaccccgaggctgcccgggctcctgcagccgtctgggtctccgcgagcgggaagctcccggggctgcggccgctgcaactcctagtgcgactctgccgggctgaaggcggagggagccttgcctcatctggggcggggatgggggtgcgctggggtcaggaggaggagcaagagacaggagggcgaggttgtccccagcagcggccggcggcgctgggggaagggctgcggagtggtcccggcgcgcattccacggcgcaggcggagagtggcgcttgtacctgcttccgagctccagcccccgcagtcgggggttctgggctgaccaggcggactgacttccccggcagacgccggagcggtggaggggtcgaccccggaccctgcgtgtgcgccgcgccgcagggagcacggacctcgcactccgcgcgcctcggcgcttccctgcagcctggcaggggtgcaggatatcccgggaccgtcgaggggctggggtgccctcaaaagaggacccctgggagatcggggggaggaaacgcggggcggaggcggatgaggggccccggagtctggctctttcgcccaggctagagtgcagtggcgcgatctcggctcactgcaacctccgtctcccgggttcaaacggttctcctgcctcggccttctgaggggctgggactacaggcgtccgccacaacgtctggctagttttttgtatttgtatttgttgagacagagtctcactctgtcgcccaggctggagtgtagtggcatgatatcggctcactgcaacctccgcctcccgggttcaagcgatcctcctgcctcagcctcccgagtagctgggatgacgggcgcctgccaccacgcctggcttattttcgtatttttagtagaaatggggtttcaccatgttggccaagctggtctcaaactcctgacctcaagtgatccgcccacctcggcctcccaaagtgctgggattacaggcgtaagccaccgagcccggccacctttttcccttctcttacccattgaacgttttccctccaattcaatccaatatactgagcatctattgtgtcaggctctgtctttggctccatgcctcagtttcctcagctgtaacaaggaaatggtaacacttccttctaagagggatctgctgagaaaggaatgagatgtatgggagagttagttaaatctgaatgcatcagatccttattctttttctcctgaccttattccgtataccttgaggaaattcaaaatagagttcagggccgggcgcggtggttcacgcctgtaatcccagcactttgggaggccgaggcgggcggatcacgaggtcaggagatcgagaccatcctgaccaacatggtgaaaccccgtctccactaaaaatacaaaaattagcgggacgtggtggcaggcgcctgtaatcccagctactcgggaggctgaggcaggagaatggcttgaacccaggaggcagaggttgcagtgagccgagatcacaccattgcactccagcctgggcaacaagagcgaaactctatctaaaaaaaaaaaaaaaatccgtcatttaatcttcctaacaaccacttaaattggttatccccatttcatagatgaaggaacagatttacagggagattaagttacgtgcccaacatgtccctgccgctaatgacggagcggggattggaatcccaggtctcagactctagaaggtgcaaagcaaaaattcatattttcccatgtctcaacacttctccctctttggactgacggccccaaagtgcagtggtccacggccccaagcggtctgagaaagtcaccccgttaggacaccgtctgctgactgcgcagcgcttcctccggcttggcgttcttacggccagcctcagaggaaagggcaggcagaggcgggtcccttacggacggggtgtcccgttccggtagggaggaccccatctcttgagtccctggggatgcagacaccccgaaatccagtatctttggtctcctgctttctgctgggcaggacgtgaaccagatccccagtccagga

SEQ ID NO: 1244041 - DNA, 4001 bp, Homo sapiens
ctgtaaaatggggatgtagtctacttcgtggggttgttgtgaagattggatatgctcatagttgctaaccattcacaatgtccggcacatgcaagcattccttaaagcactagcttctattaaccttccaattctgttcctcagtgcccagccaccagccagtagcccaggcctgaccctttccccagtctcacccctgccacctttggcctggagaatggcacaacatccagtctcatcccattcctggtttcaaggccaatgagatgaaggatcctgacatgtcactccctgagccctacaagccccagcatgatggagcccctccctggcgtcatcccatctgtctcctcccatgttctctcctcatcctagccctgtgccctcaccaccagcctctccctagtcattcacacaccatgctttttctgcgcctttgcccctgtcatcccccctgcttagaattcccttcccataaacttctatttatccctcaagactcagcccagctgggtgtggtggctcacacctgcaatctcggcagtttgggaggctaaggcgggcggatcactttaggtcaggagttcgagaccagcctggccaacatggtgaaaccccatttctactaaaaatacaaaaattagccaggcgtggtggcgggcgcctgtaatcccagctactcaggagatgaggcacatataattgcttgaacccgggaggtgaaggttgcagtgagccaagatcgaaccactgtactccagcctgggtgacagatctagactcagtttcaaaaaaaaaaaaagactcaggccaaatctccttcctttatgatgcaaactttctcggccccattccacctaatcaggctgctatttcctcccctggctcccagcattacacctctaggtcaagcctttgccacagtaggctataatttatgtatctatccctctacctctctctctctctcttttttttttttttttttttttttttgagacagactctcactctgtcacccaggttggagtgcagtggcgccatctcagctcactgcaacctctgcctcctgggttcaggcaattctcctatctcagcctgccactatgcccagctaatttttgtatttttagtagagacagggttttgctatgttaggccgggctggtcttgaactcctgacctcaggtgatccaccggcctcagcctcccaaagtgttgggattacaggcatgagccaccacacccagccttctgcctctcttgctagaccatgaatttgttgggcgctgggtctctttcctctctttccttggtgcccagcaaagtgctcagcacagaagaggtgcttgatatatgcttattgaagtaatcatcaacaaacatttatcaatcatcaatatatttatttattgaggatttactatgaggtggggaaactgaggcatgaaaaaagagctggttcaaggcaaatctagaatgaggatccaggctcctgccccccagagctagcctgtgcatttgagaaaggaccaataccccccaagataagcatctggaatggggacgagggtgcagcgtggttaccttggatgcccatctcctttcgacaccactggatgaagttagagacattgtccctggcctggaaggtacctggctgggcggccccattgcaggagaccccgacccggggcatgggaatcttctgggcttgggcaggtgcctcagccaggaaggccagggcagcgtcagtgacaacgttggcgtgttggcacagcaccaggcccgtttccagcacctgcaggaagttggctgcgtcgatgtccagcccatagaggtcgcgaagccactcagccaggtcttccttcatggcctccaggtactgctcactcgacttgaaaggccggatactgcacacaggcggccctagggtcctgggcttcctcctgcctcccgcaggctgggacatggctggaccccagcagggcaggaggtgggcacctcccctctcccactgccgcctctttcctcccgctgctgctgggtctcggctgggttcttcctgattctgaggttcccgtgtactcgctgagagcccgggacctccagtgctgctacttgccactggcttcagctgccaggcctggcccagcccctgcccccccacattcctcagtccttgccagagctttccctggtggccctgcagcaaccttgctctcaggctgcccagtccacttggagttcacccctctgaggccagatggaagtgaggacactcctctctttccccagagctggagagatcaagctggctgcctcctaccctctgctggctgcggccacagagcctggggtggctgccggcctccccactctgctttcctcccctctccttggagacagcggctgctacaaacactccttgttaacccttcccagcaggcgaggactgccctgcagaaccaagggagagggaggagaggttggggctggggctggcttctctcacggggctggccaaatgggaactttgggggagtggagggaaagcaggggtaggggttgccataccccttggtgtttagtgagtacaggagaatgggaatgaaacagacatagaaatagggcccaaaactcataagtgtagccttaaatcctgtgtgaccatcatatactacctagcctctctgtgccttagtttctcaactgtaaaatgggggtaataatgtttacctttttggtgtgttgtgagggataaagaaataatgtatgtgaaagtatcagaccatcagaactcacaggcaggcacaggtctgagtgggtcccagttctcccggcagctctgttagcaccatgatccccactttctctgaagaacctgccccaccccccacactaaccatgtgattgcgctacagcaggctgtgggtcataacaccctaccacccccatggccacagcaatgcattcattcaaccaacatttcttggttggtcacggtgtaagtgctgcctgtaatcccagcactttggaaggccaaggcaggaggatggatcacttcaggccaggagttggagaccagcctgggcaacatgatgaaaccctgtctctacagaaataatacaaaaattagccaagcatggtggcacgcacctataatcccagctactcaggagatcgaggctgtactgagccatgattgcaccactacactccagcctgggcaacacaacaagaccctgtcttaaaaaagaaaaaagtcttgagcaccgactatgtgccaggcacaactgcaggcctgaggatacagcagtaaacaaaaaagaccaggtccctgaccttatgggggctacttccatgttaccgagtggtgaatgacagatagacaaataaatctaaggctgggtgtggtggctcatgcctgtagttccaacactttgggaggctgaggtgggtggatcgcttgagcccaggagttggagaccagcctggccaacatggcgaaaccccttctctactaatacaaaaattagccaggcgtggtggtgggcgcctgtaatcccagctacttgggaggctgaggcaggagaatcacttgaacctgagaggcggaggttgcagtgagccgagatcgtgccactgcacaccagcctgggcgacaaagactccatctcaaaaataaataaataaataaataaataaataaataaataaataaatagtcagatggtgatccattccagggagacaaataaaggaataaaggaggcgagggtatgtgtggaattttctataagatggttaaaggcctcagggataaggtgataattgagcaaagacctgaaagaagatcggaagcgtgctctgcagctgtctgggggatgagtgctcaggcagagggacagccagtgcaaaagctctgagacccccatctctacaaaaactttttttaaaagttagccaggtgtggttggcacacacctgtggtcccagct

SEQ ID NO: 1244042 - DNA, 4001 bp, Homo sapiens
taaccacccaataattaaggtctctctcaatcttattcttctaattagtttccttccaagttaaatccttcccttctcttccttagtcctgtggctttttcccttcaattctgtcagcactttcccgtgggaactgtactggaagcagaggtgacacaggcccgggggctggggacagaccccacctggaaggaacaagatcagaggtagcaggatttggggtgggggaaaacgaaggaagttctttctaactcagaaattctttacctaatacagggtgtctttgtgggaataataaaacgcggcctcttcctctggaagggaccatcccttggccagattgcaaggacaggcttcagtccctctccatccaccctcacctgggcctccttgttcagtaggcaacctgctcaatgatatatatggaaagagcatcctttaagaatctgaggaaggctatggatcttctgtcccctaaaatgggtgcacatacacacacacgctatttcataagtaatatcaggaggtttctacactacttcagaaccctactctagaaaggactcgagaaatatctgagcccaggtccatctgtacccatcgataatgactttttaccagtcaccaaatatctataatgcatgccagactggactgggtgctttagacaatcagctactcgtcacaacaagcctgcctcatagatggcatttatccccgctttaaaacaaggcatctgagacgcagagagtttaataacttgcccagtgtggcacggttaatggtaaaaacaaactgcttaaaaatatcagctggcgagatgcagtgactcatgcctgtaatcccagtgttttgggaggccgaggcaggaggattgcttgaggccaggagttcaagggcagcctgggcaatggagcaagaccccatctctacacaaaattaattaattaattaattaaaataatagctttgttctagagacttctatccagttaccttaaagttgggccacatctctccccagctacacctactcagctccatttcctcactgagaccacctgacaccccagctccttcccaaggaggatgacaactcaagcctgatcctcctgtctcccagtccccaagtgagcatatgatgtgcaaaaatatcaccgcccgcgtccaggccgtcacgttccctagctgtaggctgacttccttgtctctttatttaaaaaaacaacgcaacccccaaaattttccccttaatggtggctactgattcctcctttaaaaaaaaaaaaaagcaggcaagcaaagtcacccagagattacagagatcaaaaacaaatccccccacagcagtgtttttcaaagtatggtcaccgtgggccaccccagcagtcacctgggatgtgagttcaagtgcacactctggggcctgactcaatctccagagcagcctgggaggctgcatttgtcacagtgatcctgggtgagtcctgtgctctaaagccactccgttgcagcattagaggcagcaactgagaaaaaacatcacttctgaaatgaaaactgagatcatagaatttttataagcatgatttgtaaaaagacagtgttgggctgcacagtgacttattaaagaaaaagattctgttccattgccccaaacccttcaaataaactatttaacagacggtggaggttgtctctgcagcctccaggcagtacagaccctgctactccgctccctaccgctcccaccatgcttcaagctcaagttcaacccggatgccacctccacctccgggactctctccccctccggaggtttctgagaacacctgactcttaccttatcctaaagccgtgagcaaacgctactcgctggtgttaatgggtggtcgtcagacactcgctttagcagccagatcagacggttttaaggtctcccactctgcatcctctcacaccccaaacccagaagcaataggagctctaaagaaaagcatatccacagggccccacacccccactccccccacacccagatctatatataacagctctgaagttgtcagcctaacgagccactttctggcagacccgttgctatggcaatgcttgctaatgagcccagtgccgtgattggcactgcttgaaggctcctccacaaaggactctccagcaagttctctcttccccaaccacggaggcagctggacacccagaagcagccagggcatggctgggcacgcctgggaaggttgagtcccggagtagtcctggactcagcagccaggagtggccccactgccagctctgcactcctcagggagtcaaccaattactaatggggctgccagagcccaccaggaagatcaagacccagcagggctggagactggcaattcactcccacgtcatgccttcctggtggacacctgtttaggtgggcagactcctacacagagctgggaacagctacccgagaaggatactctcctccagctctgggttaagacacaaatcatgcaacagtgacatcaccagccccagagtctgtctctaagaatactgggcgcatttcctgtctcacaggtgaaagtattgcgctccccaactccagcagcctttctagccatactcagaaatttcagtgcacagaaaatagtaggggacccctggcaacgtcacaacacatcctgaggactgcagtcttcacccagtagttatgcaggagacaggctggaccccggcagagtcttcattttcttctaaaggtcagagattcagagacttggcctggaaggaggaggttgggagagctgccatatcaacaaagaaacagactataagattcgggaagacagggccatgtccctatccctcttttcacagctttaatctcagcacagtgcccagaacaatgaatgaatgaatgaatgaatgaatgaatgaatgagtgaatgaaaactgagaattatagtaggaactaggcttcagaaatatttgaggaggctattttaccaaataagcagacagggaatgggagtgggagttagagaaagtgtgtgtgccccatctgtgaacaaatcccagctcttaatggatctattgaatggactctgctatggtttgaatgtgtcccctccaaaactcaggcgttggcaacatggtaggattaagaggtgggacctttaagaggtgatcagcccatgagggcgcctccttcagtgggattgaggctcttatcaaagcagcttcacgcggtattcactagcttgtccttctgccttccaccatgtgaggacacgctattcctttatctggcagacacagcaacatggtgccatcttggaggcagacaacagtcctcaccagacaacagaacctgccgacaccttgatcttggaacttcccagtctccagaactgtgaggaagtcctgttcttgagctaggcatcgtggcttgtgcctataatcccagctactcaggaggtttgcttgaggccaggagttcaaggagagcctggacaacatagtgagaccccaccgcccctccatctctccaaaaataaaggttttttgtttgtttgttttgttttttgacggagtctcactctgtcgccaggctggagtgcagtggcacgatctcggctcactacaacctccgcctctcaggtttaaacaattctcttgcctcagcctcccaagtagctgggattacaggcatgcaccaccacacccagctaatttttgtattttgttttgttttgttctgctttttagtagagacggggtttcaccgcgttggccaggatggtctcgatctcttgacctcatgatccacccaccttggcctcctaaagtgctgggattacaggcgtgagccactgcgcccggccttaacatttcttttttttaaatttagctgtgcatggtggtacgcatctgtagctccaggtacttgagaggctgaggggggaggactgcttgggcccaggagttag

SEQ ID NO: 1244043 - DNA, 4001 bp, Homo sapiens
cccaccctgtggcctgggcaccatcactaagcgcctttaaggcaaccctccacgacataacactctgcttttcactttgcatttttgtttttcttctagaattcaaatatgtctcccactccgacctccccccctttctcctccccctcctttttatgtatttcagaagactctggagagctcctgctgtgccccagcattctggggcattttgtgacaatttgaagatggggactgtaccctctggaactctgcacctgagcctgcccacaccccctacccaccagctccatcaactccaccggtaacagggaggctgctgctaccccacagtccaagcaggctgagtcgttctgcccagcccttggagacaccgtccatcagcacagggcactccaaaggagctcatgacacaaggaacccaagccagctccagaaggggcactgtggtaaggacatagatttcaaatcctgatacttcccagctgggtgaccgtgagcaaggtgcggctctgtgcctcagtttcctcatctgtaaacagggtgatgagtgtgcacagagcacttactatatgcaggctctgttctaagtgctttccatggatggacccatttagtccctacaccatccctaaggcagagaccacccactaccccccatttccccacttgacagttattgactgagacgggaagaagtcaagaaacttgccccaggctgttgcactgtcattaatataaccgacactctggcctcagagtccacgttcatcatcgttatactatattgattccacgactgacacttcatatagctaatggacaattaaatgagccacttggatcactacatgtgcataataagtgcacacaaaagttgcagcaattgttattgttaattgtttacctacactttttctcccaaagcaggatgtgcagcctggacgaagcagggaaatgcacccactcttggttttgtctccacaggggtggtcggaatggctcagagctgtgtgagttggagcctaagagagcaataccccgttccctgctctcctgcccttgtgccaaaatagcaaacctgcgaccacacttctcaggcctgtgcccctcagggggcaatgatgtccagccccagctgccccaaacacagggctgaggagcagaggtggagtgtggggctccccttcatctctgcatgggggtgggtggggtgggctccccctcatctccacatggggttgggcatctcgaagcgccctgggaggcaggctggccactctaggcagaagctgcctgctcccctcagggactcctaggaactctattcttaggacgctttctcttgctttttactttgacatcttccagaagttaccccgcacaaaagcaaccctgccgtggctgtaatttacacgtcacatcacttgcgctgagcacagtccacccccttcaacccactcccgcacgcataccttcccctcctgccctgaaaaaacggcttctgcatcatcccagccatcctccttccacttgttcaccaggagagaagtgaaatgtgaaattgacaggagaaggggaggtgggaggggcatgtggatggggaacttgagtgaaatccgagctttggaacttccccgtttccaggttgggcatcacttctgcttggcggtccacatcgccatggcaacagcccagccaaatgccccagctcgcagcccaccctgagggcgcccctcgggagccacttactgtgatggtgttttccttgctctgctttttgcttggcgatgaggatcccaggttctggggagagaggcaagaaacatcgtcaaagctgttctccatattggacattttttccccccattcaggttccctgagggtggaggcgctggggaatcagggatgctcagtctgaatcctaagtcaccatattctgggccagggcaagcaggggtctccctgaccccacgctgttcccacgcccagctctcgggctgaaggcgaattaaggaagcctcctgcacaggctctgagagaactgctccaaaccaggtctcccctcctcttctctcagtctgtgatttggggagttaacccctccgctgccctctgctggtgaacgttccgcgtgccgcttgctgcctgaagccgcggaatccactggggagaagagagttaaggccaccacctcctggcactgaggaatcagcacacgacattttattctgaaaccccccgggtccaaaacgtcaaacctaaatacacacaatgtgcactggggcgctgctcggtcacctccctgactccccgctcccccaaccccgtgagccaggagggatttctcagccaaaccgacttccagcttccactcagtctttatattgccttttgatgtcttccaccgccagtaagaaaaccagagtcccaagtacctctgagcctggggtcctcagcagtttgccaaagtcctgggatcgttctggcagagaaaattaaggactgccagtgcaaaatgctacacgtgtcctaagagcctacgactccaaagaatgtttgattctgggtctctgttgttctattagcaattatgttgggggctcaataccagagatccccaagcaggacctgggatgtctcctatcctgagccacacagcaacctgggaagcaggcttacccctaaggcaccgcaggtggccatcacacttgtgccccaggacttgtgcatgaccttattctttttttttttttttaagatggagtgtcattctgtcacccaggttggagtgcagtggcgtgatcatggctcacagcaacctctgcctcccaggttcaagcaattctcctgcctcagcctcctgagtagctgggattacaggtgcccgccagcacgcccagctaatttttgtatttttagtagagacagggtttcaccatgttggccaggctggtctcgaacttttgacctcaggcgatccacctgtctcggcctcccaaagtgctgggattataggcatgagccactgcggccagtctggccttactcttccttggtagaatgtaaggaagtggctgtcactttatagataaaggccagaaaaaggatggaggggcttcaacaagaaggaaccaccggcttggagtggggggcaccccgcccctcaggccagcacgaccctggacacctggccaaatgaccatctgcaggtgagggcgagcctttgcctcagaaacccgtcagcaaattaggcaaaccagggagcttgactatgcccctgctaaggtcgcatacccttactcccatacagtcttacttgggttgctaattaaagtcaactcaggaaaactgatatccttaaggtgtctagcaaaaatgaaccttacagagcattaatttcacagacaagaaaatgattactagccttgagaccctggccagagaatctgacttctttgagcctcaatttctccatctgtcaaatggatggttatcactggtcctcaagctttgaggtgcatcagaatcaactgaggaaaaagtgtccaaaatagagtcccagctgcactctcagctgctgggcctgatccagcaggtcccaggtggtgccagcacctctgatttgcagaatctgtggacctcactcagagatacatggatctgatctacactgtggtttcactgaggtacctctacttatggcaactcctctagtgaccccaacgggctcctggccaacgtcaactttatggccaactacagcttccatagacatttttagtgcatcatctcatccagctggcccaccctataccttcccacttgacaaaactgcacagggagaaaggcagacggaggctacatggcaggaggtaccagtcaccaaggagaagagacagggatagaagtctctctctccataggttcattcacgtacagactctagccaagcaaatacatggcaggaaggggaaagagtagcctatgggatggattct

SEQ ID NO: 1244044 - DNA, 4001 bp, Homo sapiens
cccaaacaccaaggatcctgccttactgcacccaggattctgtgcttccacctctcaccacactgagttctgtcctgatgcgtccacctcttccctgtcactcctccgagccacgtgagtggtcttagctctatttgcctagcaactggatttctgccctggaatcctgggcttctgtctctgcatcaccctggatgcaccaaaggcgggttccagtggaatttttctgggcctgttagcagttagcacttctggctgactgctcacattacacccctaacacacagcccacttcagcttgggggcagcccaccaacagcctctgcaccccacacgccctcttcccaagagcttgacttcggctcttcccagctccttgcatgcccttcagtgttcttcttctctgctactccctccacccccatgaagcacccaaccacgatccacacacaggcctgccagaactccctgtgccctacagtcagacccaaggcagccacaccttggtcagaacttgagtgattggtctgggttcctcacagcagcaaatctccaagtgtggcccccgcacgggcagcatgaagttctctgggatctggctatcaatgcagagccccaggtcctgccccagcaccggatcttacattttaaaggttcccgggtagttcagatgcacgttaacctttgagaagcactgctgtggacggtcctaggtcaactaacccgttagagatgctcctggataacaagcaccatctcccttcccctggcactgtgggaacaggaagccatgccagaatcagagatgctgatgggcccagggaggtgggagagcatatcctggagggagaccatgtaccaaaacaggccagcctttccatgcaacctggacctctcacagctgtacagagcctcaagagagtgatcaccactctcttggaggtcctcctttgcaaagaaagaagatggatgcgtaacttctgggggtggaaagattggtgaaacaaggctgttgtactgctaagtatcagaagagcttccatcatcactgttgcagcctccaccaccaagctggaaagatgtctcagccaagcctggaagcacagtgcattactgggcaggtacttctgctagggagccatgaccccaggagctcccacttaccttcataaagttttatagtcctcaaatggcttttgccttacaatgccccagctagaactgggccgtggggtaaaagccagataggtgggtagaatccaagtttcttacttggaaaaagttacatggaggaagcaaggtttggactccattaaaatcacatcaccactctgcttctccatcacacagctccaactacgaaactgctccccaggtaactaggggagccaagacttcctttctctccaagacatccttcataaatctttctcctcctcccatccgcttttcctgatctctcacacaatgacccacgtcttttttttttttcctccctgctcatgccttggatctgtgaaaggtgccccctagcacacagggtccccagaccaccacagctcagcagttagaccccaaatctcagttttcagagctgcctctttaccatggcacagtcattttagaaacatgcagagaaaagcaaactggagcatacatctgcaggcaagaaaaatcaattcttaccatcagagaacagctaaccttctctgggggctgctacctcagaggagagtcttgggtcctgcctgaagccctcagactcagcaccaagactccgccggcttcctcttcatggcagcctctccgggaaatggggctgaggcaagtcgctagcccagggccagtgttctgggcaccccagcggaggttcctgtggctttgctcattgctgttctttcacaaagaacccactacattgcatagttccttccaaatccgctccagtgcttgctgggaaattaacaacttgttctggactttccagatgcaatgtttctggaggcctttctttttttcccactctccctctttttcccctttctcagctaaaaaacgttggctgaggtcacaacaaacaatggccaagcttgtgtcactgagcagatgcctcccacccccaggcctgtggacaagggcagctttgtccactgtgttttaggcgggacttcctgggcctgcccaagccctgctggagaatgttttggccaacttcctcccaaccctaagtcacagctctggtcctggccccggccccggccccagctgtgtgaacccaaggccagataaaaaccaacataaaaagaacggagaatgttcccccaaagaaccactgtgtggaaagctggtgcctccagaggggcgagatgaaggtctcttgccttcactctgccctcgccaccatcaaacctggacagataacgaacaaagacaggctcatgtgaggtctccactgaaaggggcctgaggatcacaaagtcattagttacaagtggagaaaggattggaccccaagagcaatactgcagccaccaactaaatgagcttgggcagggcttggatccttcatgaatatatcctatcactccgtttagaaaggtttttggagcagctgactatttagcactcaaaatgccgcatatttctgtgtttgctttcagatgcaaacctttggggttttaggaactgattctttatatagaattaaatatggttttctagagaaaccaagatcctgaggaccgagtggttccctattaagcaaatggataaacttatttatgaagaggtttcaatgccagctccttgggtcgggggaagaaaataagtacaatcgtctaaggatggagtcagaccagagctaagctgttgttttactacatactagctccaagaccctgggcaacggctccagcttcaatttctccaagtgtaaaatgcagatgatcacagtatctttctcaaaagattgctgtgagagattaaagggggtgggggtggggcatccatgtaaacatttcacctagtggacgaagtaaatgctcaatgaaagctaggatttttgttgttactatcaccagtggctgaaaggtaggcactgcagttaccccgggtccaaaaagagtccagactgaacaataaaaagcaaacagcccaatttaaaaaaatgagcaaaagatattcctccaaagaagatataaaaatgaccaataagcacatttaaagatgctcaatatcactaatcatgagggaaatgcaaatcaaaactacagtgagatattagctcacacccattaggacaggttcttaaaaaaaaaaaaccagacaaggccaggcacaatggctcatgcctgtaatcccagcactgtgggaggccaagacgggtggatcacttgaggccaggagttcaagaccaacccggccaacgtggtgataccccgtctctactaaaaatacaaaaattagccagtcgtggtggtgtatacctgtagtcccagctacttgggaggctgaggcaggagaatccaggaggcggagggtgcagtgagctaggatcacaccactctcactccagcctgggcaacggagcaaggctctgtctcaaaacaaacaaataaacaaatatcaacaaaacagaaaagaacaggtactagtaaggattgagaactgttggaacccttgtgcccttctggtgggaatgtaaaatagtacagcccctgtggaaaatagtgtgttaattcttcaaaaaaattaaacaaagaattgccatatggtccagcaattccattaataggtatataccaaaaagaactgaaagcagagtcctgaagggagggtcttgctgcctgttcatggcaacattattcacaagagccagaaggtggaaacaatgcaagtcgtagtaaaataaacacaatagaatattactcagccttaagaaggaaggaattttttttttttttttttttttgagacgaagtcttgctctgtcacccaagctg

SEQ ID NO: 1244045 - DNA, 4001 bp, Homo sapiens
tgtcccctggccctggtccatcgtccctttcccggaagaaaaagcagcactccactcttgctaactaacacctacccagcctcacccctacacaaaacacagctggctcagtccagccagggatgctcctcaccggacagacatccatcagccaaatttccacatcagaatttcctggaaaagggtgaccacccgaagaactcccaaaatacgtatctatcccagggcttcaagctagaaacaaggaggccccttgcttctcatgtaagaagcaatacgttcgctttcttttacatccgaatctcgggaaaggaactggaaaagccagggcagggcacacctgagcctctcctacaagtagggtatctccggattctccagatacagaaccaagagggttcctgcaacatactctgctgacagcccatgaaagctcattccagcagcccctaaactttgctcaaatgctactgatgcctttaggagagattttgttgttctctggacctgaaagcaatctaatgtacttttataaggccaggctcttgctgacaatgttgccacaggatacatcctcaggcggactcaccctgtaaccatttcacttctttctttcttccccccgcccccgatgaattgcactgagcattctcagtcaaaatttgctactttctctgtgaagtaggtcaagagttaaataataaataaattcagcctccatgatttcttccggcagtgttttaccagaatgtttaggaatactgacaccattgaaggtaactgttaatttagtctttacaagaatcctgggggcaggcgggcttctagtaaaggggatgtcctggaaggtcacccccccacacacaaaggactttagaaacttcgggtctcactcaggctgtgactgcgagctcagtgattagaggacagcctgtcacatagacaataaacagccagccgccttgcctcagcaggtcctgtgcagccctggggccaggccagaaccccaggaacaagccactttcgggttctgagccttagcctcggggagctggaccaggggagcaggcagtggcggggggtgctacggcaccccaggatcaagcctgctgagggggctcgggctggtggccagcaggctcggctgaccagcaagtgggtggtcccgaggcggccaggcagcctgacccaaggcagcacgaccgtccacgggtcatcaggctctagactccggggtggagacgcggggctgcgggaccgagtcggtgccactttctcgcacccctgatcctccgtgcctcttcccaagaccgccagacccttcaccggcccctgccactgccgggaacgctcccgcctgctccttaactcacacaggcaacaagttctcgcttcctcagagcagccacggtgtgctccggaggcccggcgcaaggtggaagctccccgcgagtccgcgttgcccacgccccgaggggcgcccgctgccgtcgctgccccccaggagcgtggagctacaggtagcgccggcaagggctgccccccggggcgcccctccgaccgggacgctgcggcatccccggaacgggcaacaggtacgcgagcgcaccgaggaccgcagccccggctcctacagccccggccctcgccccttacctccagcaactgcacgtagctcgccgggaaccagccacggagcccgtcctccttctcgccttcccaccagccgccgtccgggacctgcagcagcgtgatcagctcgcccgcggcgaagcgcagcccctggccgtgccgctccccggagaaggggtacagggtccggcagcgagcgccggacatggccttggcgcccgggttcacagcgcagcctgcattcccgccgagccccacgggctgggcagcggctccgcggggtcccaggcgcccggcgctccgggctcccgcgctctgggcgcgcgccgtctctggggtgcgcgggggtcctcaggcaggcgggggacgcgcgctccgcgccgggaagcagagactcgttggcttcgcagagcgagcggcgacgcccccgggccgggcagctcgcggatcctagctctgggctggggggcggggctcagggggaggagacccaggcgccgcgggctccggagacaacttcccgggaacgcggaacgcgggctgccgccgcgagggctggccggggccggggccgggaccggggccggggccgccctggcgcgcggaaatgcgcagctcccccgggaggtgggacccggagcatcccccgcggcaggactccgcggcgggcggccgtggagaggagctggcggccgggtggccgggcgggggttagctcactggcgagggggcgggccggggcggggccagggcggccacgcccgcggagggctgcgcgctccctcgcagaggggcctgtcactggggagaggggctcccactcgcgcccccaccgccggggaccgcgggaatggaaacgcccctctgttctgtgcctgctttgtaggcctggcggcccgtggcgtgcgggcggcttcttcgaggtgtctgcgagggatcgtttgtggttgtcattgtagtggttgaacctggggttgaacttgtctcaccggaaactgaacaatgggtgaaagacaggtttgaagcctggcgcctgagcccagcagcctggtggcagcgtggcacgctggagggacggaatggagagaagacggggtcggagttgatagaattggaaacagtcgatggggataaatggaggaaaggcgaacggtgagaggaacagcaccaatgcttttacttgcagagggaaggccggcccagggtaccagccctcccgaaatcgagatgggttggctaaagagtctacactcatgtagtcagtcaacaaacattaccaggaggctgccatgttccatgcgatgtgccaggtactacaaacatcatttgggccagtccctgctctccagggaccagtgaacctgagtgctgcagaatgttgaccttgaactgaccgtacagaagtaaaagaaagcttggtttctttgctagtctactccataaaaaattttaaagaaataaaataaagtacattttttagcctgtaaatagctggactcggccaggcgcggtggctcacgcctgtaatcccagcactttgggaggctgaggcgaatggctcacttgaggtcaggagttcaagaccagcctggccaacaaggtgaaaccccatctccactaaaaatacaaaaattagccgggcgtggtggcgggtgcctgtaatcccagctactcaggaggctgaggcaggagaatggcttgaacccgggaggtggaagttgcagtgggcggagatcataccactgcattccagcctgggtaacaagggtgaaactccgtctcaaaaaaaaaaaaagctggaccctttaatacgcctgtatacctctgtctactccttcccccctcccccagtcaccttctgtggctccctattgccttttaaatttggtacaaacttctctgcctgtacatttcaggccctccacaacgcctcctctagcttcacctcttactatgactgcctagatatccattacaaaaccagtcaggccgggctccaagagcctgaagatcttgcgcacctgtctatgctttgaatcagaccctggcacagagcctttcacctagttcaatggttctcaatcctggctgcacattacagtcattatgcaactttttaaaaatactcatgcccaggttttaagagtcactactgagccctagtctgcagctaagccatctcacctgagcagcctccatctgttctctggccatgggcaaagtgacacaagcagattatttgtaatagtccatcaattgcaaagtcttgaacattcgcttggccggaaatataaagaaacaaactcttgaccacagtcaccactaagagtcccttaaagcggagctgcataacttcatatcaaaaacag

SEQ ID NO: 1244046 - DNA, 4001 bp, Homo sapiens
gtggcatgcacctgtattcccagctacttgggaggccgaggtgggaggatcgcttgaaccggggaggtggaggttgcagtgagccgagattgcaccactgctctccagcctgggcgacagagtgagaccctgtctcaaaaaaacaaaaacaaaaagtgaaacttttaaatagtaataccaaaggaacatggacatccagctgtgttacagaccgcatgttatcactttggagactgcagcacattcaatgcttggccagctcacactgatttttgtgcagccctgagaggaaaggttctcctgtcatttttgcttaactgaggaatatcctgtgattataatgaagcagttaagaaaaaattaagctgtcaccattagcaattatgtatcagggtgaatcaagtttggggaaaacataatacagaactaaactggaatctcaaacaaacataaaattcaaatgctcatctattccctggactcactatttttgtatgcttttggtctcactattctgattggctttatcataagaaaatgataaaaattttctcttgtcagaatacatttgtattaataaaatactgtactgcttttaagtttttctttttttcttttctttttgtgagacagaatcttgctctgtctcccaggctggaatgcagtggctggcgtgatcctgactcgctgcagcctcgacctcttgggctcaagagatcctcccacctcagcctcctgagtagttgggactacaagtgtgcactactatgcccagctaatttttttgtttttatttttagtagagatgaggtctcactatgttgcccaggctggtctggaactcctgagctcaagcaatctgcttgcttcagcctcccaaagtgttgtgatcacaggcatgagccacggtgcctggccattaagtttttcataatcaggttttctgttaggttttctttggaagaaaagaattctgctgctgaagaaatgtttgaaaaatcagtgatctggagctgtattgtcagatgctaaccacatgtgttgttcagtgctatagccaccagccacatgtggctctttacatttaaattaattaaattaaaaaattatggtcaggtgcagtggctcacgcctgtaatcccagcactttgggaggctgagggggttggatcacttgaggtcaggagtttgtgaccagcctggccaacatggtgaaactctgtctctaccaaaaatatgaaaaattagctgggtgttgtggcaggcgcctgtaatcccggctactcgggaggctgagtcaggagaattgcttgaacctgggaggcagaggttgcatgtcactgcactccagcctgggtgacacggcgagactctatataaaaaaacaaacaacaacaacaacaaaaacttccttacactaaccccatttcaagcgcacacgtggctagtggctaccatattgaacagtgcagatgaagaccatttcctgcatcataggacgttcttttggatggcactggtctaggaaagggcttgaagtgggatccaggagctgtggattcctatcccagccttgcctaataatccctgtgactttgggcaagtcacatcttgcctctgggcctcagttttcttgtctgagagaaaggagaagaaccccagtcctcctcacctcccagggctgggaagagtgtgaagggataggctaagggcagggccccggctgcggcagaagggcaggtggaaggcaaggttgggaataccagggtaggtactggagccaagacctagttccatcctgggataaagaaagggtcccagctctggagaccccaaggggtgagccccagactctggccagtggcctggtaccttgatgggggagaggacctgtcaacccacttcctagcctctcccctctcctcctgggttttctcacctgcagagctgggaggtgtgtggtgccacggctgggcctggtgcctctcaggtctctgctctgcttgatgctccaggcctgccttataaagccctcaaggtccctcccaactgtccccccaccccgcccctaccctgccatatgagtccaggcgagaggaatggggtggggcacaggtacagcccatcaccctgccccgccctttcatttagtgtcagtcagtcatccaggatgtgggggaaggataggggagttgaccttcatggtgaggggctggagcggggtggcggcagctctccagctgtacctgaggggcaggaaccaagctccctgggtcaggagcaatgcttcccaccatatcctgggggtcagaggcctggcacttatctctcgaactacatagggacctttgtgggtggtggtaggtgagggagtgaacccgatgggcttagattcagggaaagtggatttcgccatccactgatgtttggcaagcgtgtgaatgtggggtgatgtattgattccccgtcccctccactggactctgcaaacataacgtgttaccaggagcaatgggttgtgggctgatggccctgttctctccttctagtggctcacatcctggtcacctctgaagtcctttcaccctccccctaccatggaacacccttggtgccttcttctccttaggccctctgtgctgggctgggtttggcttgtagctgccccgtgtcttctaggtcagctgcccatgcaccaccacttgcaaaccccctatgcagaaccaattcctggagggtcctgcctttgaagcctccttcattttgctttcaaggggagctagtaatctgcataacaacttttttttttttttgagacaaagtctagttctgtcaccaggctggagtgcaggagtgcagtggtgtgatctcggctcactggaacctccgcctcctgggttcaagcgattcttctgcctcaacctccctagtagctgggattacaggcgcacgcccccacgcctggctaattttttgtatttttagtagagatggggtttcatcgtgttgggcgggctggtctcgaactcctgacctcatgatcggcccagcttagtctgccaaagttctgggattacagacgtgagccaccatgcccagccaacaacttttcagtatcaaaatataccttcaaatggttagcaaacagactaaagcatttgccaaagatggaccagaaaacaaaatggtaccttgttgacttatttgataaactgctgcctccacatggtttgaccagatgtaatgagccgtaggctgttttttacttttccactgttgagagcagagattttgctcctgttcatgcgtcattgggcccccaccttttctgggagagtttgatccccttgggtattgggtaactgcagtggtacccatgcttacagccagccttgctgagaattaatgggtgatgaaggaagcaggctgtgcggtgtccatggcaactgacggctgaataaccgttgtgaataaccactctcatctagagcaggacacggtgactcagcagatggaataaatgaaaacgacaaaaagcagtgcaggcattggtgataattaattgaatcacagaatctcagagatgaaaggactttgagggggcttgggagaacaggtggggtgagtgtagctctgttcatacactaggggaatgaatgaagacattcgtgttgctatggtaacactaatgggaaatgataagttttcagtagaaccctggttgtaccagagcccaagactcagtttgtgcccatggagggggttatgcccccttgaatgttcttccccaggctggttacatgagggatgacaatttcaacaaatagaagcatgtctcctattccataggcaatggttagaatgtcactatttggccaggcttggtggctcactcctgtaatcccagcactttgggaggctgaggcaggtggatcacgaagtcaagagatcgagaccatcctggccaacatggtgaaaccttgactctactaaaaatacaa

SEQ ID NO: 1244047 - DNA, 4001 bp, Homo sapiens
ccatgagagagcctggcctggagagcagggctgaggctgctgtggtcctgggacggggacgacgatttaacttcccaagtggggaccctgccccatcactgaaggtgacaccagcctgaagggaagaagggaggctcctctgttgatctcacccagccctctcccccgagaggagacactgacacccccgggccccggtcagcccaggatcaatgtttgttgactgaaggagtggacagaaactcccagctgtggagctgccactcggggctccccggggccacagtgctccgtattacccttccggcgacacagctggtaggtgggacgacccaccagggaccccaccctccaccttcacagtccaggtgaccaagctccttctcaggccttggagtcagctgagaattaggggaggggttcccaaggtgcccaatagggggggttcccgaggtgcccaatgtgggggttcccgaggtgcccaataggggggttcccgaggtgcccaatgggagggttcccgaggtgcccaatgcgggggttcccgaggtgcccaatgtggggggttcccgaggtgcccaatgggagggttcccgaggtgcccaatgtggggggttcccgaggtgcccaatgggggggctcccgaggtgccctgcccgccttctctagacccccaccgcatgccacccccttcctccctcccacagctgcctgccgggccacaccagccaccaccagggcttagggccacctgagctccactgccccggccgctttgcagggctggcaccccgtgtcctgtcccatgtcctccctggcagaacacgtgactcttgggcgctcctggctgcgtcaggctccaccgattcccactgggggcggctgagggacccgcagacctggagctgggcccccaggatgggtggagcggccactggtccaggaaggcagcggggctcccagggcgtccgcaaggggcctctcagacgctttgaggagctccgggatgggagccgggatgtttttgtgaaaccagagaaggtagtggaaggtcagggcaccggggcgggatcaggggccacaggctgttgacaaagccctatccctgcgccctcaccccgtgggggcggggcaggcgtgggtgcacccagaccccccaaccctgatgtccccaataccaagggcagagagcagccctggccggtccttggaggatgcgggcgccgagggggccggggtcagtcggttcagagtcggagcataagcccggtggccgagtcggccgggtggtggggcgccgggggggccggagccgggcagggcagtgacccgcttgccggggtcaaagtcgccagtgtgggccgcggaagaggagcggccaggcggggcgcagacacccctcaccccatcctgggccgcgccggtgccaccgggcagtcctcggggcaggagcccaccgaggggagacagcgctggtgagaccccgcgcctcggggacgcgtccgcggcgctttgtgcgctccccagggcggcggggcccggggccctgagtggggagtgtggccgctgcagtgtggccgccgcagggcgccaggcggccagcgacacccccgcccccagccgcgccccccaggaccagagaacgggggaggggctgagacccctggacctgcccgacggtgcaggaccgggtggtgtccgagccggggttgggaacgggggtgtctgacgggactgaggagcgcaccagcccggaccccggagaccgcccggccggctccccgctccccgcgcccccggccccgccgcgcccgccccgcggtctctgtccccaccgggtcgactccccaacgtcccctcggggccgcggcccaggtgctcaccgcgcggcgctgctcgggggtcggcttggctccccgccgtcctctgggcgcgctcgggtcgggcgccggtgaccgctcgtcttcgcggcgctgccagatcggggtcggtgcaaactttccggcggcgacgcagggcgagggcggcggcggagggcgggctcgggggcggccccgcgggggtgggagcggcagccgagggtccccgcccgccctccgcgcagcctcccggcgagcttcggtcctgcccaccctgcgcagggagcgcctcgtaccccggccatacgcagactcggcgcgctgaattccaccccgcggacccgcgccccacagacctttgtcccacgggtcctggttccgcagaccctaatcctgcagacccctgagcccgcggaccctggcccagcaggtggtggtcgcggtgggtcccagctccgggaggggacgccctgggacgcggaggggcgcgcgggcgtgggggccgtggctcagccccccttcctctcgctccctccgcctccctgggcgccccctcgcccccttcctctcgcgtccccgggttctcgccccttctttcctgatgcctgcctgattttctggaaagaccgacacccccagtcgcccccaccgcggctcccggttccttcccctgcagagcagacgggggctggagtaggggccaacatgggtgacatgggtggaccggcagggcggtccctggggtgccctttaactctttctgtgccacatccccggtctctggccagtcctgtcgcgctaaggcccctccagcagcgctgaccctggtcccccacctgctggtcctgcggccgcggggcgctctctcctccgtcccacccgctccttccacaccacctcctttcctgggagtggagaagccccagccagaacccctgccttccccaagaggcacgctcagagggacattctccccttcctcactccccctagagccacatcacacctggctttggggccctagaacctcagcccgcgcccctccccttccacccccagccatccctgctctgtgcccagtgatcttggggtcaccacaaccccatggcgccttgaggcctcacctttcctggcctctcagcatcctgggacactgatggtcatgccttccttctagaaagttctctccgaggctgtggcttccaggatgagcactctcctcctcccacttcctccccttctccttccccctcctcccttctccctggagaggtcttcctccaagtcccagtcttcttccccacccagagcccctcccgctgacacttgtctgcagtgcctgtctccgctcccgctaggaagcctcccctccggcatctccaatccatctctgggtcctgctccacctgcatttccctagacctgtcctggccaccctcaccctgggacacctcctgcccgtggagagctcctctgataggtgccgtccttggtcttgggggtcctttctccctaattctacttctgttttgggggcgtgggaacccagggtcttaaccccagccattccccctcccaggggccacttccctctgaagcttagcccagctctgtgacccccacaggcctgcccccacctggtcctcactcccctgcatagccacactgtgggggctccatgcttcccagcccataggaagccctgttcccagagggggccattctgttttagttggagcagtggccagaggcaaaggtcagaaggcaaaggtcataaaagtttgtctctacctgccagcatctgctcctgctactgcatcttctcccctctccacccaaaccctccctcagctcctgcccccacctctccagaggcacagacaacagggttctgatcttgggtcatggtgctccccctgccagcctcagtccgagacctctgtgaatggcggtgatggctaatgggatgagggggaccacctcctggtggctgcagggactggggtgagggtgctgtaggctctgcctaagtcaagtgccatggggctgaagagacggcgcaccggccctggagaagagtcctccctgccctcctgtgtctggccttgtttcctggaggacaggtccccacggggcagaggc

SEQ ID NO: 1244048 - DNA, 4001 bp, Homo sapiens
ttgggaggccgagatgggcggatcacgaggtcaggaaatcgagaccatcctggctcagacagtgaaaccccgtctctactaaaaataaaaaaaattaactgggtgtggtggcgggcgcctgtagtcccagctactcgggaggctgaggcaggagaatggcgtgaacccgggaggaggagcttgcagtgagccgagatcgcgccactgcacttcagcctgggtgacagaccgagactccatctcaaaacaaacaaacaaaaaaacaaacaaacaaaaacacaaaaagaaaaaagaaaattgcttctgtgacagcaacttgaatactaaaagtcggtccctggttccaatggttgaaggcaccttagtagttaaatgtcatcctacagtttaaccaggtagctattaaaacagataacccaaataaacaataacaaggcatttggctgaccaccctttaaaacctctgaggcttttcatgagtgggaaggctagaatactattgaagtcactcattagaactatgcttaactaataaaattatatagaagaatgataatgtacttccgtatttatatttcaaaacctttttccttggccaatacttgttagtaaagtgattatggtactacaccaagttttagactgtaaactcctagaaattatcatttcaagtgtgtattaaatttcaagcaaattttaaaccggtttaagattcagccttaaagaacagttaaaattgattgaaaataatccaatttcaccgcactttatacatcatagttgaaatgcaatgaagacacattattacacaataatgaagaagcaaagatttggcctgttatctgggaaattagagggtggactacctgggctccttttagcaaaacacttttccaaaagaaacttatttttgttttctttaaacaatactgtcctgtcctaaacgaaatcatttttagtctgttgaaaatccacgtgtctttgcgtgtttatttatttatttatttatttatttatttattgcagtgttcaaaaaaaaaaaaaaaaagatgcaaggtttccagccctgaggaccaggacgctgtagctcctgtctcagttcagccctagctctaattgtgaccttgggaaatgtccctggctcgggggactcggtttccctctcttctcaattatgagtgctcggaacgtgggggtgggacgggcccccagcaccgcagacaaggggttacagctcgtccagcttcatgcaaatccccagccctcctcgtcgcctcggctcttcccatccactcagccactagctcgctcggagcagtgtgctcccggtgccccccgcggggtaccctcggttctgcacggcgctccccctttgtgtcttgctgctaggaagggaccttgcgatcatccttccatccgccgagaaacgctccacctacccttcattctcgaccgtgtctttcccgtttcagagaacccctcacactgctgccctcgagagacccccgccgtggctctgaccgggaatccctctccttccctcccctcaggagaccttcccttcacacagccttcacctccggaagagccctcaattcacacaaccccattcttcctcaaactctcagggattggcacccggctgccttttgcggagccgcaaaggaccctcagcctcccccacctccgtcatcgggttctggggacccctctcacctccgcggtgagagatgtgtttactgaggaatcgctgcttctttctctggtgcagcaaggtcgggtatttaagcaacaagaatgaggtcaccaagtatcctcctagcgtagagagaaggtaaaaagccgcagtggacgacatctcagtcaccgtgtgggaagtctcccacctccgggccctctgaactccgctgcggcagtagcaacgacggcggcggcggcggctgctcgaggtcggctcgcccccagccggtgccactggtgcagcgcacttgtcggtgccggcctactgcgcacgcgcagctggaccccagcgccccagcaacaaagaggctccgacgcgcaggcgctctccggctcccgtgtaggaacctgcagagatcctggactgagcgtttgtcacctagctctgtggacggaccctcatgaagagaaagcttgcaaacctgccagtgtgttggccatcactcaagcagaaaagactattcacgggcagcctttcctaattggaaaatccacatcaaaaaggaaagattccagggcgcgtcttatcccttgctctagaaaatgcaaataatttgtacctatggaggcgataaagcttgctaaaacactaaataaactcctccgtttatctagcctagagagaatttcccctatggtcgcatatactagaaaaggtactggtttatcagtcaaatatctgagagatcggcccctgtcctccctcatttcattgtgaaagtgcaatcctcattctttgtacacaataggcactgtagaagtatttgttgacttacaagtccgtataaaataaggaaactttgttaaggttataaggtattacctaaaagtcctagaaagacagataactaagttccagaaggccctactagttttccttttacccgacaaattacaaactgctaacacacgaaaagccacacacttcaatgcaaaagaaataaatcacccaggactgagggagaaattttacggagaagaccatatctcccacaggactagaaaagcagagtgaatatttaaaatcctgattcagccgggcgcggtggcccacgcctgtaatcccagcacttagggaggccgggaaggaagggtggatcgcttgagcccgggagttcgagaccagcctgggcaacatggcgaaaccccatctctacaaaaaataaaacaaaataagcccggcgtggtggcgtgcacctgtagtcacgctacttgggaggctgaagtgggagtattgcttgagcctggaaaatcgaggctgcagtgagctatgactgcaccactgcaccccagcctgggcgacagagcaagaccctatctcaactataaaaagaaaattagaagaaaatagggggtggctgggcacggtggctcaagcctgtaatcccagcactttgggaggctgaggcgggcagatcatttgaagtcaggagcctggccaacatggcgaaattccatctctactaaaaatacaaaaatttgccaggggtggtggcgtgtgcctgtgatcccagctactcaggaggccgaggcaggagaatctcttggacccgggaggcagaggttgcaatgagccgagaaggcgccactgcactccagcctgggtgacagagcgagactccgtctcaaaaaaaaaaaaaaaaaaaaaaaaaaaaaaaaaaaaaaaaattcctttagtcgaggttgaagtgagccttgatggtgccactgcactccagcctgggcaacagagcaacattctgaggaaacttacaggttaaaaaatcatgtgttctgtttagggctgttaaactatttcctgtagatcaactgacgcacatagttctatttttcaaaatatcacctgatgactatggaagcgtctagaataaaccactgtggcataaaaattattttgaggctgggcatggtggctcacgcctgtaatcccagcactttgggaggctgagacaggcagatcacctgaggtcgggagttcgagactagcctggccatcatggtgaaaccccgtatctactaaaaatacaaaaataagccaggcatagtggtgcatgcctgtagtcccagctactagggaggctgaggcaggagaatggcttgaacctgggaggcggagcttgcagtgagccaagatcatgccacggcaccccagcctgggcgacagagcaagactctgtctcttaaaaaatatatatatattgagctgaaggcatttaagttcctggaatcccttatcaacctaaaatcaaaggctcccagaa

SEQ ID NO: 1244049 - DNA, 4001 bp, Homo sapiens
gataatacagacttcatgttatgcctttggggatcatgtgatatataccagtcaagcccttgctagtgggttggcactgctatctcctgaccccatctccccgggacgctatgatggataaatgagatagagctacagtaagaatccagttacagagtctaattaggtgctcagtaaatgttggtttccccaaaccttttcatggttggcaagaccagaatcttgtcactattctttgcctcccccagctcagaaacatcaaaggatgtaggtctttatcaggtatgtttcctttggcccagaaactaaaacgagggtgcaaacactgctccctattcctcattcctgagtcatctcccctttcccaggagtgagagatgctactccttcctcagtctgtcatgcccccaagagctcatattccccattttcacaggccagacaccagcagagaaaacactgactccaggagactaaggaccatcttacccctcccaccatttatgggagcggcagcaggccaagggctcagcactatgtaacccacttgtggaggcaatccatctcatctcacagtggctgagaccgactcccagggagggttacgctgcgaaggggacctccctgggggttaccgcccttctttctggctcaggaggctctcccagggtcccaaaatatagtccctcctgacgctgtaaatttaattttattgcattattggcttagttgagcagatgtttggccctaaacacctgccttccaggcgcattaagtacgcacagtttgaagtagtaagtcccagggcggttactagctggaaaatactccggtactctatcatggatggttaactagtgcttgccacagcccgcttcttaggtttattaagcacctactccatgccagacactgtgctaggtggtacacaggtaagatctcttctattcacaatcaccttttgaggactagtattcctgctctagagataaggacactgaggcgcagaaacgatttgctgagggtgtcccagcctgaatgtggtggggctgggaagcaattacggctgaggggctccaagcccttagagctctgccattccgctcctgaaaagctgtctgggggcggggaccagaccatttccccccagcctactactgctgacacatctcggggtgcctcacccccagctctcccagaacagcctcctggtcttagcagcgtgtgccaagatttagcagggagcatctagttcctatgggctccctcccagaccttgcctgtaagattctgaatccggacgcacgcaggttcacaaagtgatacctcaggagcgcagccgcccccaccgcgggtgtgacccgcgcaaccccacaagggacactgtacctcggcgatctcaatgcaaagtcgcccaaaactcagtggggagacacacttccattctccccgctctgtcgatgaggaaacgtcatgagcgtaagacacttggagcgttaagacacttgctcaagaacgcagctgccgttcaggaaatgaggccgtcggggcgcccaggggtgctcggagggagcccgtttcccaaagcacgtgcgcgagccccgggcgcttccaagggctctaacttcacgtctgctccgtgttttcaagcgcagggggccggaggcggcaagacgcggcccaacgcgcggcgggacccggaccaccccccgccaaggccaccccgggacccctagacccgccccgacgcgggggacgtttcggtccgggcccgcgcgagcgtgcgcgacaggaggagacgcgacggggcagcaccgctctggtggcgcattgctggacgcagcccggggccggggagccgcggcacccacctaggtccatggcggcgacgccggcggctgcgcggggctaacgccccctcccctccgagaactcgaacgcggcgcgggacgcacggcacgatgggagacgcaggagccacggcggccgcgcttaggcctgctcacaacctccgcccggccccgcccacagcctccgccgcgcacgcgcagtcctcacgaacgagcgcgccaagcgcacagcgccgccttccggcagagccctcccaccagccctcaggtacccggacgtcgctcactagacccctccgcaccgtcccctgcccggcccctcttccggggtcccagcgggtcgggctcatgattccccggccccgcattcaccctcacccggtaaccccgggcgtgccccgcacacagttcacccccaccgagcgcctcccccgggacgcccaccacccagcgcggccgcaccacgcgaggcttccactcccacccgcccagctcgcgccacatacagtccctcaacgcgctcctgccgcgccgccccctccagacagcagcgttccggatcctagacgctttttgacggctggtcctccccagaaaatgcgccgtgtgagcccaaacatggtggggtttacgctggaccccgagcttgcaatctgtgcttgacaaaacacaaacatcgcgtgcctgtctcctccccctgagatcgagtagtaacagccactccaactctccacctccagcttctagcaccagggaccgcctccaccaccccatgtgccaagtggagttcgagctgcgcggccctcaagcagctgaagggtcccgtgagcgatcaggagaagctgctggtctacggcttgtacaaacaggccacccagggcgactgcgacatccccggccctccggcctcagacgtgagagccagggccaagtgggaggcttggagcgcgaaaaaaggggcgtccaagatggacgccatgaggggctacgcggccaaagtggaggagctgacgaagaaggaagtggggggcgtggagcgcgaacaaaggggcgtgcaagatggacgccatgaggggctacgcggccaaagtggaggagctgacgaagaaggaagtggggggcgtggagcgcgaacaaaggggcgtccaagatggacgccatgaggggctacgcggccaaagtggaggagctgacgaagaaggaagtggggggcgtggagcgcgaacaaaggggcgtccaagatggacgccatgaggggctacgcggccaaagtggaggagctgacgaagaaggaagtggggggcgtggagcgcgaacaaaggggcgtccaagatggacgccatgaggggctacgcggccagagtgaggagatgaggaagaaggaggctggctgagggctcctcgggaatggaaagggcttcttagaccttgatggctgaaatgtcctgaaactgtcgcaagcttagccgagacatcaataaatcacttaaactgcatgagagtgactgctgttggaaaggagaaactcggtgactgagtgctggggaggcgtccaaatacacagactaactttttgtatggttttgggtggagttcccagctctcctattacaagagcgtatgtaggtatttggaaggacgagggggacagtgtgctgtggaaatgcccaagatctgagggcaggagaccattctccagtgacagcctcttgggaggttgaggccccagccccttatctcttcaaggctgatttactaataccccagcaccacagaggggagagggactctgtcctcctaaacactaaagtcaagtccaaaagcccccactggaacacagggcctacccggttcatgttttgagggagaccaagctttccgtgatgataatgtgatgaaacaattgatgcgccagaacacagcagtttagaaacaatggagcagatggtgtcaaaatcccagccccagaaaggctcacctaaggccgggcaaccaaaatgttcccgggactattctgtacttaaccctggtttctgcttaggggacggtgggacaatatgcatatggatgtctatgtgggatttgttgcaagagcacaacacaccccttgacctatgcaagtgccagagtgtctgagcccagcttctactc

SEQ ID NO: 1244050 - DNA, 4001 bp, Homo sapiens
ttccgtctcccttagtgtctttctgtttgtctttcatttcctgtctctacctgccaatctctgtttctctcctctctctgagtgtctctctcagtctcagcttctctgtctctgtctctccctctctcagttgcaatctctgtgttgagctttcctccctctgccctggcctcacctcctcgtggatcttcctcaagaaccggatctcctcctccagcgactcaatcttcctctccagatccagacgggccagggtggcttcatctgcttcctggagtggcaggaggggtgaggagtagagggccactggggccccaggctccttctccccattcctcagccttgccttacccctccttctggggcagtggggagcagcacattgctctggcgggctgagcttgggggctgtgtttgggtgggtggccatcaatcctttcctccctcccctgcccctcccctccacctccctgacctgtctataggcagccaggttgttctcggcttccagcctcaggttggtttcatcctggagcctggagtggggggacacattcctgggtccaggctcttctgaggacacttgaatacctgcctcagtctcccttgaggcagctgtcacagagaccacccccacccaggaccagtagagcagcaggaggattaagggttggggggccttagacagaggacttgtctggaggatgagcagatgtgggcttttgccttaactcattactaaggtgccttatcagggttggtgcacctgcttctgctcacacaggcgcatccacaagcatacactcactgttgcacacacacacacacacacgcacatgtcctcctgcacttgaaggcacacatgcatgtcctgtcagctcagtgaagcgccatgcccctggggattcctctgatcccaggtaaccaccttttgaaatgaattttattatgaccaccgcttcacagctgtgcaagtcaaagtaacttgatgggggtcacaagctggtggcaggcagtcacctgtgctttgcgcccagacctgcctgctctttccctcactttcttcaccccagaatccaatctccctcatggacatcaaccttctccgcttccaactcctcctttatatggacacaggctcagaataggtgagctcgctgcccacagtcacaaagcccagccatgaatgaaacacaggggccccgctgctcctgcactgctttccccagtagggaggtgctgaggggaccctggactcctggcagaaggcatgcgggcatcagatccccggggccctgggcctgtttctggtccctcccatcatgttggggggcaaggatagtgccccatcaagaggtagggaggcccagggagcagggaggttcggcccctccctgagacttctcgggcactccttcttggggattcagccccttctgctcacaaggccccccttccccatcccctcctcacttctgcctcacagtggccaggtcctgtgccagattgtccctctcaacctccagccgggcgctgttggcggtgagttgatcgagccgcagccgcagctctcgcagctcagcctggtagacgtctgccagcttggtgggctccttggcccgcagctggttcagctcagcagccagcgccttgttttgctgttccaggaagcgaaccttctcgatgtagctggcaaagcggtcattgagctccatcatctctgcccgctcactggcccgggtctccttgaagccagcattgagtgccccagccagggagaaatccacccgggtcgggagtggagggggcattcgagccagggagaggcgggtgccaggacccagacggcggccaggagccaggccccccaccatcatctcccctgaggagacgtaggagcggcgagcagcggaggtgatgcgtctcctctccatcctgctctggctctgctcgctcctgggatgcgagggctttatgaaggagtgggctagactggcgatgcccgggtgcccctggcaacaccccctggcatagcctgagggggtggggttgggccgcagcccagctatggggagagctcccctcaccccactgaggtcactgtgcccagaggcagagcttcctgggcacgccaactcctgcatgaggcaggtggtacctggagccagaccatgggtctggggccctgaccgctgaagcaagaggaccctctctctaggaaggtgggtcaagaaagggttggttggaccatgatgaatacttacaattattatgcatcaattaaaaaggaaggaaagggctgagtggggtggctcatgcttgtaatcccagcactttgggaggctgaggctggaggattgcttgagcccagtaggttgaggctgcagtgagctgtgtttgcgccactccagcctgggcaacagagagagaccttgtctcacaaaaaaaaaaaaaaaaaagggaaggaagggctgtaccagatgacctctgacctgctttccaactttttgatttcataacccaggcattatctcactcagctgtaagtgcctgcaaggtgctgggaatttggcgaagaatgaacctgttctgtaccctcaagggccacctcatttcctactaggcctcattcccagcagactcctggagtccttcccttgaacacagatgtcccacattcctgctctctgcccattcattccctggagttctggggctgggggctgggattggacaccagccctttgtctaagggtcaatcatggcctctatgtggcagtggaggtcctgatagggcaagagggggccggcactctcttgccttatcaggactttagcccctggatctgtccctccaggtcaccccttccttgtctggcctccctgtgcctctctcccagagaccaggccttgacagctccacaaagccgttacacatgagctggctgtgctggctcgtctttattcctgcagcgccccgtttccctggccacccctccgtctcccactggagatttatttcctcgagttcccacacatcagcctggagagatgggaagaacctctggggatggatgggtttggaaacgctggagccactgggcccaactaggagcctgagacctgggccctgttgtccctggagacttcaggtccatctacgccctccactctggtcccacagggtcagaaccctgcccagtcccctcacccatttgtgtccttggacttctgggaagcagacagccctcctctccccccctgccacccactgtccatgcctgggcatcccctgatcccctttcctgggcacaggctgaatagagccttgttctccaccgccggtggcgccacacagcaagggcagcccctagggggctgtgctgcttttatcccaagatgccaggctgtcaggctggggtgcaatgcaagccccctgctcaatgggcttctcggaaggcatttgaggggggctggggtgcggcgggaagcaggcactgtgcccaccccgaacattgtgtctgtgccaaggtgagtcattcactgggcatgaagaggaggccctggggggcggccagcccaatgctgccaggtctgcttgcagacaaggcctggctgtctgcctcctccccagctcacagagccagctcaggcccccgagcctctgtcagagcagcgtcccctactccacaccaggatatgttctttttttttttttttttttttttgtcttttgagacagggtctcactgttgcccaggctggagtgcagtggcgcaaccacgactcactgcagcctcaacctcccagccttaagtgatcccctcacctcagcctcctgaatagctgggactacaggtgtgtgtcaccacacgtggctgattttttaactttttttgtagagatagggtcttgccatgttgcccaggctggtctagaacttctgggctcaagtgatccttccacatcagcctcccaaagtgctggaattacagttgtgc

SEQ ID NO: 1244051 - DNA, 4001 bp, Homo sapiens
tgtaaagtactttgagctccttggagaacacttccatatataaagaagccttatgacctgcctgcaactgcagattttgcaaacgtgatcttactttttctctcttttgggatatgctcccctttaaactgaagctcaacctcctgaagggggtttcttactaggaaaaatcagacaatttgaggaaatagctatcacctccaagatcccggaagcagtactaaataagagacctcagaacaaggcaatactaggtatctcacctatcccattaccagtccaatttctctctccacttaaaggaggcttccaggtctagcctacaggaaagttcacttattaaccctcaggcagagtactacctgctaaccaggttaacacacatttccttcgtagcactgtaattcacagtgcaatgacagcaatacgcttctataactacagcttcagactgtgctcctcagccttactcagaataggctatcaacactgactcgttaggatattcaagggggtatatgtatgtgtgtggggggggaattcccgacaccgatttcaccatgcttctgtggtcactgcaggaaaaaggtagagctctctgttctctatcatcgctctctttggaatattattctcacttcaagcattctgcctgagcgaagccgtcacttctccaacacatggtcacaattctgaagctgccaggcgactgaacgcagtcggcagcacccaccactaccggagactcagccccaatccgaagcttctcccttagtcagggattggggcgctgggttcctggtgtcaccgccgggcggcgaccccaccacaatctccccaaagcgccgaagcatgtcagcccgaagatcttggctgtcgcctttccccgagcctgcggtgcccgacaggagcccgagttcacgccgccgcgcgccagagcaagaggacgcgccgcagcgagggaagcgggggccggactggggcccggcgccctgatagggaaggggcgtgatcgcaggctgctcgcggcgagggcgagaccgggcgtgggctgccaagaggcgacgccgtggagcccggggaggggacgtgggggtgaagacaggggcagcccagcggctcgagggcaggcagaaacggccgcggctactcactgagccaggactccaggctttccccttccgcctccgccatattgcagccgcccggccccgcggcttcaaaactcgcgagagtctgcacgagctgagacggggcggggcctgcatggggtcctgagaggagtgagtgccgtcaccgagggccgcgccagactgcgacggatacagggagggcaagggtttccttttggcgctcccctttggaccccggagtgaaaaactctaacgtccagatcagtggagagaaacgcagatttaggaccctgaggagtctttttcacccgtttcccgtcactcgctcaggcgcgccgagggcagtccttgtggggtcctcgtggccagccaagatggctgcccccgcagtgaaggttgcccgaggatggtcgggcctggcgttgggcgtgcggcgggctgtcttgcagcttccagggtgagagggtggcgagcagcggcgggggggcgctgcgaggaaggaagggggccacaggcaggccgcgtgggcccctagagagagcattgccctgggggccggagtatctggattcaagcttctaagttagctgcgtgaccctgcgccaatccgaaggtttagtgactacctctcgcctaaggagtctggctgatctagggttctaacgcggagctgaaagtgcggttcagctaaagagctcagatctgggatcgcctgtgaattgggatgggtgtgtaggcgccaagcccatccttaccgttagcacttgaccaggaggagactttacccgcctgcttggggaatgtcctcctacttgggacaagggcctgaattgttgtggctcaggtttagctcgcggtctccgcgccgctccccctcgtcggcgcgttggcagtcatgcctattgttaagtcaaacctactcgcttgtggagtcagcttttgcctgcctcctcctttccccccctcccaggctaactcaggtgagatggagccgctatagtcctgaattcaaggatcccttgattgacaaggaatattatcgcaagccagtggaggagctaactgaggaggagaaatatgttcgggagctcaagaagactcagctcatcaaagctgctccagcagggaaaacaagttctgtgtttgaagacccagtcatcaggttagatggaaacaaacacttgttacatggactgggactatcccagggagggtttctggtgaggattctgtgatacagccttggagagctaaacgtgttgcttttctctttgaagtaaattcaccaacatgatgatgataggaggaaacaaagtactggccagatccctcatgattcaggtaaacagcacttccctcctcagtcatctttcttgcccccctaccccgtagccttgtacttggtactttcagtgtagcttaagagcaaatggattcatgtatctattattcagattaacttccctgcatgtgtacgggctttaatgaagccctgtaagagtcagcaactgccattccttggtgtttcggaagtaaacacacaattaaaaaaaaaggaacaaataaaaaataaaacaactgccattccccacctcaccccccaccccctccatgccacaaatctcaatccactctttctgtcctagtctagcaaagggggaggcacttaaaaactttgttttggatgtgctgtgagaggagctgcattgccagcgcagaaccagaggatgggagtaaagggcaaggtactagcttggctgggtaaaccctttagggagcctggggcagcctcttccaccatattcttttgcagactctggaagctgtgaaaaggaagcagtttgagaagtaccatgccgcttctgcagaggaacaggcaaccatcgaacgcaacccctacaccatcttccatcaagcactgaaaaactgtgagcctatgattgggctggtacccatcctcaagggaggccgtttctaccaggtgaatgaatggccagggcaagaaagcagggccctccacatgtgaaacaagataggtggtgcttgggagttgggtcaagattgatagctttctagctggtgcagtgggattgcacctgtaatctcagcactttgggagcctaatgcaggatagcttgagctcaggagttaagagacagcagggcaacatagggagatcccgtctctacaaaaaaaacaaaaaaattagccaggtgtggtggtgtgcatctgtgctcccaactactcaggaggctgaggtaggaggatcacttgagtccaggaggtcaaggctgcagtgagttatgattacgcccctgcattccagcctgggcaagagagagaaaccttgtctcagaaaaaaaaaaaaaaaaaacggctgggcacggtggctcacacctgtaatcccagcactttgggaggccgaggtggatggattacctgaggtggggagttcgagatcaacaaggagaaaccctgtttctactaacaatacaaaattagccaggtgtggtggcacataccagtagtcccagctacttgggaggctgaagcaggagaatcgcttgaacccaggatgcagaggttgcagtgagccgagagcacaccaccgcactccagcctggcaacagagcaagacgccatctcaaaaaaaaaaaaaaaaaaagaattgagactgttacggtccactcatctgagtcctgtagcgtaaaaattataggcagaaggtggaagagagtgaagaagtatctaagtgacatctgggagcccacctcccttcgccttcttctgtcaagcatcctgtgtgtcctaacctgtaaaattctcatggcgagggactattcatatcctgtctttgtatgccagtgt

SEQ ID NO: 1244052 - DNA, 4001 bp, Homo sapiens
tgggccaagcagaggcttctgcaacaattcaggcaaacgtggggtgacaaggacgctgactgagacgatgctgaaccccaactgctggtttgttcaactggtacagttcacattaagtcgtaacaactgtgaagcttatgtctctacagataccatgtgactcccccccaccaagtgtgtccctctcatttcataatgtgactctaggctgggtgcggtagctcacgtgtgtaatcccagcgctttgtaagggaaaggtgggaggatcacttgaactcgagtttgagaccatcctgggcaacacagcaagacctcatctctactaaaaatcaaaagaattagccaagcatggtggcgtgtgcctatagtcccagctactcaggaggctgaggtagaagacttatttgagcacaggggttcaaggctgcagtgagctatgatcgcacccctgcactccagcctagacaacagcgcgcgagactctgtctcaaaaacaagtaacaaaaacaaaatgtaactctaaatgtagcctattaaactcagcttaggtcatttaaattattcaatacccatattaataccttcaaagcaaactaattccactctggttatagcaagttgggcatttctgggcaagtggtttgactggagtcaggatgtcctctttttgtgaaattatggcagtagtgcctgctttgctagaatacttggtaaactaatttaatgaatatctgtaaagtactttgagctccttggagaacacttccatatataaagaagccttatgacctgcctgcaactgcagattttgcaaacgtgatcttactttttctctcttttgggatatgctcccctttaaactgaagctcaacctcctgaagggggtttcttactaggaaaaatcagacaatttgaggaaatagctatcacctccaagatcccggaagcagtactaaataagagacctcagaacaaggcaatactaggtatctcacctatcccattaccagtccaatttctctctccacttaaaggaggcttccaggtctagcctacaggaaagttcacttattaaccctcaggcagagtactacctgctaaccaggttaacacacatttccttcgtagcactgtaattcacagtgcaatgacagcaatacgcttctataactacagcttcagactgtgctcctcagccttactcagaataggctatcaacactgactcgttaggatattcaagggggtatatgtatgtgtgtggggggggaattcccgacaccgatttcaccatgcttctgtggtcactgcaggaaaaaggtagagctctctgttctctatcatcgctctctttggaatattattctcacttcaagcattctgcctgagcgaagccgtcacttctccaacacatggtcacaattctgaagctgccaggcgactgaacgcagtcggcagcacccaccactaccggagactcagccccaatccgaagcttctcccttagtcagggattggggcgctgggttcctggtgtcaccgccgggcggcgaccccaccacaatctccccaaagcgccgaagcatgtcagcccgaagatcttggctgtcgcctttccccgagcctgcggtgcccgacaggagcccgagttcacgccgccgcgcgccagagcaagaggacgcgccgcagcgagggaagcgggggccggactggggcccggcgccctgatagggaaggggcgtgatcgcaggctgctcgcggcgagggcgagaccgggcgtgggctgccaagaggcgacgccgtggagcccggggaggggacgtgggggtgaagacaggggcagcccagcggctcgagggcaggcagaaacggccgcggctactcactgagccaggactccaggctttccccttccgcctccgccatattgcagccgcccggccccgcggcttcaaaactcgcgagagtctgcacgagctgagacggggcggggcctgcatggggtcctgagaggagtgagtgccgtcaccgagggccgcgccagactgcgacggatacagggagggcaagggtttccttttggcgctcccctttggaccccggagtgaaaaactctaacgtccagatcagtggagagaaacgcagatttaggaccctgaggagtctttttcacccgtttcccgtcactcgctcaggcgcgccgagggcagtccttgtggggtcctcgtggccagccaagatggctgcccccgcagtgaaggttgcccgaggatggtcgggcctggcgttgggcgtgcggcgggctgtcttgcagcttccagggtgagagggtggcgagcagcggcgggggggcgctgcgaggaaggaagggggccacaggcaggccgcgtgggcccctagagagagcattgccctgggggccggagtatctggattcaagcttctaagttagctgcgtgaccctgcgccaatccgaaggtttagtgactacctctcgcctaaggagtctggctgatctagggttctaacgcggagctgaaagtgcggttcagctaaagagctcagatctgggatcgcctgtgaattgggatgggtgtgtaggcgccaagcccatccttaccgttagcacttgaccaggaggagactttacccgcctgcttggggaatgtcctcctacttgggacaagggcctgaattgttgtggctcaggtttagctcgcggtctccgcgccgctccccctcgtcggcgcgttggcagtcatgcctattgttaagtcaaacctactcgcttgtggagtcagcttttgcctgcctcctcctttccccccctcccaggctaactcaggtgagatggagccgctatagtcctgaattcaaggatcccttgattgacaaggaatattatcgcaagccagtggaggagctaactgaggaggagaaatatgttcgggagctcaagaagactcagctcatcaaagctgctccagcagggaaaacaagttctgtgtttgaagacccagtcatcaggttagatggaaacaaacacttgttacatggactgggactatcccagggagggtttctggtgaggattctgtgatacagccttggagagctaaacgtgttgcttttctctttgaagtaaattcaccaacatgatgatgataggaggaaacaaagtactggccagatccctcatgattcaggtaaacagcacttccctcctcagtcatctttcttgcccccctaccccgtagccttgtacttggtactttcagtgtagcttaagagcaaatggattcatgtatctattattcagattaacttccctgcatgtgtacgggctttaatgaagccctgtaagagtcagcaactgccattccttggtgtttcggaagtaaacacacaattaaaaaaaaaggaacaaataaaaaataaaacaactgccattccccacctcaccccccaccccctccatgccacaaatctcaatccactctttctgtcctagtctagcaaagggggaggcacttaaaaactttgttttggatgtgctgtgagaggagctgcattgccagcgcagaaccagaggatgggagtaaagggcaaggtactagcttggctgggtaaaccctttagggagcctggggcagcctcttccaccatattcttttgcagactctggaagctgtgaaaaggaagcagtttgagaagtaccatgccgcttctgcagaggaacaggcaaccatcgaacgcaacccctacaccatcttccatcaagcactgaaaaactgtgagcctatgattgggctggtacccatcctcaagggaggccgtttctaccaggtgaatgaatggccagggcaagaaagcagggccctccacatgtgaaacaagataggtggtgcttgggagttgggtcaagattgatagctttctagctggtgcagtgggattgcacctgtaatctcagcactttgggagcctaatgcaggatagct

SEQ ID NO: 1244053 - DNA, 4001 bp, Homo sapiens
gcattttacataaaatttgaaaaaacttcggtagatatttgcaaaaaaaaatattgaggaacaaaactgatcaactgcctttgatagcaaaagaatactgatgagatgaagagacttaggtgcaccttatcgaaataagcaaatgtataatccaaagcttcagcatcatcaaaacgcagatttcaaaagatattcggaaaaggttaatttcatttcttaagtggcaagcaactgcactcatttcctgttcagattcaattcaaatttcagccatttccttttaaaggaaacagtacagcaacatagggcagagggtcgataatgctacactaccaaatctaaagaataaagtacccggaactgggtcttgacactcaagatgagcaatcagctttttatagtactcttacacattcaataatttggcttcctttaaaaaaaaaaaagtccacctgtaaactaaataatgcgaagaaagcccgttttgaagaaagggcctagcaatacaatcatttcaagagttttaatgcattaggcaatacgagactatttacaacgaaatcaaaccattttagtggaatcttgactgtgcacgagcatgtcactctgcccccagtaattaagcttatgtggtgagagctaccagtattaaaacagaaaatacacaggtagcagtgcagctgcgacattaccaggtaattaagcctccccgagggtaggtggtttctgtatggggtaggccctaaacgcccaagatccttcaacccctctctgagatgtgtgctttgacaaaagcagcgtctcctaaagggaaagggtcaaggaataaggttccaaaagaaggaaaatctggagagagggagtgcgtacggagctctgggcttggggccgacagaggttaccgagccacccactgcaaaggcgagtttgtggggcctgctgaagagaaggcctcgcctaggagttgcaacacactctttctccagtgcgcagcgctcggcctgggggagggggaggaggggaaacagctgccaggggagcggcgggcccagcccggcccggcccgctcaccgtcagggtgtcgtctatgtagaggggaatctgcctcctctcgaaggggaactcctcctccccgtccctgcacactgccacgagtcgcgccatcgtccccgacgctgccgttgccaccgtcaccacctcctcccagctgccgccgccgccgccgctgctgtttctgccgccgccgctgccgcctcctcccagctcctgcctgcaacagccaaaccccgcgagcgtaagcacccgccgctgcgcagcacattcgccacggggggcagggagcggagcgggagggtacgggagagccgggctgcgtttcccatcacccgattccacacacgctcagccaatcagcgcccagcgccgccgggacccgcccccctcgcgccgcgctccctccctctctcccgcccgcccgcccgcccgccggcctccagtcagggtccaaaggagaggcggaagggaccggcctgccgggggcttccccgcccgctgcaggagtcccggccccaggaccccacccctggcctgggccccgcagcctgttccccgccgcccgccgcccgggtgccctctgcccccaactgaccccttctccccgcttctgggcgcaccccgcccagtcggccccaggactgcagttgcccagcgcgaccccgcccctgggagggatcgaccccgcagcggctctgcggagtccagggaacggggaggctcagaccctttcctcacccttctcggaggaggctgtcggttccgaccttcaccgttttcgtggtcgcctcgctaactcccacctctgctccctgttactggctgacgaggcccgcgtcagggccggcgtgggcgggagcgcagctccgaatgtcgtttcctctacgggcagtcagccgctcgcgccgcggggagtggaagaaggagggcgggggacgaggggaaggtggggccgggcggggtcgggcgccgggcgggacccacgtcctctcgcgagactggggctggccgcgctggggaccccgctggagaaatttgcgcccagagggtgcggggccgccctggccgtcccgcccgtgggcccggcgcccttctcggagcccagccattccgctagacccgaactaggactggtaggaggggtgatcggcccaacctcaggccccagccgcgggccgggaaggcttccccacggacgaggggcaagcccctcgacgtcagggtgtcgtctatgtagaggggaatctgcctcctctcaaaggggaattctttcagcgagtcaagcccgtctgattcggggctgactcagggcagaggcccagagaggacctggataggttgcgagaagtcgagatcagagggggcggaaggcagtgagaaaagggagacgagcatcggggggtgagagacaaactcaggtctggctcttggcccttgacgccactgaattcgcttcccacggtgggaagaggagaaaagggccctgacaccgcggctcgccaggggcccgctgcgtagctgcatcccgatcccgctgaggggacagcaaatagtgaagtgctgatagcttgtggttgtcgttacactggaaggaaatagaaaaccggacagtggtgtgtgtgtgtgcgtcttggccaaaggaacttcttgggctgggttaatgtgagcaggtactcccttgggcgaagtactggcactggccaacggcctttccctctggccgtctccgaggaagcagagctgctgtgaagacagttcctctcgccaccgtgtgttcagttctgaccttgaaggttttggaggtctgttgtgaagatatttagcctatgaaagtcctggtgatctgaaggacagatcaatttactgctctatttcctggagctgtgatacctttaaaaaaagtattttgggtcgggcatggtggctcacgcctgtaatcccagcactttgggaggccgaggtgggtggatcacctgagggtcaggagtttgagaccagcctgaccaatatgatgaaacccccgtctctactaaaaatacaaaaattagccgggcgtggtggcatgtacctgtaatcccagctactagggaggctgagacgggacaatcacttgaacccgggaggcggaggttgcagtgagcccagatcgcgccattgcactgcagcctgggcaacaagagcgaaactccatctcaaaacaaaataaagtattttggttatcacatggagtcttagagattcacaacaaataacccatagtgcacccttagccatgttgacttagtacattgtgtggtcattgttagggtcggtgacataataaacgaagaaccattgttcattcccgaaggtgtcattacccggcaaatatttatgtcttctgggccggggtcatggctcacgccggtaatcccagcactttaggaggcgaggtgggtggattacttgaggtcaggagttcgagactggcctgaccaacatggtgaaacccagtctctactaaaaatacaaaattagccgagcgtggtggcgcacgcctgttatcccagctactcgggaggctgaggcaagagaatcgcttgaacccgggaggcagaggttgcaatgatccgagatcgcgccattgtgctccggcctgggcgacgagtgaaactacgtctcaaaaaaaaattttttttatgtcttctggccatgttagcagagtagaagagtgagtattagcttgaatctaatacgtatgtatgatgttcatatacatagccaaaatttggacatttttagagaatcttgcgttttatgtaaaaaacaaaacaaaaaccaggacgggggcggcggctaacacctgtaatcccaagactttgggaggccaaggcgggcgggtcacttgaggtcaggagttcgagacgagcctgggcaacatggagaaaacctgtctctactaaaaatac

SEQ ID NO: 1244054 - DNA, 4001 bp, Homo sapiens
ctgctctgctggttccaaagtgggcctgggcacagccgagggcacctccacccccaggtctcccgccagtagactcagtagagcatccccagcaaggtctgaggtgggagcgagggctgcgctgcgaagcacagctgccagttgtgggttggtggctcgggccccagcgcccaggggtgtcccatcagcatggcaaagtagtggacagaggccttctgtgccccgagccaccagagcccttgccaggggtgtgtccaccaggaagccctcctgagccagcgtggtggggcccactagcaggcgtggccagggcaggcggccgaagcgtgcatgcagcaggtgcagggtgggcagagccgcgggcagccccaggccgggggccagggtctgtgctgggcctgatgtcagggccgtggaattgcctgaggagctatcgtggaagaggccccaaaacatggcacctgcaggagacagaggggtccctcagcagccgcaggtcaagggtcactgacttgtttcagtcaagatcccttgactgagcctgggatcaggagttactgaccaggcctgaggtcaaagttccacagacccgggctcaagggtcatagcctggggttggactgctgcccaaaccctaagtcctgctcacttagcagtcttgaggtcagtgctactgactccctaagttccaggtcactgatcaggctgtgggttggggttgcagtctggggtcaggggtcactgacctagccccgtggcatgaggatgcaccactgccaggcacaatgcagctccaactccagcatccacgacgttgcccccggcaacaagcagctctcggcctaggtgggagcatgtggctgcagcaaggaaggcactgtcatgcagcaaggaggggggctaggctgggctggtgacccctgaccctcccctccccaagccgcccccagcactgactgacctgcagggctgatgatggcaccgtggtggtatacgccagggccgtgggagtgtccgccgggtggaggggccacagagcccaagcttcctgtcgacctgccctgattctggagctgcctcacagccagggagcagccaacagccagcagcagcagggctgccactacacgggcccaggttccgggcagcccgccagccttgttcctgcagagggggggtgtcctgagccacggctgggacagagggatgcccaaggaccccaagagaccccagggaatatttcccaaaaggtttgatttagcaagaggagcacaagtcagccaaggagaaagggcttcttggcagcgggtgcatcttgggcagacatggggatgggaaagcatctggggaaactgagcctagctagggagggagcctctggaggggagattggtggggcagagtccactcaggtgggagggaggcccagtggggtgtggcaggcaggagagaaggggctggggagcaggcccagccaggcgtagtcaggccccaacctgcccagcaggtgcctcctgcaccaggacttgggggctggggacctttgacaaagcagcagatgggacagaggctggcttggtacaaatgtccctccagatgcacagacttttgattgggtcaggccaagtctcgggctacagcctgggttttcccccaaattgaccgtacagtgcctggagctaaacccagcggggagtcgcctggtccccctgaggggctccagagagagggacttgccaacctcaagcctggggagcctggtgcccagacccctcccttacttacctggaagagtcctggtgcctccgggggtttagaaccagcgcctctgatgtctcctcctcctccacttcctcctccgactccaagcttggctcccagggcagcagcttctgatagaccacgggctcttctgcccgctccatggccccccagtgctcgccccagccctcctgcctgccagcctttccggctgtgtctcagaggccctgcccaagcctggcaggtgggaggtggcagcgaccttggggaagggtgggggtggaatccagaacaggtctgggcagggcacggggccaaggaggctgcatgtgagcctgccccattaggacacaaggcccgaggagctctcgcgacagggttcccggggtgactgcctgtaaggggccacagctcagtgaggtcgagaaggagttcagccttaatgccacaaccttgatactcagggcacctgctgggctcctccccttgggggatgtagcccatggatcccacccacctgggactctagggactgtggacttgaattagagctacggtttcacggtggcttgggtcagagctcccacgtgcttgagtctgcacgtgactaggttctggcgtaggggtgtctggtctctggccggggtcaaggctcagcctgtggctactctgggtctgggtttctttgaggagcaacttggttcgtaactccctgtgcgtgttttgcgactcttgtccagaaggtagcgccacagcctggaaaccaacatttctaaattcattctgggattcccatcaaggacttgttgcaaaacagtgctgtttgtaacagtcccaaattggaaagtgcccaaacatccattatcgttagaatgaatgatgtaagtcacaatggaccactctgcagcaaagagagtgagtgatctacaattatatgcaataatatacacaggtctgacaagcataaggacgagggaaagcagccaggcaggagacagcgcacgctatatgctttcatttacacaaagtacacaaacaggcaacaacaaaagagcaacaacagtctgcccttagaagtcagatagtgactggaggaggtaccagggggtttctggaatgctggagatgtcctttctttccttcctttctttcctttcctttttcctttacctttcttttctttctcttctttctttcttgacagagttttcattcttgttgcccaggctggagtgcaatggtgcaatctcagctcactgcaacttccacctcctgggttcaagcaattcttctgcctcagcctcccgagtagctgggattacaggcacatgccaccacgcctggctaattttttgtatttttagtagagacagggtttcaccatgttggccagcctggtcttgaactcttgacctcaggtgatccgcccgcctcagcctcccaaaagtactaggattacgggtgtgagccaccgcgcccggccgagatgttgtttcttaatctgagtgttggtgacacgagtgccctgggtgtgaaaatgcattgagttgggcattgatgacgtgtacttttctatgtgaatattgtctttcaataaaaaagtaaaaatggaaaagctcaggtattttctacattaaaacaacaaccataaaaatcatcctttgaatcatccatcatcccatctggctctccagctgcttccctttctcatggcctcttcacgagcaagtacacgggttctttaagattggtgtgcatcacgatcacctgaggagcttgttaagtcagatcgctaggctcctctcctagaaagtctggcttcaggtgtagggtctagaatgtgctatcccaattgccacagtcctggaaccacaccttcagtctaaaaaaaaagtgtacacctgctgtgttcacttctttctctcctgtttcttcccttagctggtttctgtctctagttccccagagaaacctttggtttccttttttttttttcttgggccaataaaaaaccaaccaaccaaccaaatagagcagcctagggttgccaccttctaattttgccaatggtggggagatgggaatcaaaatgaccatttttatgattttatgacatttatgtcataaaataatttggtttcactttctgttaacacagggtaagaaggttagaatctcagaatgaaggtccatccttccttcctgggaaaaggcatctgagagccttagggctctgtgct

SEQ ID NO: 1244055 - DNA, 4001 bp, Homo sapiens
cgcctgtaatcccagcaatttgggaggccaaggtgggtagatcacctgagattaggagttggagaccagcctggccaatatggtgaaaccccgtctctaccaaaaaaacaaaaattagctgagcctggtcatgcatgcctggaatcccaacaactcgggaggctgaggcaggagaatcgcttgaacccaggaggcggagattgcagtgagccaagattgtgccactgcactccagcttggttcccaatagaccccgcaggccctacaggttgtcttcccaacttgccccttgctccataccacccccctccaccccataatattatagaaggacacctagtcagacaaaatgatgcaacttaattttattaggacaaggctggtgggcactggagtggcaacttccagggccaggagaggcactggggaggggtcacagggatgccacccgggcagctagaagccacagctgccctccacagagcggcactgcacgatgcgcaggaatgtctcgaccttgtccatgtccttcctgaagcagtagagcagcccgtagttcttgagtagtgcgtcatcgttgtgtgagtttgtgtcgaacttgctgtaggtctgcttgaagatctgcccagtccgggggctgccatcttccagcctctgcaaagtgaaggaagagaaggagaggccaagcgcttgggtactgttccctccctttctcattcattcattttcctccctccccttcagggtgtagagaaaggcctggaggattcacgaggggaaatgaagaataaggtgagttctcttgggtcagggcctgactgctaaaaagagggcagcagtgtttctctaacacagctctcaaagtcagtggggctccaggattggggacccctggcgccaccctcacccccatcagcgtttggatgccttcctctaggtcctttaggaggtcatagacgttgctgtcagaggcgccgtacaccaggctgttggcgaagacactcctgaggaactgcacgggctccagccacgactggatgagcagcagggagatgcggagcagctctaggttctgcaggggaaggacgggcattggctgtgctgcccgggggctctgactacaggtctcccccatccccgcctggggagaaggcatccactcacggatttctgttgtgtttcctccctgttggagggtgtcggaatagactctgagaaacagagggaggtctgggggttctgcaggaatgaatacttctgttcctttgggatataggcttcttcctaggagaaggaccgcccaccaaggtctacgctggagaccagctcccattgttacttttctgggaacctcactcagcgtgtgctcatctgcctgcattttcgcttcgggaaaaaccctgagctccttagtctcctcctcttatttcccagcgggggaaagtcaccccttcctgccacccctgatgcgcacccattccccaagagcttacaaactcctggtaggtgtcaaaggccagctggtgcagacgatgggcgcggagcatagcgttgtcaaaaagcctggataagggaatggttgggaaggcactgccctcttgaagccagggcaggcagagcaggccaaaagccaggagcagggacgtccgggagcctggggagaaaccagagggcaacagagggagccggagagcaagaggccagcactctccctgctccaggagctgtttgtttttctctctccatccctccagggaccaggagctttctgagattggccaaatactgggcttacatggcgatactcacattcagaagccccaaacctgagggttagtgcccccgtcccatctacaggtcgctgcctctcccctcaggacacattgtgcccaaagggattttaggggcgcttacctgtagccattgcagctaggtgagctgtccacaggaccctgagtggttcggggagttgggccttgggatccttgagctggtctcttgtgggccctttttataccctggccccttctctcccactgttgaccccacctgtttctgtgtacatttatgcatggggccactgacgggcttgtgctaatggataatttagaagctcctcccacacatgctgggatcatgccccctggcttgtcatctttcccttcccaccgtcaccagtgttgtgagggttgtgcacagagtgtcagccagagataccacccaacttgtcctctctttaagggtcacgtgggtgccctctggccgcaggccatggtggccaacctgcacgcggcgaaggatgtcaggatagccagtccttgagaccccctaccgaccacatcccattctctatcctatccctttcctcctccccgcatgtttaacctccacccaccagacagaatgtgtgtgttgggaaaaggggccaagcacagccaatagattgtgggggttgtgagcacgattcagtcctgaattccacttctgctgaggactcctgggtcagcctgagtcagctggatgcagttccaacactgaccactagagagaaccaaccccacactttgctctcccctttccctgagcattgctggggctcccccaggtccctggggacgaagaacccagactcaaggtattgccccagctccttggacttgcagcagagacacaaaccaagaaacagaaatcccgggagcagacacggaccacaagctcttcctcccatagccctgaaaccatcagagaatctcaaagttagaagagctcttgaagatttgagtctcttcctcagctttggaactcagaacacatcacgccgaaagatgctctatcaggctgggcgcggtggctcatgcctgtaatcccagcactttgggaggccgaggcgggcggatcacgaggtcagtagatcaagaccatcttggctaaccaggtgaaatccactctgtactaaaaatgcaaaaaagttagctgggcgtagtggcgggcgcctgtattcccagctactcgggaggctgaggcaggagaatggcgtgaatccgggaggcagagcttgcagtgagcggagatcgtgctgctgcactccaaccttggcaacagagcaagactccacctcaaaaaaaaaaaaaaaaaaaaaaagaaaaagaaaaagaaagatgccctgtccagccatggaagcccctcctcttttttctcctcctccttttcagatctgtatagagcttttccagttgccgagggcctgcctgtgcattctcacatctgacctgccacttgtcttgtgaaggaggtattattttcttccgatttcacagatcaagagactgtggctcagagagactgattgcatgagctacctcagccagggcagcagatctccacaaccttgctcttcctacattgcgtcatttaaagtcctttctccaggccggacacagtggctcacgcttgtaatccccaaactttgggtggctttgaggtgggtggatcacttgaggtcaggagttcaaggccagactagccaacatggcaaaactccatctctactaaaagtacaaaaattagctgggcgtggtggcatgagcctgtaatcccaactactcgggaggctgaggcgggagaatcacttgaacccaggaggcagaggttgccgtgagccaagattgcgccactgcactccagcctgtgcagcagagcagaactccatctcaaaaaacaaaaaataataatattaaatttttttttctccagagcaggtagtgtgatgctactgagttatttagttattttagcttcttccatgttcctccaatctcaactggggcagggagcccccatgacagggcctttttgctagtgccggggacttagatgtggattttcggccatggaagaagtctccagcctcccttaggaatgagggtggcaggggccctagttggggaccactgcataactctgcaggtggacacaggggtggcgaggctccccagacaggt

SEQ ID NO: 1244056 - DNA, 4001 bp, Homo sapiens
tatggtgaaaccccgtctctaccaaaaatacaaaaattagctgagcctggtcgtgcatgcctggaatcccaactattcgggagactgaggcaggagaatcgcttgaacccaggaggcggagattgcagcgagccaagatcgtgccactgcactccagcctggttcccaatagaccctgaaggccctacaggttgtcttcccaacctgccccttgctccataccacccgcctccaccccataatattatacaaggacacctagtcaaacaaaatgatgcaacttaattttattaggacaaggctggtgggcactggagtagcaccttccacgaccaggagaggcactggggaggggtcacagggatgccacccgggcagctagaagccacagctgccctccacagagcggcactgcacgatgcgcaggaatgtctcgaccttgtccatgtccttcctgaagcagtagagcagcccgtagttcttgagcagtgcgtcatcgttgtgcgattttgtgtcaaacttgctgtaggactgattgaagatctgcccagtccgggggctgccatcttccagcctctgcaaagtgaaggaagagaaggagaggccaagcgcttgggcactgttccctccctctctcattcatccattttcctccctcccctccaggttgtagagaaaggcctggaggattcacgaggggaaatgaagaatacggtgagttctcttgggtcagcgcctgactgctaaaaagagggcagcagtgtttctctccccagtccctggaagccagtggggccccaggattggggatccctggtgccaccctcacccacatcagcgtttggatgccttcctctaggtccttcaggtggcgatagacgttgctgtccgaggcgccatacaccaggctgttggcgaagacgctcctgaggagctgcacgggctccagccatgactggatgagcagcagggagatgcggagcagctctaggttctgcaggggaaggaccggcagtggctgtgctgcccgggggctctgaccacaggtctaccccatccccacctggggagaaggcatccactcacagatttctgctgcgttttcaccctgttggaaggtgttggaatagactctgagaagcagagggaggtctgggggttctgcaggaatgaatacttctgctccttcaggatataggcttcttcctaggagaaggaccgcccaccaaggtctatgctggagaccagctcccattgttacttttctgggaacctcactcagcgtatgctcatctgcctgcattttcacttcagaaaacaaccctgagctccttagtctcctcccattacttcccagcgggggaaagtcaccccttcctgccacctctgaagcgcacccattacccaagagcttacaaactcctgataggtgtcatatgccagctggtacaggcgacgggcgcggagcatagcgttgtcaaaaagcctggataagggaatggttgggaaggcactgccctcttgaagccaggacaggcagagcaggccaaaagccaggagcagggacgtccgggagcctggggagaaaccggagggcaacagagggagctggagagcaagaggccagcgctctccctgttccaggagctgggtttttttttttctctctctctctctgcctccctccagggaccaggaacattcagagattggccaaatactgggcttagatggcgatactaacattcataagccccaaacctgagggttagtgcccccgtcccatctacaggacgccgcctctcccctcaggacacattgtgcccaaagggattttaggggcgcttacctgcagccattgccgctaggtgagctgtccacaggaccctgagtggttcggggagttgggccttgggatccttgagctggtctcttgtgggccctttttatacctggccccttctctctcgctgcttctcctcacctgtttctctgcatgtttaggcctggggccactgacgggcttgtgctaatggataatttagaagctcctcccacacatgctgggatcatgccccctgacttgtcatctttcccttcccaccatcaccagcgttgtgagggttgtgcacagaatgtcagcagagataccacccaacttgtcctctctttaagggtcacgtgggtgccctctggcagcaggccatggtggccaacctgaacgcggagaaggatgtcaggatagccagtccttgagacccctaccgaccccatcccactctctatcctattcctttcctcctccccgcatgtttcccctccacccaccagacagaatgtgtgtgttgggaaaaggggccaaagcacagccaatagattgcgggggttctgggcatgattcagtgctgaattccacttttgctgactcctgggctcgcctgagacaggcccgcctggatgcagtgctaatactgaccactagagggaacaaactccacactttgctctcccctttacctgagccttggggcgggggcgggggcggggcgtggggatgggggtgggggtgggggtgggtgtgggtgtgggaggggtggggggggggctcccccaggtccctggggacgaataacccagactcaaggtattgccccagctccttggacctgtagcagagatacaaaccaagaaacagaaatcccgggaacagacacggaccacaagcgcttcctcccatagtcctgaaaccaacagagaatctcaaagttggaagagctcttgaagatttgagtctcttccccagctttaaaactcagaacacatcacgccaaaagacgccctatccagccatggaagcccctcctcttttgtctcctcctcctttccagacctgtgtagagcttatccagttgccaagggcctgcctgtgcattctcacgtctgaactgccacttgtcttgtgtaggagctatgactatcatcccatttcacagatcaggagactgaggctcagagagactgattacatgagctacctcagccagggcagcagatcttcacaaccttgctcttcccacattgcgtcatttaaagtcctttctccaggccgggcacggtggctcatgcctataatcccagcactttgggaggctgaggtgggtggatcacttaaggtcaggagtgcaagaccaggctaacccacatggcaaaactccatctctcctaaaaatacaaaaattagctgggcatggtggcacgagcccgtaatcccagctacttgggaggctgaggcaggagaatcgcttgaacccaggaggcagaggttgctgtgagccaagattgcgccactgcactccagcctggatgacagagcgagtctacatctcaaaaaaaaaaaaaaaaaaaatcctttctccatagcacgtagtgtggtgctactcagttatttagttattttagcttcatttcctttttttttttttttgagatggagtctcattctgtcacccaggctggagttcagtggcatgatgttgcttcacagcaacctccacctttgggttccggtgattctcccgcctcagcctcccaagtagctgggattacaggcgtccaccactatgccgggctaagatttgcacttttttagtagagacgggggtttcactatgttggccaggctggtctcgaactcttgactttaggtgatccaccctccctggcctcccaaagtactgagattacttgcgtgagccactgctcccaacccagttatttcagcttctatatccctctgagtgcagggatcctgcccccaacacaaggggccctttgcctcattttgtctttccataaggggcagattgttctttctcaattctcaggtgagaatggcccagtggcatggggtgccttgtggaaacctcagagcaggacaaggtgaaggcagagaaggccaggactgagcctcctgtctcctggtgcccagggttggggctact

SEQ ID NO: 1244057 - DNA, 4001 bp, Homo sapiens
ctccagtgccctcagccctggggacctcagtgcgtccagcagcagggccctagggtccttggttccaggggtgcccacctggcccagggtattcccaggccaaggcaggggtcggggccaaggggatgtaagcgtcacacgggcagtgcgtccctgagccagcacttctgggtaggccttgtttagggctgccagacccagcaaggtggcctggaggaggaaagagagaatgttggtctggtgtcagagccagacccagagcccccatttgggggttctttgcccaccatgactggagggtttggctgcaagtcagaggtctctggtgggactgggctgtggccaggactgggctctggccatcctagattacctgcagagaggcctccccaaggtcctggtttgaggtcgggggcagtggctgctctccactgtcttcctgctgggtctggctggccttggtcagagggagatgattccggaaggtgcttatgtctatagccccaatgacaacagaaacgcctcaggaagccagtttcccaagagtttcaggcaagactggtgagacccttgagggaggaaccgagaataggcctggggtagagaggatgtaaggacccagcatgggaaattcatcttggacaagaaagccagtcctgggtctctgggtcaggccactccgttggcagtggaggaggtaagggggccatcaggctctggaatctgacggtcctgtggggtttctttctctttgggtcacctccccagaccctgggaaacacacctgtgctccttctgagggaacagtgggggcgctgggctccctgtagacaccacctcagggcctgctgctggctctggtgcacatggagcgtgctctgctccagcctccgccgctgccaggtggctgcccagaccagggccccccatgccactcggtgctggaggccagcaagccaggacagcctggcatcctgggaccgctgctgcctgagcagggccaatgttggcagcagcagcagcagcagcagcagtggccacagcagcatctccaagcagctcctgggaagaggaaggaaccgagatatgggggcatgcagcaattatccatttctcctcccacgctctactgcatacaggaaaaccgaggaaaaatgaaattgggaagaaggcaggaccctgtggggcaggtgatgcaaaggagagactatcaaagctttggagtcccactgacctgagtgcagatcctgcctctgccgcttgttagctgtagggccctgagcaatttagtgggctgcactgagctctgtttcctgatctgcaaaatgggaataagaataagaatgcctctttcagaaggtaggggtgggccgggtgaggtggctatcatctgtaatcccagcactttgggaggctgaggcaggagaatcacttgagcccaggagtttgcaaccggcctgagcaacatagggagactccatctctacaaaaaattgaaaaactagcccagcgtggtgtcacacccatagtcgcagctacttgggaggctgagatgggaggatcccttgagcccaggatgtcaaggctacagtgagccaagatcgtgccactgcaccccagcttgggcaacagagtgagaccctgtcaaaaaaaaaaagaaaagaaaaaaaagggagaaaagaaggaagaggaagggaaggtacaggaagggtttcggacagggtcggtcgggcacacagcagctgcgtaacgatatctcttgcccactcccgagtggctttgctttctctcgggatccaccctgtcccagctccttgtccctcctgagccccaggctgtggggtccatgcccacatgcacctgtcacagcccacttctgcctactcctggcacgtgacggagacccctgggtgactctgggtctcagcacacatccggccagaaagaaggagcgatggctttaaaaggctgggccccaactgggaaatccggccaccaggcctgagggaggagctgaaggaggggggtgctcttaaaggggcaggtcgcctacaggacttcatgtcgggtgctagcccaggctggcagttggggcagttaggaccagactagcatggtcctcaaacttgcgcaggtgaaggaacagaaaggtgtgtgtgggaaagaacgccattaagccacttgagctgggagaggggcaagcttaagaactcttaaaaccccaactcagctgggcgcggtggctcacgcctgtattcccaacactttgggaggctgaggcgggtggatcatctgaggtcaggagtttgacaccagcctgaccaacatggtgaaaccccatctctactaaaaatacaaaattagccagatgtggtggcacatgcctgtaatcccagctacttgggaggctgaggcagaagaatcacttgaacttgggaggcggaggttgcagtgagctgagattgcgccattgtactccagcctgggcaatgagcgaaactccgtctcaaaaacaaacaaaacaaaaacaacaacaaaaaaaaccccatcctctccctcaaggtagttgagaaagaaaacaattttattattgaataagcattcaaccacaatgtgatgtacatgacaggtgatctgctaagagcttgcaaagaagggaggaaatcttacttttttgtatagccaagcgcatacaacccattacatacacgttttcaagataaacaataacgagtcctcaagtaagaggacttgtcacatatagtttatcttttttttttttttttttttttgagacacagtcttgctctgttgcccaggctggagtgcagtggcacaatctcagctcactgcaacctccacttcccaggttcaagcgattctgctgccccagcctcccaagcagctgggattacaggtgtgtgccaccacgcccagctaatttttgtattttcagtagagatggggtttcaccatgttggccaggctggtctcaaactcttgacctcaagtgatctaccctccttggcctcccaaagtgctgggattacaggtgtgagccaccacacccagccagtcacatagtttatcttaactttacatggttattaggtgaacatctgtgttagcttgctggctttatcccaaggaaaattacaaacttctttttttttgtttttttggcagagttctattcttgttgcccaggctggagtgcaatggcacgatcttagctcactgcaacctccgcctcccagattcaagcaattctcctgcctcagcctcccgagtagctgggattacaggcacgcatcaccacacccagctaattttttgtatttttagtagagacggggtttcaccatgtcaccatgttggccaggctggtctcaaactcctgacctcaagtgatccacctgcctcggcctcccaaagtgctgggattacaggcctgagccactgcacccagccagtcacatatagtttatcttaactttacctggttactgggtgaccatctgtgttagcctgttgcctttatcccaaggaaaattacaaacttctctttttttgttttttgtttttgagacagggtcttgatctattgcccaggctggagtgcagtggtgcgatcatagctcactgcaacctcaacctcctgggctcaagagatcctcctgtctcagcctcccaagggactggaactacaggtacgcaccactacgctcaactaattttattttttgtagagacgagagagctccctatgttgcccaggctggtgtgttcttgacctaggctctcaaaacactaaaaccactccctttctccccttacttgcctctggatacctttgagaagagagctactacttgctgagcacctctcttcccttcacagctgagcttctttcaacaggtctgttctcactctggctaactcacctcactttcacgttttttctcgctgagatcttgcatttgcttttattatttatttaa

SEQ ID NO: 1244058 - DNA, 4001 bp, Homo sapiens
agtgaaactaagatttgttttaaatgaccaaaaggagagcttgaggaataaatatactgtacattccaccctcacaccccggggggtggggcgggggggaggcagtggggcagcacacagtgcctttcagagggacaggtgtttggaggggcttctgggaacagcctggcagatgaggtgtcagactaaggaaaaaaagggcaaagggaaggggaaaggggtccttagtcaggcaggggtaggtatagaggaggaagagttttgtggggaggggagataaaagagtattcaccactgccactccatttcagctggcaaaaagtgtcaagcctgagaggagtgaggtgtgggaaaggcccagacaagtgaagctgtacttccgaagctgatcagggactggcagcaggtattcaggaatccaggtcaaatggggggaggcgactggacatgaactaaaattgggtgagttagatttcccagtacatgggtaccagagactaagaggaagccctgtgcctgtgtagagaaaagttaagaacaggaaagagggtcccctggaaccaggatcgagcaagacgaaggtatggggtggggaagtctggatagaggccaggaagactgggaaaagactgcaaatggtcccagagcaggggcaggaggcctgggggtggagaagctggaaggagctgggtgcctggaccatgaagagacagaagcagtgagtggaacaggggacccaggaggcaacatcccaacagactgtgagcagcactcagggagtgagtgcctggtcttgaggtgaggccagggcctgaccaatcagttgcgggttaggtgctcccccgtctgggggtctgatgaagccctcctaaggagatctcaggaggaggaagaccccaaggtctgcggattcctggaactgaggaaggggcaggaggacatgtctcaggtctgagagaatctgacgtgggcccagacatggggagggtcccaagtctggtgaaaccaatggagagttcttcagggtctgaaaagggctggtggcagtccctgatctagggacgacaggtcatggggaggaaggacccaggccttctccgagtcatgaggggcttccggatcccagacgggccggtcacgggcttcaagtctgggagtgttcggggtccgccaggagccggtcacgacgggctctgggtccgaaggggcaggtcagggctggggctcggagagtgtgagacacaggctgggaaggtcccgggtgggaagcgccgggtgcaggaggccccggcggcgagggcctgttccgcggctgcggggtcgaggagccgaagcgggcacggcccgtgagcgccgcgaggaggccctcgggccccggcccggcccggcgctcacctgcagcaccacctctacgtcgtacgagttccccttgctcttctggtggccgcggaacttggagccgctgtagagcaggctggtggccacgccgggctgctgggtgttgatgggcggcggcgggatgagtgaggccgcggaggcagcggaggcaccggccggcgggggacactcggtgcggaccggcatcgcggggtcccccggagccagggctggggggagtgggagaggaaccgccgccgccgcgcgggagccgaggagggtggcggggagggagaggccggggcgcgcacgcgcggggtgggggcgggaggggcgaccacccgcccgctgcctgcggagcaagcgctccggccgccaccgggacccagggacctgcgagcagggcctcccagtcctgagctgggtccccctcccgacttgccctcgcgcacacatacacacacacagacactcacagacacacaacacacaaacacacacagacacacacacaccccgccccttccgattggctcaggcgagcctggggggcgggagcaggctcaggcggcgcttccgcccattggcgggaggagaaaacacgtggcgcggtgcgcgagcggcccgctgggacttgtagtctcctcgccgaggcgcggcgtggagggggcggggcgaggtgcgtttgtgatgctgattgactgggggtgtgcgcaggaggcgcgcggcggcgacggcgcgccgtaggtgtcatgcggaagatggcggcgtccaagggaggttgagggctctgaggaggcgttgagaggtttccgtacagcccgaccgtgcggctttggggatcccatcgctctgtgtttcctgctccaggtttcgcgtctcgcatcttcccagaccctcgggcgcgatgtggaggagctgcctccggctgcgggacgggggacgccgtctcctgaatcggccggcgggtggccccagcgcttctatgagtccggggccaaccatcccgtctccagcccgggcttacgccccgccgacaggtaagaccatgacatgttcttttgggttggggccgagctggggtaaggtgggcttcgggcttcggctgtgcaaagcgaagtaactgaggcagggttcaggctcatgaggttatgcaggccagtcaggtctttttacagatgagaaagtgaagcccagacaagggcagacgacccgagagggaacagcgagtcacgcacgatacagtaattgatatttggcctgtgcaggttttctcaaagcttatggctgccctccctttaataaggaaagcaggtgtcatctttgttttcaaaaggggaagtttgggctctgaatcaggacttcgtctgggttacaggcagactctctcagaggtttgtggtgtctgtctgactgttttccgtgtctccactgcccaacacaagacctgcccagaagggacctagaacctgggccttcattcctccatcccgggcacttctgctgcaggtttcctgactttccctcctaccacaacctctgccatctgcagccttctctcctaaatagaaattgacacctccacctctgactgtggagtcacctccacctccaactctgatgaagcttagaagtagtggctctttcattgctgatggtgagtggtgtcagggtaagagtgagaatgactcatttcagtgaatgaagagcagtaacaccctcccaccattcaattagttttattgtgctggaggcaggaggcacggttgtctttaagacccacctgtatgtattggtagagaagctcaattaaagaagaaaaaggcccacctgaatgatgttcactgttcattgcaaaaggttataatattctgattaaattgtggtttataatatcctgataagggacatacaaagaaactgtgagaacacagagaatcgcttactcccatcttggggatgttcagggtttagaatgggtcttgggtgaaagggcgtttgtttaagctgagccatgatagatgagtaggagttcagcaaaaaggtgggagagtgttgggtatctagaacgtgtccagggtgacagcaaggtatgagggacttttccctgacactgcctgttttagaaaatccagaacttcacaggcagtttggcattgtggcaggagtgcaaatctaggatctgatgctggctgaacctctgaggtctgtgtgatcttgggcatgcaactacttcctcatttttctccatgcgttgaagtactaggttgcctttgaggatctttctggctgtcaagttctttttttttcttcttcttctgtttttttgtgtttttttgagacggagtctcctctgtcacagaggctggagtgcagtggcaccatctcggctcactgcaacctccgcctcccagattcaagcgattttgtggtctcagcctcccaagtaggtgggactacaggcgtctgccaccatgccctgctaatttttgtatttttagtagagatggggtttatattgactaggctggtctcgaactcctgactttgtgacccgcccacctcggcctcccaaagtgctgggattacaggcgtgagccaccgcgcccagccaagttctataa

SEQ ID NO: 1244059 - DNA, 4001 bp, Homo sapiens
aaaagaatgcattcataagcctgggtaacatggcgaaacctcatctctacaaaaaattcaaaaactagccgagcgtggtggtacatgcctgtggtcctagctgctcgggaggctgagatgggaagatgcttgagcctggcaggcagaggctgcagtgagctgcgatcacgccactgcactccagcctgggcgacagggcaagatcctgtctcaaaaaaagaaaaaagaaaaaaagaaaagaaagaagcaaacatgcataaatgaataaaacatttattgggaagggagattctgtcatcttcggacaattaaccaccaggaagtcccgccagagatctaaccatagtctctcccactgtaacagcagcacacaataaatcctctctggctcagtgctcactttgcactcacgctgccggcaggtatttccctggagcttcctacctcttagcctggattccttccctttctcatctccccctagaaacaaatccagaacctgtcatcccctaacccctcctctgccccatccctttcctctcaccactcctacctgaagtgaccctctttcttctctcctagtcccactgccaggaacagggacagcagcagcagagcaaaggtcttcgtggccaccatcttccaaggttatttcctgagctaagacagaaaaaagccaggacatgttgagagagcaaccagtaggggttctgaaagctggagaggggcaaagccctgaggtttggaccctttcttttcctttttcttttttttttttttttttgagatggagtctcgctctgtcgtccaggtgggagtgcagtggcacaatcttggctcactgcaacctccacctcctgggttcaagccattcttctgcctcagcctctcgagtagcctggactacaggcatgtgccaccactcccggctaatttttgtatttttagtagagacagggtttcaccatattggccaggctggtctcgaactcctgaccttgtgatctgcccacctgggcctcccaaagtgctgggataacaggcgtgagccatcgcgccttgccagtttggaccttttctaagagcctggggcaacaccatgggggaagatgaggggtgctgtgcactggagttagtgactagaagggacatggaatcttaccaaaagatggaccaggctgggtgcagtggctcatgcctgcaatcccagcactttgggaggcccaggtgggcggatcacttgaggtcaggagtttgagaccagcctggccaatatggtgaaatcctgtctctacataaaagacaaagattagccaggtgtggtggtgcgcgcctgtgatcccagctattcaggaggctgaggcatgagaatcgcttgaacctgggaggaagaggttgcagtgagccgagattgcgccagtgcactccagcctgggtgacagagcgagactccatctctaaataaataaataaaggaaacatcagcgctaccttctcatttctctttctctttttttgagacagggtttcgctctgtcacccgggttggagtgcagtgacacaatcgtggctcactgcagcctcgacctcctgggctcaggcaaacctttcacttcaccctcccgagtacctagaaccgcaggcatgtaccaccatgcccagctaattttttaaattatgtgtagagatcgagtttccctccattgcccaggctggtcttgaactcctgtgctcaaatgatcctcctacctcggctcccaaagtattgggattacaggcatgaggcaccgcacctgactatcttctcacatctcatatagaggaagagaaaactaagatgccagggctgctgagcatctcagggttgccaagatccatctgctctcgggtcatctcatccatccctgtctccacttctcttaccagacttcctttccagctcttccagaagaaggacagataggggtctccttcccctgatttctggaccttctgagcctgctgaagaaatcatgccccagctcctttatattaggcatagacctgctgattagcctaaaagcatcttatctcaagaaattaagcccacagctcctgccacattaagtccattttacacataatagagttgccctttccacctgaactgtgctaattggtgattaacatttggctatctccagctgctgtctggggcctgcctgtgggtagggtaccctaagtacccccttttttcttcctcctcctcccttctgggcacagggcccactactattcttctatgccctacttcctttacagttgccctcagttagaagggatacttgtaggccaggcgcgatgaatcacgtctgtaatcccagcgcttgggaggacgacacgggcggatcacctgaggtcaggggttcgagaccagcctggccaacatggtgaaacccagtctctactaaaaatacaaaaattagctgggcatggtcgtgcacggctgtaatcccagctacttgggaggttgaggcaagagaatcacttgaacctgggaggcagaagttacagtgagccaagatcgagttcactgcactccagcatgggcaacaaagagagactctctcaaaaaagaaaaaaagaaaagaaaaaagaaagggggccgggcgcagtgactcacgcctgtaatcccagcactttgggaggccgaggcgggtggatcacgaggtcacgagatcgagaccatcctggctaacacagtgaaaccccgtctgtactaaaaacacaaaaaattagccgggcatgttggcaggtgcctgtagtcccagctactcgggaggctgaggcaggagaatggcgtgaacccggcaggcggaggttgcagtgagccgagatggcgccactgcctgccagcctgggcgacggagcgagactccatctcaaaacaaacaaacaaacaaaaaaaaaaaaaacaaacaaaaattagccaggcatggtggcacgtgcctgtagtcccagctacttgggaggctgaggcaggagaatcgcttgaacccagacctggaggcagaggttgtagtgagccaagatcgtgccactgcactccagcctgggtgacaaaacaagactctgtctcaaaaaataaaaataaaaataaaaaagggtacttgtagtgaagacagacttggggtagggtggcactaactggcagggggacactcccacaaggcaacaggctacttctgggtgggagagagtaggtccacagtcatctgaatcccagctctggacagtggcctatggctttggtgatgtggcaatgcccccatcacattatctagagaggtgtcccaagggctcaatgttgagggaatatgaaggatcggggtttcctagggacagctggataaactgagaacatacattcaagctgtcttcctgctcaggggcaggataaagcaggagaaagagacatgtttgtacctcaggggctcacaggagggtggggtagttacaactttatctatagagatttaggagcccctctcctcatatgtcctactgtcctgtacaagagaagtatgtcatcctgtctcttctatcagagtgaagaccctggagttatgctgtgcctctctattatacaggagccactccaaggcaggggctttctgtccctgatctgcctgggagctctctgagaggaggaggagagctggaggcgatgttcccccagcacactgaggctttctgaggctaagggctgtgtctccccctcagactggagactccttgggatactccctttgcctttctccaagtacttagcacatggctctgtccacaggggctctcagtctagaaggggcagggcacagattgcatttttggcagacctccaaggcgttctttccaggctcctcctctgccgccgccatgggtacttgggaccataaacagccaagctcatgctctgcctatcagctccaggtcctaataaaggccaccttcctttccag

SEQ ID NO: 1244060 - DNA, 4001 bp, Homo sapiens
tacaaaggacaactgccttgctggtgctgcccttcacccctccaccccagaatcagaccacagattcggagatggcagccccccaaaaaccatttctactccaacttctttgcctctgaattgaggaagctgaggaccccacagtgaggaaagtcttgttgggattacagagtaagctgggaacaaaggcaacactaagccccagactcccccgattgggcgcctgctaagactctcctccacattccatgccatgcttaccccacggagttgtggaacagtggggagacatttataaggcaaggtgcatcctcagccctgccatccccagacctgcctgcagctcggggaacggagtcacagtttcttaggggtatggaccctcaaccccagggccctctaaaccatgataagcccctaggaggccttggtcataaccacctatggagtattttgtgcccaagccctgctaagtcatagttcccaaatactctagcttggcacccccagaaccaccagagcatctgtgaggctcaaccggtggggtcctgggcctgctcaaggggtggctgaaagttatgggcccacaaaccagcaccccatactctcactcttaatcatgcccacagccccgctagagttcacggacctccgcagcctgcccaggggcctaccagggagatagctcctttgctaaagaaagaatggatgtgggctagagcttccttcccaggccagctgcagagccccgtcactggctgtcctccctcatcagaagggagcagcctcttggatcattacccctgacttcctcagcaggcctggggggtttcactccagcccagtcctaactctgttaggaaaaggaagggaaccaccatgtaaatacagccaggagacaggccaggaagccagcaggatacggggaatctcggcacggcctcccacccatttctggccagactgggctaggggacagggaggggcccgcacccaggatagcttgatgccaagctcactttcccaagcaggccttaccggtgaacaggaacagcagggtccagccgagctgttcccagtcaccaccagcaggcctggggatgcctcccgagaagacacccgggtctagactggccctgaacgccaggcccggcaaggagcgctagccttaggaacccgaggcagggagtcctgggagtagccaccgctcatctgctcctgaggagacggtattcaggccccactggcgcatctgcccggccctctgctccttgccctccaccaccccggcaggcgtaccgaccacgcgagcagcaggtgcaagacgcgggggtggcactgagatgacataaaaccacactcgcccccacctcccaagccctgacggcctccgccacggccctcctgccaccccaggctggcgcttccgtcggatacagagatggaggtggaggagcagccagctgcccgcctccctcagaccgaggagcgggaggcggcgccgggaacgtccttcctcgctagtccacggcctccagggagcatgggcaccccaggccggccctcccgccaagggcgcagctccgcagtggccgaggcgggggcccagcctggaggccgcagccccccgccccgcccagccctccggccccgcacagcgctcttgccaggccccggcgcccgcccggcggcggcctggctgtgcggtcccgcccccggccccgccgcgcttacccggggcgctgcagtccgcacacacctccgctcgcggcccctttcgggacatcctcagcggcgacgcggccgcagccctctgggccagcgtggggggcgcgggcggcgggcccgggcggcggcggcggcccctgctgcccggcccggctccggcgaggccccggcgaggctccgcgcgcccggccaaccgtccgccccggggctggcccggaacccgccgtgcccgcctgcccgctcgccctcgggcgccctccgccccgcgccgccccgccgccgctcgcggctcctctctccgccccctgcgcggctcccggccgcttctgcaggaagcggcgcaggccctgcccacagggggaggggccgcacccccgccccgccgcgcgctgccggccgcgccccctagagaaaggaagcccgggcgcgggcaggagggggcgggggcgcttaaaggggccgcggcagatgcccggccccggcgggcagcgtggcctgcggccctggcctccgctgcagcgctcgcctggcccggaggcaatgtgagtcaccctcacagccccctccccttcactttccgcgtggggtggaccgggggacgctgggcccacggacggcgagggtggggattagggaagaaggacttggaggcccaagtcccgctccaggtcaaaggggctgtgccttggggtacccgtctatctctggttggggtgaggtgtgcgtccctgtcccgtaggtgtccacatctgtgtgtccaggggtgtgtgtgtatgtgtcacactcttgctgaatacgcccactgctaacaatatggacgcccaggtgccagaaaggtcaggcagtgtattcccctgcctccggactaaaaatatatctatctctccatgcatccttccatccagagaggagagaatctgggcggtttttaaagacctcccgaggagtgaccactgtgcctgtgtgcactcacatccacttgtcatccgccttacacacacccacggtgtttctgggccaccagaggtgtgtgtgtccagaaagggtgcatataacatagaggggccgtttcaggtgacggcctttcttcctggacttcacacgacgaggcaggcaaaggcaaggcaggtgagggacgtgggtgggctggggggcagggagcctaggtagaggccgcacatgagcgcagcccccgcactgagcatgcgcccccatacgcgtgtgccgcgcgtgtacccaacccccaatccctgcagcagcaaaaggcccgggcactctgcttgtggggagagggtagaggtccccagggccagacctgggggccaggtcagtggtgacaattgaggaggggttctccaagagtcagagactcctgcttgttaagatgggggcagtcctttggcaggggtgctcaagttggtcgattatcccaacggtgccagagcggcagtgatttgtgggtgggcaggctccttccctaggggagacaagtaatgctcatgagtcacaccacccgaaatacatgcaaagctgcctccatcgccttttgctgcggcccagattgacaagtttgtttgaaatcgcgatccatgggctttatttataattgcaccttaaaaaaatcttgcaggcctcccctccctcgacagccagccgctcagctggtggggcttttgcaagcaacgatacctagctggtgtgtaggggggagcaccacctgccgccccgagctgctctctcaccagagtccatgggcttggtggcctcagcgggaagggggtaaggggcggggggagtgagacgggaggagtggccaggcagcccgtgccaggcgctcagtccacgagcggtggccgcccgttcacccccgatcgacccccagctatggaatttcatttattaaatgtcgaggaggctgctggcagccctgccgcttggctgtctttgtttctccgctgtgtgggcgcgtctcgagcacgtggcagctgagagcgcgggccgaagcgcaagcgacctgggttcagtgtctaccgccgcctggcaaaaaaagaacacggccgcccaggggacagttccccacaatcgacaactccccacaatccatcctgaactccccctgtcctcggactcctgggctttgctggggaagaaggatgattcactctgcttacccctccaccccactccccatctcctggttggctcagagactacctgggagtggccctggcgcggacacatcgtccaaactttgtttcccccagccccgtcac

SEQ ID NO: 1244061 - DNA, 4001 bp, Homo sapiens
tcttttactctgaataatacctaaaccctctctagggagagaaatattttattcctaaatgacattattaacgcatttttctacagatattaaagtactggagatatgctgtttcctgcttatcaggaaattaaaatccctttcatttatgtagtttgattttttatagcgctttcacatatattcacttgaacgtatacacgacacaaacatataacaaatttagacttatcaggcatacaagatgaccctcagcctgaacttattcaaacttaacttactcgatttcacatcgtcttgatgctaacaaaattaagcatgagcataatgaaatcggtatcactgccagttctcaatgaacaaaaagaaaaccaaattcgcccatttcgcaaaggaaaagtactcccaatcagacaatcgcaaaaaaaagaacaaaatctaaaccatacattcacgtacatcttttcaactcagagctccaaacgcagccgccaaccacacaactgcccacaatcacagcggtagcgcctactcttaattttgaagctagagacttaaggaaacacacacacacacaaaacagttctcaagtttgacaaagtgggggaaaagtcattttaagtaaagacaacgagttaatcaggaggcgatgagcccagtccttccgccccgctttcccgcttccagccctcgaacgaaccctcctctaacccccgggaggcaggagttccagcggggagatgcgggaagcctcagacgagcccgcacgccgccggagacgcagggatcgaggtcggggagacaaagagcagcccgcgaagagcccgggcggcgaggggcggcccggctccgccctgcgcccctaaccgcccgggtagttgtcggcaccgccggggcgccgccgagtgcgcgccgcttctgtccgggctccccgaccgtcgcccgacacctccgcggcccaggacacccccgagccgtttccctcccgatttgggagccgcgcgcctggggacaaagagggagggtgcgccggggacagtggcaggacgcgggccggcgacgcccctccggactcggcgggaacccctcggcggcgcccccctccttctcccgctctggccgcgctcctccccggacctccggaggttctcctcggcccctccccgggctccccaagagttctcccgcctccccctgggaccccgcccctggcccgcttctcctcagccggccctgcggccgcccctcacccggcggcgggttcccccggagccgcctcctccgccgggcctcggcccgtcccgccggtcgcggcctcatgtgccccgcgtcgccatcgccttcaccctcgcctctcctccacctcctccgccgctgccgccttcgcctcagtctccagccgaggcagaagccgctcccgccgctgccgccgccgccgccgcctcccgctcccgccgccgcgacccgcgggaaggcgcctgcgcactgcgcgctgcggtgggggcgggggcgtcccgccgcggcccgggagcggggggcgcgcggcacgtggcgctcgagtgggaggggggcgccccagaacgcgcgggaagcgacgcgagcgccaactttccgcggtcgagtcctcgccgctctctcggatagtccgggacgcggcggaggcgcggcgcgcgtgggagtcacccgcgtggagtctggaccccgggtgggcgcagacttcgctccggacagttcattcttccaagctgattttcgggcgagagtcccccgccagccgcgcctcagtttgagcgggccgctaacggcgccgtgggttctcgccttacctgggtatcctgggttggtttagcgggcccagagttgtcttctgcgcgctccgccgaggccttggtccattgtagcacgggatgctaatgtctcctcccaggttctgctctacaattcctcgaggatctggcgggccctgcgtggatctagctagagtcggggctcttagcagtgctctagatacttttcaggtcctgaacttctcggattagcaagaccctaataggctatttcctcttaactctttgcatcccagcaggatcccattcagaggacttgggaaaaattttcatgcataggaatccccagttttaaaatgcccagtaggaaaccgaaaattctccaaatgctttaagtagagtaagactttgggtaataaaggaaggctcagtaaagagatgggcgacctctggaatgatctcatctgagcatcagaatgccgatggacaggcttttattattttgcccttttgaccagaggggaaattaagcgctaacaagtgaggttacttgctgcaagtcaaactcccccacccaaagccaagccctaaggggtagccccagagtggaaatcttgaaggctaggcatctaatgcactgaccagttttgtgtggccagtatgttttccaaaaatatgaattagttaccaaaatattaaaatccagatttctggcctccctaaaaagtcaaaagctgcttactttgagcttctcttttcacatggcagctcctcttgagtcaccttgtccgggtaggcaatgtccccactcagctgcttaaatcatttcatgacctgcttggcctcggagcatttaagtacttctccctgtgattgctgtagtctgtccccacgccttatcacattgcctctctacagatgtatttaaaatgacaagtgtgggatgggcgcggtggctcacgcctgtaattccagcactttgggaggcctaggcaggcggattgcttgagccctggggttccagaccagcctggacaatatggcaaaacccccatctctacaaaaaatacaaaaattagccgggtgtggtgacgcgcacctgtgatcctagctactccaagcatgaggtgggaggatcgcttgagcccgggaggtcaaggctgcagtaagctgagatagcgccactgcactccagcctgagcgacagagtgagaccctgtctcaaaaaaataagtgaaaaaaataaaatgaccagggtgaaaactctgaaaatacctggaaataataaatagcatgtaactaaaataacacaggaaacaacatcattgtacctgttgaataaaatattaaaattctcacagcctgcaactgtaaactagtacaaataacttttttgttttgttttgttttgagggagagtctcactctgtcgccaggctggagtgcagtgggcgccatctaggctcactgcaagctccacctccccggttcaagcaattctcctgcctcagcctcccgagtagctgggactacaggcgcacgcaaccacgcccaactaatttttgtatttttagtagagacagggtttcaccatgttggccaggatggtctcgatctcctgaccttgtgatccgcctgcctcggcctcccaaagtgctgggattacaggcatgagccaccgtgcctggcctaaatcactttgttgttgtttttgcaacagagtctcactctgtcgcccacgctggagtgcagtggggtgatctcggctcactgcgatgtccgcctcccaggttcaaaagattctactacctcagcctccggagtagctgggaatacaggtgcccgccatcatgcctggctaatttttgtatttttagtagaaagggggtttcaccatgttggccaggctggtctcaaatcctgacctcaagtgatctgcccgccttggcctcccaaagagctgggattacagacatgagccaccgtgcccagcggactttgcaaaactggcaatatctactgttgaggctcagaaaatgatttcccagggcgtggtggctgtagtcccagctactcaggaaactgcagtgggctatgattatgccactacactccagcctggaagacagagcgagaccccatctctttaaaaaagaaagaaagaaaacaatatcccaaagtatggagctttggcgtgctgagtgctttgaacta

SEQ ID NO: 1244062 - DNA, 4001 bp, Homo sapiens
aaaggctaaaactcaattttacctgcatgaattgattacagagaaaattaccaggtcctttgctcctttttaagagaactgtggtagaactttttaagagaactgtttctggtagaaaacaattcttaagtcacacaacctcaaaagttaaaagtgctggcttttgaagaggttgtttgaaatgctttggaaaaatgcacaacagtttaagtagtaaataatattaagccattacaaatcaggacaaatattaacagaccttccatacaacttctatgtatctcttcaatatgccctttgcctacagcactctgggcacaaaaatctggggaaaactaagatctgtttattggagctttttaccttctacccagaaaagttagttcgtgtttaattctgacattacacagtacttaagacattcaaagcaactgcagtgatacaactctatgctaagttttttttaaatcagtaaacttaacccacaactcacaatattttaatcaggagctctggaagtaagggtatttttctgtttttttccataccctctgaggttgaaatttttttgctcttttactctgaataatacctaaaccctctctagggagagaaatattttattcctaaatgacattattaacgcatttttctacagatattaaagtactggagatatgctgtttcctgcttatcaggaaattaaaatccctttcatttatgtagtttgattttttatagcgctttcacatatattcacttgaacgtatacacgacacaaacatataacaaatttagacttatcaggcatacaagatgaccctcagcctgaacttattcaaacttaacttactcgatttcacatcgtcttgatgctaacaaaattaagcatgagcataatgaaatcggtatcactgccagttctcaatgaacaaaaagaaaaccaaattcgcccatttcgcaaaggaaaagtactcccaatcagacaatcgcaaaaaaaagaacaaaatctaaaccatacattcacgtacatcttttcaactcagagctccaaacgcagccgccaaccacacaactgcccacaatcacagcggtagcgcctactcttaattttgaagctagagacttaaggaaacacacacacacacaaaacagttctcaagtttgacaaagtgggggaaaagtcattttaagtaaagacaacgagttaatcaggaggcgatgagcccagtccttccgccccgctttcccgcttccagccctcgaacgaaccctcctctaacccccgggaggcaggagttccagcggggagatgcgggaagcctcagacgagcccgcacgccgccggagacgcagggatcgaggtcggggagacaaagagcagcccgcgaagagcccgggcggcgaggggcggcccggctccgccctgcgcccctaaccgcccgggtagttgtcggcaccgccggggcgccgccgagtgcgcgccgcttctgtccgggctccccgaccgtcgcccgacacctccgcggcccaggacacccccgagccgtttccctcccgatttgggagccgcgcgcctggggacaaagagggagggtgcgccggggacagtggcaggacgcgggccggcgacgcccctccggactcggcgggaacccctcggcggcgcccccctccttctcccgctctggccgcgctcctccccggacctccggaggttctcctcggcccctccccgggctccccaagagttctcccgcctccccctgggaccccgcccctggcccgcttctcctcagccggccctgcggccgcccctcacccggcggcgggttcccccggagccgcctcctccgccgggcctcggcccgtcccgccggtcgcggcctcatgtgccccgcgtcgccatcgccttcaccctcgcctctcctccacctcctccgccgctgccgccttcgcctcagtctccagccgaggcagaagccgctcccgccgctgccgccgccgccgccgcctcccgctcccgccgccgcgacccgcgggaaggcgcctgcgcactgcgcgctgcggtgggggcgggggcgtcccgccgcggcccgggagcggggggcgcgcggcacgtggcgctcgagtgggaggggggcgccccagaacgcgcgggaagcgacgcgagcgccaactttccgcggtcgagtcctcgccgctctctcggatagtccgggacgcggcggaggcgcggcgcgcgtgggagtcacccgcgtggagtctggaccccgggtgggcgcagacttcgctccggacagttcattcttccaagctgattttcgggcgagagtcccccgccagccgcgcctcagtttgagcgggccgctaacggcgccgtgggttctcgccttacctgggtatcctgggttggtttagcgggcccagagttgtcttctgcgcgctccgccgaggccttggtccattgtagcacgggatgctaatgtctcctcccaggttctgctctacaattcctcgaggatctggcgggccctgcgtggatctagctagagtcggggctcttagcagtgctctagatacttttcaggtcctgaacttctcggattagcaagaccctaataggctatttcctcttaactctttgcatcccagcaggatcccattcagaggacttgggaaaaattttcatgcataggaatccccagttttaaaatgcccagtaggaaaccgaaaattctccaaatgctttaagtagagtaagactttgggtaataaaggaaggctcagtaaagagatgggcgacctctggaatgatctcatctgagcatcagaatgccgatggacaggcttttattattttgcccttttgaccagaggggaaattaagcgctaacaagtgaggttacttgctgcaagtcaaactcccccacccaaagccaagccctaaggggtagccccagagtggaaatcttgaaggctaggcatctaatgcactgaccagttttgtgtggccagtatgttttccaaaaatatgaattagttaccaaaatattaaaatccagatttctggcctccctaaaaagtcaaaagctgcttactttgagcttctcttttcacatggcagctcctcttgagtcaccttgtccgggtaggcaatgtccccactcagctgcttaaatcatttcatgacctgcttggcctcggagcatttaagtacttctccctgtgattgctgtagtctgtccccacgccttatcacattgcctctctacagatgtatttaaaatgacaagtgtgggatgggcgcggtggctcacgcctgtaattccagcactttgggaggcctaggcaggcggattgcttgagccctggggttccagaccagcctggacaatatggcaaaacccccatctctacaaaaaatacaaaaattagccgggtgtggtgacgcgcacctgtgatcctagctactccaagcatgaggtgggaggatcgcttgagcccgggaggtcaaggctgcagtaagctgagatagcgccactgcactccagcctgagcgacagagtgagaccctgtctcaaaaaaataagtgaaaaaaataaaatgaccagggtgaaaactctgaaaatacctggaaataataaatagcatgtaactaaaataacacaggaaacaacatcattgtacctgttgaataaaatattaaaattctcacagcctgcaactgtaaactagtacaaataacttttttgttttgttttgttttgagggagagtctcactctgtcgccaggctggagtgcagtgggcgccatctaggctcactgcaagctccacctccccggttcaagcaattctcctgcctcagcctcccgagtagctgggactacaggcgcacgcaaccacgcccaactaatttttgtatttttagtagagacagggtttcaccatgttggccaggatggtctcgatctcctgaccttgtgatccgcctgcctc

SEQ ID NO: 1244063 - DNA, 4001 bp, Homo sapiens
acctgcctgagttcattctccgcccccagcccggcctgccccaggtgccgccggcagccactgggaggcagtacgaggcaagtgcgatgccgcccgcgggccgtccccacaacgcgtctcctgccggggcaggtcccgcgacagctctggtggaagcagcttccggcttctgcggtgcgggcggaggtggcggggtccggccctcgccgtccagtccgcgcgaggcggtgcccgcccctagatggccagatctcggcggccggtggccggtgacgccttgccgcggccgctgccgcactcgcggaggctggccggcgccgggtgcgcataggccggcggggcgcacggctcggggccggggcgccgggagggcagggccggtggcggaggtggcggcggcggcggcgggagcagcttctgcgcctcttcgtgtgcacggttgcagcggttgtcacgctccccggcgcgcgggcggcccttccagagcaggtggcccagctcggctacgctgagcagcgccgacagcagccccaccgcgaaatagaagagcacgaagacggtcttctcggtgggccggctcacgaagcagtcgaccgtgtgcgggcagggcggaccggcgcacgcgaagtgcggggccacgcggaagccgtagagcagcgcctggccgcccaggaaggtcagctcggccagcaggcgcagcgccacgctcagcaggtagcagcggcgcgcgcggcgggcgcgcagggcgcacggcgcgcactgggcctcgggcagtccgggggcgcactgcgccgccgcctcagcgccgcccgcctccttgcctgcccggtgcatggagtagacgacgaacagcaccgggggcgccgagagcagcaggatgtggaagagccagaagcggtagtgggagaccgggaaggcgcggtcgtagcaggtctggcgacagcccggctgcagcgtgttgcacacgaactcctcttgctcgtcctcgaacacggcgccgcccaccgtggccagcaccaggatgcggaagatcagcatgaccaccagccagaggcggcccacgagcggcgactgcagctgcacggcgtccagcagcgagcccaggaacgcccactcccccatggcgctggggacgcggggcggggagtcaggggatggggcaagtcagggacccctgccccttccaagcctatcggggtggggtccgttggaccttctctgacttcagggtgagtcgtgaggtaggagaggcccgggtttagcgatgagaccagtatgaaacggagggccacgggagggcccgaggggagcaggcgacgctcagctatgggttaccttctctttgggaccgatgggtgctggggaggatcccccatttgcattttagccgcaccccctgagccgtctccgttcgaccctgggatcctccagatcccagattcttaggaaggaccttggagatcagctggaccagcccctgacttgcctggtttcggaagcggaaacccagcggtgcccttagctgtcaaggatgctgtgggaagagtggagcctcgaacccgagacgctagacccaatttggtgcccatgggaggagtgggagtggcagaggcagcgagaccactcctttcttggcccaccatttctctcaccatttttactgcagtgaactcctctcagggtggggggctggtacagaggcaactccgctttcataactctcacagggtcctttgtcggaggtgtccctgccctcctaccccagcgtggtgggagtgcgacgccaggcttctccctcctccctggcctcctgtgcctccagcctccacatctcctgagatcctccccaccccacacttacacaggtccccacacgcccctggtgcccctaaaccgccacccaaccccactcaccctggggccgggactggggtgtcagagctgagccagggaccttgggaggtggctgggaccggcgcctcctgctccctctttcattttccctttcggatttggccaggatggaggacaggacaggatggctgagaggggctagcgctcccccttctcttaaaggaacagggtgaccctgctggctggctccgcccttgggaacaggcacggaccacgccccttgctgggctctgtggccctcactctttagctaaatttccatctggaaatgggggaggggggtaaccagagccacatcctttatcgaggaagctgggggattcctagaagcccttcccagacagaccctcagtctggagcctagatccactacgcactaaccatgccctgtgaagatggtcttcggggacagagggaggtttggtgctggagtttaaggggcagcaaacatctaacagcttctggttccagctctgccaccgctcaccttggacaaatcattcggcggtactgagccaggctttcctgccttgtcaacaaaggcggccagtccagctgacccccaagtttccttccagctttacatcttttttggaacggggtctctctacatagcccaggtcgatcttgaactcctggcttcaagtgatcctcacaccttagcctcctgagtagctgggattctctacttcttaatattgaattcccaaccatattacagagaaccaaaaaaacccttgtgcctgcaaaaaaaaaaaaaaaaaaaaaaatcccatatggaaaaccattaaaatatcccaagtgcctggctttgatagttaaataaaatctttggtttccttcccacttttctgttatttccagctttactataatgaacatgttatttatttatttatttttaatttgtttgttttgagatggagtctagctctgtcgcccaggctggagtgcagtggcatgatcttggctgaatgcaacctccgcctcccgggttcaagcgattctcctgcctcagcctccccagtagctgggattacaggtgtgcgccaccacgcccggctaatttttgtatttttagtagaggtggggtttcgccatgttgaccaggctgatctcgaactcttgacctcaaacaatccgcctatctcagcctcccaaagtgccgggattacaggcgtgagctaccacacccggcctaacatgttattttattatttatttatttatttatttattgagacagagttttgctcttgttgcccaggctggagtgcagtggtgtgatctcagctcaccgcaacctcctcctcccgggttcaagcgattctcctgcctcagcctcctgaatagctgggattacaggcatgtgccaccatgcccagctaattttgtatttttaatagagacaggatctctccatgttggtcaggctggtctcgaaatcctgacctcaggtgatccacctgcctcggcctcccaaagtgctgggattacaggcttgagtcaccgcgcccggcctcatgttattttataatgtgaaaaataggactttttccccccagaaggctctgaattgagagttccctcctactgccctgggtggcgggggaagctgttttatggagaagggagtaagggtgaccgacggtgatctgagtggtcagggaggggacactccaggctgagatgtttggttgtctgctctgccttcctaggggtccgcctgagtgcatagcaaaacccgcttcacctatgcacctgctgggccagtccccgtgtggaaccccgttagctccatatgccaatgagctcattcgattctctgtcaatggtggcatgagggcactatttacaccaggggaaactgagactcagagggtctaagccacttgcctgctgtcgcgcagccggtaaatagcagatccaggcctatgcgaggcccaactagttcttgagcccaagctcttgagcctttcatggaactgtcctccatccagcctggctgggcttcccaggtgctgtcccagggcctgacagtccccaggaggggttgcctctatgccagccttgtgtggggctggtgg

SEQ ID NO: 1244064 - DNA, 4001 bp, Homo sapiens
agcatagcattcaagatactattagaagcaatgccgacctgtccatcctgatatcccatctccttaacttcaactaagcaacctcaactaaaggcacataaaaccagcggcttcgcaaacatgtgccatctccgcactggctcttcagttttactatgtagctcctcctctcatctacctgtggatatcctatctttagacgtcaactcgaatcctggctaacacggtgaaaccccgtctctactaaaaatatttttaaaaattagccgggtgttgtggtacgcgcctgtggtcccagctactcgggaggctgaggcaggagaatggtgtgaacccgggaggctgagcttacagtgagccgagatcgcgccactgcactccagcctggcgacagagcaagactccacctcaaaaaaaaaaaaaaaaaaaaaagtcaactcgaatacaaggtctacatgaattatttcctcatcacccaggttggaaaaccgctccttcttttgtatttttataatagtggctaacacttatataatctactattaccgatatgttaaatactatacatataataaggtgttgaatcttttttttttttttttttttgagacggagttttgctttcgtcatccaggctggaacacaatggtgcgatctcggctcactgcaacctccgcctcccagatacaggcgattctcttgcctcagcctcccgagtagctgggattacaggcgtgtgccaccatgcccggctaatttttgtatttttagtagagacagggtttcaccatgttggccaggctggtgtccaactcctgacctccagtgatccacccgccttggcctcccaaagtgctgagattacaggcgtgggccaccgcgccggcacgtgtttaatctttgcaacaaccttttgatcgacgaggaaatactaacaagggacagctctgtggtttctgctatcgaaagtttggtggtttttcactatcaaattctgacttccattaccatcatctacgtacaaatccagttccaactcccaccccaacccaggccatgagctctaatggaggatatatatcagggtcatttgcacctttgttgccaaaactcaacgtagtaccctgaaaatagcagatattttaaaaatgacctgacgaattcagatccccgtctattgcaccgtctatacactaaaccgcgctcttgcacctttcaagtcttccttagtggtgtgttccctacctccctggcttatcaaaggaggtccccaaaacccagttccccaaccaactgaatcctgcaaataacagctcctcaggacccgagacagaccgcttctgggtgctgttgaaaagcagatgggttgagagttggagcatatattcagagactgagtatccgaaacggactattcagaccagccttgctagaagcagaactctgaatacgctgattttatctacatcaaaggctccaaaccggaaaacacaaatattaactagaaagcattatataacattttatttaccgtcttttccggtagacggtaagctccacaagggcggggctcaataaacgtttacgagtggcttaaatgaaaggacgtgcgtgggcacaccgcggggactaatcgtgttaggcccttctccaaggcctatgatccccaacggcaactcgccacgctcctgaagctgaacaccgcgcagggcctaaggtcggacaccctccggcttaggttcacgacacacccattttcccctccctccgccagggccggctcgggcgccggttccagcctcgcgcgccagcccctgtcggccccggcctgcaccttcatccccaggacgtcccgatagaaacgcgccgtctggaagcggtttcccactttgaatacgaagtgcagagctctgcgagcagccatgattcccgccgcacgcagccgtcacgcgcaccgtacagcccagtccacgaagggcgccacgggccgtgacgtcactagccgccgacggcgcgctttcgtgacgcagcccgggtctcagggaacatggcggcgctggtgagacccgcgaggtttgtcgtgcgaccgttgctgcaggtggtccaggcttgggaccttgacgcgaggcgctgggtccgggcgctgcggcggagcccagtgaaagtggtgtttccttccggagaggtggtggaacagaagcgcgctcctgggaagcagccccgcaaggcaccatctgaggccagtgcccaggagcaacgagagaaacaaccgctcgaggagtccgcatcccgcgctcccagcacctgggaagagtctgggcttcgctacgataaagcttatcccggggacaggaggctgaggtgatgtggttcttgagcctgtcgaatgttctcgtttcccttcccgtcgcacagcggaaccttaacctccttccgatggaggacttcttccagtacagcccgctggtttttgtattatgcacagagggccgaataagcgtctttggaattagcttctgtttctccttagctctttgttgttgtttttgtttcaccatgttagccaggctgatctggaactcctgacctcaggtgatccgcccgcctcggcctcccaatgtgctgggattacaggcgtgagccaccgcgcccggccctctccgtagctctttatttctgttacaactaagcgtgtctcagtaacaaggatgttgatagttacctgttttttttttttatttccatctacagcagtgtaatgacaatagtaaagtccaggccatttcgggaaaaacaagggaagatcctgctggaaggtcgcaggctcatttcagacgctctcaaggctggagctgtgccaaaaatgttcttctttagccgtctagaatacctaaaggagttgccagtcgataagctgaaaggtgtcagcctcattaaggtgaaatttgaggatatcaaggattggtccgacctcgtaacgccacaaggaataatgggttagtgattacccagtgtatctttttttttttttgtcttgttctgtcacccaggctggagtgcaatggcgcgatctcggcccactgcaacctccgcctctcgggttcaagggattctcttgcctcagcctccgcagtagctgggattacaggcgtctgccaccatgcccgggtgatttttgtatttttagtagaggtggggtttcaccatgttggccaggctgacgtcgaacttgtgacctcaggtgatcctcctgcctcggcctcccaaagtgctgggattacaggcgtgagccaccatgcctggccttacacagtgtatcttaaggtgtggagacctaggattaatttctcatacttgtcttaggacagcagcattgaaatgaaattcaaaatgttacaattagaaaaatataattctcaaacctgtgtatcttagagtattttcaatggaaattgaaacccgtttttcactatcatttgtgttgtggctctttatggtctctaggaagaaccactattcctcaaaccttctattttttagattacttcttcaactttctatgtcagattaaaaattaagaaagcgtttactgaaagattgagcccttcatttttgcaaaacctctgccaatgtggtgataactgtcaataaactgcttattccagaagcagatctaagaagcgaggtacaagccacaatttactgccccgtttagcccaataaacagagaaccttgtcttctagtctgttccttcatttggctgaatctgacttaaccttatgtaactccgatgttgattagcagttacaaagtctttggtctaaatatgagaagataagtttttcatacgtttttgacatgggagttttaagatatgaaaactgaatccttgaactgctgagagaggagattctggggaaccatctcttgtctctgtaacccagtgagtcacagggatctgtgcctctgcactcagagctcttagatcctaggatgggga

SEQ ID NO: 1244065 - DNA, 4001 bp, Homo sapiens
tggggattggaggggtttagaattccaagaccatgaacagggactcaccctgcccatggaacgaaggaggaagacagccattccttttttttttttttttttttgagacagatcctcactctactgcccagactggagtgcaatggcgtgatcttggctcactgcaacctccacctccaggttcaagcaattctcctgcctcagcctcctgagcaactggcattacaggcacacaccaccatgcccagataatttttgtattttttagtacagacggggtttcaccacgttggccaggccggacttgaactcctgaccttgtgatctgcccacctcagcctcccaaagtgttggggttacaggcgtgagctaccgtgcccagtctgagccattccttaagctactttcgttattcagacaagtggaactggggttccttcccatcatccttttatactgcccatagcccagtatccaaatggaaacttggaaagaggacgaaggtctaatcttcttggatagaataaagcaagctaccagcatgcccaacgatagaggatagttaaagacattacaataaacccttaaagcccttaaatattataccatggatctacatttactaacatggacgaatgttgctcaacttctccgagactcagtttactcatctgtaaaaggggattaacaagagaacctcagtctatagggttgctgagaacacagaaggagaaaatatgaggaacgggggcacctggcactcaacccagtgcagagcaagtgctccatagtgatgtcagctgtgttattagtgtattttgttatgaagaaagcagattacaaaataatatttatagtatgtgcctgtgtttgtttaaaaaaaaaaactgtatgtaggcctggtacagtggctcatgcctataatctcagcactttgggaggccgaggcgggtagatcacttgaggtcaggagttcaagaccagcctggccaacatggtgaaaccccatctctactaaaatacaaaaattagccgggtggtggcacgtacctgtaatcccagctactcaggaggctgaggcaggaaaatcacttgaacccgggaggcagaggttgcagtgagccaagatctcaccactgcacttcagcctgggcgacagagcgagaccccatctcaaaaaacaaacaaacaaacaaacaaaaaactgtatgcaaacaatggtagaaaaatgtctggaagtataagcccccaaatgtgaatgaggatgatctgcagctgttggaagtagagtgatttgtagtttgcatttcacttctttgaattgtattttaaaaaaacaattagcgttcaacatttttgtaatgaaaggaaaaaggaaacagaagggaaaggaaaggaaaggaaaaagaaaaatggatttgctcaacctaaatactcaaagctgggagaatactgaagacaaacagaaggatatgtgcagcaattgtaaatgctatttgcagaactcacattgacgtggggaaatgcttataatatgatgcggggctggttggggggaccaggacacaacatgttttatgcttcctaatatcagctgttgtaaaaaaaaacaaatgcatagagaaaaggtttgaggacaatatgccaaaatatgaacagtgattacctttgaatgctaggattatggcggctcattattttcttaatactgttttctcttttccaaattgcttacatgaggcctaaattgcttctttaaaaaaaaatcaggaaatacaactgataataataataataatgaactgctcttacttgcttgatggaaaccagcaggaccagagtgaggaagggcctcccaggggcccagagagagcacttcctgtggaaggagagaggactggtcccccagggggcagggatgcccatgggcagctcgtggacgccaggcaggagtcccgcgcttcctctcccaggccctgccctgctcgatcccagcttcatcttcctcgtgcaccttcacaagtaggggtacatctctctagccgtccaagatgcaccgcaggcagcctcctcttgcattcctcttggtccacagaggaaatgtttgcacaaatcctctccacgctgcgccgagagtgtctgaggcggtctagagcaatctacggagtcttcagagttccttctcggccctggctcatcccccgcccctgcccccccaaaagcagggagatttttcccagaccttccctaagtcagctgtgctttctgggacttccttgacaggctgaggagaaagaacaaggcggtcagcgggctccaccctgaaggttctgctcaatgcacgaagctggctgagacaggctggggttcgagctacagaggaatggctggcagaaggcgatggggctcgagccagtttagaggcaggtgtctttttgaggcagggtatttctttctaaggcattaagcttgtccaggctgggctgaggctaaccacaaaggcaaaatctcctctgggtcctgtttatgcagagactgcaggagaggtggttgctcagctcaggagagaacagctcccagcccaggccatgaagcaaaaacccaatcagcggcgtaggttatgcctacacaatagcaaaacagtgtgttgaaaagtgcaacattcactcatcttgaatgcccacttgttctaagcacatgtggctcagcccacctgacagacccttttatggaattgatgatacatcacttactaaccagcacaggagtaggctgtccccacaactcacattgacaacgtcttttaacccaccatcctatttcgcacatcctgacaataaccccatgaggatacgatgaattctccatttgacagctgagaaacattgaggctcagagaggttggatggcttgcccaaagccacacagcaagtaaacagcagaaccggataggcaggtcttctgaccagagttgcttgagcacaggtacttgggagggtgccctgtcctgcccctgccctctccggtgagttcttagcaggctcatcgccatgcctcccaaaggctctgcttggaacttcttactccacctctcccaggccagctcccagcgtccctgcaatgtctcccagcctcccaaattggaggcccaggtggaagatgtcttgattggttggaacagtgagtcagcaagaggcaagaagaacatgttttcacttcgtttttggttttgtttttgtgttattttttccttccctcttcaagtcaaacataggaactcatcctgggtaacttttcaactgaatgaattctgaacagttgggaaaagcagccatgcttttcttaatagacatccctaaaaatcttaaaaactccatgtgacaagattttagaccttaacaatgaaaagctcaactagaacaaagaccctagaaatggactcagagtggtgtcacctctggaattgacgtggtcatctctctgggatggcagagagcaggatggagtgacccagagggagaaagtacccaagggatggactttggtcattgaatgtggctgcaactccgttctgtgagtgctcattaaagatcatcttccaagttgcatgctggaaaatggtctgtctttaaagaaaatacctgctttgcaagaatattccatctcatctcttgcaactttttctcaaaaacatcctttatttctgaagggatgaaagttgggggccacacacgacttccccacccattggctggttgccctctagcgatggaacttagtaaggcctcttcccttgagactggacaccccaccaggccagtgagagcacaggacacaggtgcccagactcggccagcggcaaagtatagatggagtgatattaacccagtatcactgtctagcccaggcacatagattccagattctgtctggggggtattcaggaggtgtctaacacatcatcaagagcctgtgtgttttcaggatgctctgcagaatct

SEQ ID NO: 1244066 - DNA, 4001 bp, Homo sapiens
gactatgaagggagaattttcgtggggagggcgtgttggagcttagtgttggacatggtaggtttgctatgcctaggtgacatccaagtggaaataccgaataggcaatcgtatatgtaggattctggagtccaggagaaagtggattgaagttgtgatttggaagttatcagtgtatgaaatggcaagatctttcatgttcattgtgggagtggccgtggagtcacttggctgcacaggggtgaagctcagggacaagtctgggctggagactcagcgtgtgtttggcaaccgaagccacgggagtgactacgataggccgggggagcgtgagtctctcggctgccgagaacagagatgacacatcttctcaccttcgttttttatttcccttaagcgcctgtcgtcatcacacaaaacgccctacgtcgacgctgccaaatattgcttttttattcctcacagctcctcccgtctttccgagactgcggacagagggagctcaacgccattccctgccgggggcggccctcgccgcggcgacgtcacggaagaggcgggatacggaggcggccgcggcgcgggctgcaggactgaccccgggctgcgcggccccaccccgggcggtccgctccgttcccgccggtccccgcagccgccgtcttaggccagctggagcaggccgcgctcggccagcaggctctgggtgcggttgtagacatcctccaaggtgccggcggcccggaccagcgcggcccgcgcctccgcctcggtggctccgggacacgccagctccagcaggcggcggcgacccgggaaggcgaggaaggcgaggcgggcggtctgtcggaccagccaggggtgatgcggacccagggccgcacggtaggcgtcgctgcactgcacgcccgcgtccgggcctcccagcgcgccggtcgccacccggtggaggcagagctgggaccagcgcagcgcgcggtgcagcaggagcagcgtgcgagagcccgagctccgggtcgggtcccggggggccgcccccggctgctccagcagtcccgccctccgctcccacgccgccatggccaccagcgaccagtagtgctccgcgtccgggccgtgcacccgagcctccaggtctgtcaccttggtgaaggcctccctagtggcgaaggcgaagacggagccgaggggagtcaggaacctgcgggcgagacgatttgagagaatggagatggagccgccaaggaggcggggaccggctggggggcgggaggccactcactcgacgagtgccctccatcccgccaggtacggcgacagccccacatccccttcgggtttcagactggcgtggaaccgcctcatcatgcggcccagcatcccccgagggcccagacacggaggctgtttcctctccggggcctccagggttcccgactcctgccggacctggtggggagacacgatgggaagaggtgggagcagattctgccctgaagaaattgttccgaaggtttagctggcggctcttctgctgtgcgctcagcttccgacgggagagggtagaccgggggaggacccgccctttgccggaccctcagcctggctccacgtccccctgttctggtccctcctggagcgcccgcgcccaatcctgcgcctagcgtacctggaagggcgccgtttcccctggaacgcagggctgcgccctgggtccgcagcccgagcgggcgcctgggtagaggagaagcggagcggtgagggctcgagaaagaggcttgagtcgtgagggcctggattccgggcttcctcccggagcaagtgagggaaggggcagctcacctaggctccgaacactgagataaagcagcagcagcgcgaagatagcgagaggaattgagtggctgaaccagtgccgcagggctgggggccgcgccgccactcccatgcctgctgctgggaccgccgccccctcaccagcgcctagccagtccgtgtccctccgcctccaggaggggacagaagcccgtggtgccctgaggcgcaaaggattaataattaacctactaaggccccttcccctgtgcccttcgccccaaagggcagctaccctgggtgcgaggaactgggtgaagggaatttgggggattcgacagcagtgacagatcagtgcatttcccttccctgtagggccagctgtagcaagaggcactctgagtattgggaagagaggcagggcccagaacagctcccctactgagcagtggtgtgggccctaaattcactctgggcttgagttccctccactgtaaattgaggataataataggtactttgcaagcctcatgtgaggattaaatgataacgtatgtgaaaacactaaatggaaaagctgaccacaattgccctataaatcttattaagttcaagcattgtccggctctgggatccagggaacacccacttctctctcgctctctttttttttttgtttgttttttgtttttttgttttttgagacaaagtctcgctctgtcgcccaggctggaaagtgccggctaatttttacatttttagtagagacagggtttcaccatactggacaggctggtctcgaactcctgaccttgtgatccgcccaacttggcctcccaaagtgctgggattacaggcgtaaaccaccgcgcccagccgggaacacccacttctaaattctctatcttattcccaggggactttgtcttgacctggatacatgacctcttgcaatcatatacgtacgtcaggctttatccttttgcatttttgtggtttaattttcaaaactccagattggctcttcaatcattcattgcaccaacttttattaagtacttccgcacgtactaggcttcaagaatacaaaagtgccttcacagagctcaaggtccactgggggagaatttatcctctgtctcccccactggaatgtgacctctgatgacaggggccttgttattcttgcttacagcaagtggaatattgcttaagccaaaacatattattgctaaataggtattgaataaacaaaggagtgtgtatgaggggcaggtaaatctggggttgtggcccctaacaaatttagccaggcatttttaggccaggcacggtggctcacgcctgtaatcccagcactttgggaggccgaggtgggcggatcacctgaggtcagcctggctaacatggcaacaccccgtctctactaaaaatatacaaattagccgggcgtggtggcgaacgcctataatcccagctactcgggaggttaagggaagagaatcgcttgaacccgggaggcagaggttgcagtgagccgagatggcgtcactgcactccaacctgggcaacagagtgagacttcgtctcaaaacaaacaaacaaacaaacaaacaaaaaacatacttagccagattttctcgctttttgttttgcaaattaggagtccatctggtggtcacagggggaaaggcattccaggaaaggatataaggatacagaaagcaatggaagaaacagcatgatcttttcttaggggttcttagtctcctgtccccaaacttcttagagttattcctgttggaccgggcgcggtggctcatgcctgtaatcccagcactttgggaggccgaggcaggcggatcacaaggtcaagagatagagaccatcctggccaacacggtgaaacccggtctctactaaaaatacaaaaattagcggggcggcgtcttggcgcgcgcctgtagtcccagctactcgggaggctgaggcaggagaatcgcttgaacccaggaggtggaggtagcagtgagccgagatcgcgccactgcgatgccgccactgggcgacagagtgagacttcgactcaaaaaataaaaataaaaaagaattatttctgtttgtatatgtcttcttctaaggtagggaggagtgtcccggattctcaaggtgttagggccctgagc

SEQ ID NO: 1244067 - DNA, 4001 bp, Homo sapiens
atattatcataagtttttattccagtattatttccttatacttctgaattaacctagacaaaccttcttcaaaaatgaagaccaacatcgaaaacaaatgtaacttctcagaggttaaaaaaaataacagttgctcactgtcttaaaattagagccttgaaaagcaaatactattagcacaattcctctctctgaaggatttttaacatgttccaatttataaaataacttctaggatagaaggtagtcaaaaaacaatctaactcaagaaagaaaaagaagttatgctgcacagaccaacaatgtccaagctcagaagaaaacagacacaaccaaggttttatgagcctaaaagatgttcatttatgaaacactaagaaccaactactatagctccatgttctgtttgttgcttcggcaccctaacccaacattgagtcttctagcaacacattcaaaatttaaaaacttcttccagcccaagtttcaatccagtttaagttacaggatggccttcaatttccctaaaagggaggaagatcaactgcaaaataatacaaagtcggactccaactcacagaggttagttgaaactcatttttcctatcactgatctattacttttattaagtttgatcaatctgaacagtcacttggctattaggaagtcatctgaataactgaaaaacgggtggggtttttttgtttttgttttttaatagagacgaggtctggctatgtagcccagctggtctggaactcctgggctcaagccatcctcccactttggcctcccaaagtgctgggattgcaggagtgagccaccacgcccagcctgagaaactgttctactgtcaaatttcatgtcaacttgaaaaaactagattcctgatgacttacatcatctcataatcaatgctcaacgtagatcacacttacaactcagtgtacattaagaacgaggtgtttaccaggctcacagtcagttaacatgttgatgctattcattaacataattccttaagttcagctgcatcaggttacaaaggtaccttcaattaaggactgtcaaggcagagtctgcagccttgaaagagaccttaattagttttgagctaaacattacagcaggataaatacaactgttctttatagtttaactgcagaggtactagggctagagctggctgtggtctagtgattctctctaattcattactccataatgcctggctcttcaggcagttttcctttacccaaacgctggaagctcgggaggcggttggcggggagggggcgggggggtgacatgcagaagtcccttatgtacttcctgaacaaaaatcccacttaaaaagacctgcaatctgtagcaaactcctaaactgctccccagataaaataaaatccagatgcacctgagttaccaggcgctgcacctaaattttgccaaaatgccttttctatagaacatacttgacacgcagaaacgagtgttaattatctttcaaatgacaaaataaaaaccatcttttcgatttctttgaatgcccagaaataaacaacttgtttatttttcacttaagaacaaagtttaattttaaaactactgtcaataaagagccgagccaattatctaactcaacactcattcattgtctccatctgtacaggatccacatgacttttaggccagtcttcttactactacatttcatctaaatagaagcagtggtactcccttcctgccagcccccagttacttagcgaaaaggagagtggaacgtgttgcacagaaatcacacgcaaacatcctacctgaccgtgacactggggcgaaaaagcacagatgctacattttcatgctaactgtatgggtccactctctcctgattccagtacagtcaacctgacactcctcaagtttcatattctcgcccaaaaggaggctgtcaccctacgcccttgacaagaagtctcgggcaaaaagttcccttattgcgacggttccagaactcgcttgcttaggagacggccaaggaagcagggagttgggagcgcatgcgaccccatgtgactcgggtcacccagccagggtagcgaggttcggcccacatcgcccgagcaggggatgggggtgaagcggctagggctgctattggtgttcctgcctcatccgcagcggggaggacaggagaggtctgcccacaccccgaggcagcacccagctcgccccacttccctctcgcagggggagagaccaggacgcggtggggggtgggggaatggccgtgacgcccaccggggagacaagcgggagagcagggcgaccccgagcatcctctcgccctggggcgcgagggcaccccgggcgggcagggccagttgccggggcgcgcccccttcccgccagcccgcccgccgggcccgttccttcgccagcgacacagcggaccagggcggtgccccgccccgcacccgccgccgccccagcccccctgcccttaacccccggcccccattcccggcccggcacctttgatcacgttgctgtagatggtggggcggaactcctcgcgcgcgcgctggtcgaagtcctgcccgtggatgatccgcatctgcttcaggaaggtggacttgccgctctcgcccgcgcccagcagcaggatcttcaccagccgcttcacataggtcttttcccgagacaggcatttgtcgatctccttggacttgcgttgctgctcggcctcgccactcgtcagcaggcagccggggaagcacacggacagcacggaccgcgacggcaggaagtccgccatcttgccgccgccgccgccgcctcggcgggcccctccggctccctccacctcctcctccggcggcgggcggctccggcaccgaggctcgagggcggggagcgcggcggcggcccgagcgcgcccagggagggagggaaccagcgaactgactcgcagggcgggccgggcagggcgggccaggacagcgggggagggagggagggaaggagggcgggcccggccccggaggggcggtggccccggagcgtgcgcgctcccgctgcctcccggaggcgcgctcgcacgccgcggccgcttctccgcctcccgccctgggcggcgagtcacgagctcgatgtgtcgctcgggtgcccgcgcccgcagccgcggccgggcgcgcggggagggctgaggaaccgcggtcacgtgggccaggctggggagcccgactttctgtttccctttcatggcctgagcccacttgtgggcagaagggctccttccccaaggccgggaggccggagaccaggtcccggacgcggttctttgggctcccacttagcctccctttctcccgcgttgcgcgcccgctgcccgctgtcaccgcccacccgacccatttcgaggccacggactcgaaagttattcgaacagaacagccggcgtgagcctggcaggcctttggtgcattttctttatttcattttattttttctcttttgagacggagtctcaccctgtcgcccaggctggagtgcattggctcgatctcgactcactgcaacctccgcctcccaggttcaagccatccttccgcctcagcctcccgagtagctgggagtacaggcgtgtgccatcatacccggctaaattttttgtatttatttttagatacaggggctcccccctatgttgcccaggctggtctcgaactcctgagctcaagcgatcctctagcctcggcctcccacagtgcggggattccagacagagccaccaggcccaggcctggtgtgttttcttaaagtgactcccttgaccttctagtctccgaatcccagaacggtaaccagacgtcgtccacccccacttccagctctttctggcattttcagacccctaccagggctctctgtgaggggaaagaactggagttgatgttcacttgagacgtgctaccaggggcatttaatggctcactcg

SEQ ID NO: 1244068 - DNA, 4001 bp, Homo sapiens
agctgcatcaggttacaaaggtaccttcaattaaggactgtcaaggcagagtctgcagccttgaaagagaccttaattagttttgagctaaacattacagcaggataaatacaactgttctttatagtttaactgcagaggtactagggctagagctggctgtggtctagtgattctctctaattcattactccataatgcctggctcttcaggcagttttcctttacccaaacgctggaagctcgggaggcggttggcggggagggggcgggggggtgacatgcagaagtcccttatgtacttcctgaacaaaaatcccacttaaaaagacctgcaatctgtagcaaactcctaaactgctccccagataaaataaaatccagatgcacctgagttaccaggcgctgcacctaaattttgccaaaatgccttttctatagaacatacttgacacgcagaaacgagtgttaattatctttcaaatgacaaaataaaaaccatcttttcgatttctttgaatgcccagaaataaacaacttgtttatttttcacttaagaacaaagtttaattttaaaactactgtcaataaagagccgagccaattatctaactcaacactcattcattgtctccatctgtacaggatccacatgacttttaggccagtcttcttactactacatttcatctaaatagaagcagtggtactcccttcctgccagcccccagttacttagcgaaaaggagagtggaacgtgttgcacagaaatcacacgcaaacatcctacctgaccgtgacactggggcgaaaaagcacagatgctacattttcatgctaactgtatgggtccactctctcctgattccagtacagtcaacctgacactcctcaagtttcatattctcgcccaaaaggaggctgtcaccctacgcccttgacaagaagtctcgggcaaaaagttcccttattgcgacggttccagaactcgcttgcttaggagacggccaaggaagcagggagttgggagcgcatgcgaccccatgtgactcgggtcacccagccagggtagcgaggttcggcccacatcgcccgagcaggggatgggggtgaagcggctagggctgctattggtgttcctgcctcatccgcagcggggaggacaggagaggtctgcccacaccccgaggcagcacccagctcgccccacttccctctcgcagggggagagaccaggacgcggtggggggtgggggaatggccgtgacgcccaccggggagacaagcgggagagcagggcgaccccgagcatcctctcgccctggggcgcgagggcaccccgggcgggcagggccagttgccggggcgcgcccccttcccgccagcccgcccgccgggcccgttccttcgccagcgacacagcggaccagggcggtgccccgccccgcacccgccgccgccccagcccccctgcccttaacccccggcccccattcccggcccggcacctttgatcacgttgctgtagatggtggggcggaactcctcgcgcgcgcgctggtcgaagtcctgcccgtggatgatccgcatctgcttcaggaaggtggacttgccgctctcgcccgcgcccagcagcaggatcttcaccagccgcttcacataggtcttttcccgagacaggcatttgtcgatctccttggacttgcgttgctgctcggcctcgccactcgtcagcaggcagccggggaagcacacggacagcacggaccgcgacggcaggaagtccgccatcttgccgccgccgccgccgcctcggcgggcccctccggctccctccacctcctcctccggcggcgggcggctccggcaccgaggctcgagggcggggagcgcggcggcggcccgagcgcgcccagggagggagggaaccagcgaactgactcgcagggcgggccgggcagggcgggccaggacagcgggggagggagggagggaaggagggcgggcccggccccggaggggcggtggccccggagcgtgcgcgctcccgctgcctcccggaggcgcgctcgcacgccgcggccgcttctccgcctcccgccctgggcggcgagtcacgagctcgatgtgtcgctcgggtgcccgcgcccgcagccgcggccgggcgcgcggggagggctgaggaaccgcggtcacgtgggccaggctggggagcccgactttctgtttccctttcatggcctgagcccacttgtgggcagaagggctccttccccaaggccgggaggccggagaccaggtcccggacgcggttctttgggctcccacttagcctccctttctcccgcgttgcgcgcccgctgcccgctgtcaccgcccacccgacccatttcgaggccacggactcgaaagttattcgaacagaacagccggcgtgagcctggcaggcctttggtgcattttctttatttcattttattttttctcttttgagacggagtctcaccctgtcgcccaggctggagtgcattggctcgatctcgactcactgcaacctccgcctcccaggttcaagccatccttccgcctcagcctcccgagtagctgggagtacaggcgtgtgccatcatacccggctaaattttttgtatttatttttagatacaggggctcccccctatgttgcccaggctggtctcgaactcctgagctcaagcgatcctctagcctcggcctcccacagtgcggggattccagacagagccaccaggcccaggcctggtgtgttttcttaaagtgactcccttgaccttctagtctccgaatcccagaacggtaaccagacgtcgtccacccccacttccagctctttctggcattttcagacccctaccagggctctctgtgaggggaaagaactggagttgatgttcacttgagacgtgctaccaggggcatttaatggctcactcgtgcattccacctgggctgtgatgtgacttcagggacgcttggccgcgccggaattagcgagtggcagcaggagggtgaggtcatggtgaaaatcccctacaccggacactgtgatgtaggctcttcccaacaaggaagcagatacacaaacacaacgaggaatgggagcacgcaaattttagctttcctgccagattacagaggatatgacccgtccagggactttttttctgtcctaacagcagattcaggccaggacacctgaaaggaggccaggagacaagccacaagtgacagctgtgggttggcagagaaactgcttaaccgggacccccgagagccgacctcttcattcttagtatttagtttcaagtggaaaaagccactttggtctgtccctgttttgggcaatgcaacgtagctttgggctcctgtggctcagaaacttcgtatgtataagggagcggaggtaagaggtcagcattccaagaaactcccgaacaggtttaaattttaaaatcggtactaatcagttactccctggggttgggttaatgaccgagaagcctcgactcagtagattggctgcagtaaacaatgcctgtagtaggattatctcctgtggctctggcaagcccagagggtggacaacctacaatatacaagtagagtaggctcacctccaatatctgtggattgataagagtcagaatcactgagcagtgctgtcaggcaaaatatatggtaaaagcctgccctggatggagaatttttccatcatctcatctagtgtttgggaggccctgttctctaaccatgcaaggactcgcctctcccaggattggggcatagaacctgtccccgagcactgtttctgcattgaccccaggtgctaatctgaactccaacaaagaggagagaaacttgtaagttaggtagttaacatcttttttcagaagtgtgtgtaatataatggaaaaccaagaatgcctaggaggcaggaaggtattcctgcccagccagttcat

SEQ ID NO: 1244069 - DNA, 4001 bp, Homo sapiens
aacctctttgagtattagtttccccagctgcaaatgggtattaaaaaaacctaccacatgcaattattgtgggtactaagaaaataatgtctataaaatattataatatactacctggcacataatgaacacttaatacacttattattatcactaataatgctattgttattattatcactgcagggttatcaggaaggccttcctggtgcctagccccagtgatactaagagtagatcccagcccagtgcaacctcagcccctctcacctgccacagaagagcacactctccaagtcacttgtcctggactcaggtaagatagtgtttgagcctcctagttcttcatcagctgaaaatcttcagataaagcagatggcctggaaaccaaaatctctgatgcctaagctgatcataggctcaaagttctaagcccatcacccgcttgagccttcaagccctcactacagcagagcagagagacagacattctccccacaaaaacaaacgcgaaaacagaagccaccttttcaccaccttgccttgcgttagcctcacacttttggtgacctcactagcttagagcccgcagcgcttctatttctccacctccaccctgcagccccacttaccccgcttcgcctgctttctcctccttcccttcccacctctgagcatgctctgaggctgtccttcctcctgaggcaagtcctagaccggcccctaacctccttaaccaagatgctttgtgttgcccattggatccccacagtttcaccttacgaagttctcctagctcactcttcatccactcattcaataaaaatgtccttgctcaccaagctgtgccacttagtacttggggcgtggccacctctaatgcctctgttcaagcttctttgctgccatgcctccctctgagccctgaatgtgggttcctgagcacagaacccacatcctggtttttttcttgctgtccccccaggaccacccaagggctatgccatttaacagacattgagctcctgctctggttgacacccatccaatgacaagggacccgctggaggagcaaaagttaagggaccaatatggtcaatgggaggtcctcttattctcctgtctctaggatgacaggcttggtggtgggaggggcagagaggaggcccgccgtccatcctaacttccgtgctccaggacccagtccaactctcagctgggagctctaagaatttgaaatcagaacaggatcctggaggttgtctggtacaactgtcctgttaatgcgtgaaccacagcccatacctcctaggcaggctcagtgctctgtccaccgctgcttcctaaaaccgcaagttgatctgaaatttgaacctggtgcttctcaaatccaagtccttcctgttgtctaatctgagtccctcacattacgcttggtcaatttcatcttgtcctgccttcatctgcacagagcgtgtagggcagatcttcatcacacacaacccttcgcaggcttgctaacacccctctggcaacctctctggtcatgtcttcccggtgtccaaccctgacccctcttgctgccgcatcggctgttttctatttttgctgtgctgctgccccacagtcctctggtatgacggatctccatatcctatccaccctccactcccctgtcccttggtgactcatccctgagcttcccaaggaagcccccaccctctgccctttcctcccgccttccatgagtggaaaatccacctccgccccctatagcaggccagcccccttcctccccagtctccgaccccatcccccagccgaccagtttcctctccaggaccagggagcaatcacagctgccccgaccttggcttcctctgctgggtgggattgggggctgggcccccaaatgggcccctggcttcccccttcctctgggcaggggacagagagacacaggctcggggagcaggactgacttcctcttgtcccggaatgagcatgcctgccctttgcaagcaggtttgggtctcacgcagaggaaaccaaaagcaataagagggagggaaggcagagcaaccaatcaagggcagggtgagactcaaaacgagcgggctccctggggagccagacagaggctgggggtgatggcggagctacagcagctgcaggagtttgagatccccactggccgggaggctctgaggggcaaccacagtgccctgctgcgggtcgctgactactgcgaggacaactatgtgcaggtaggtagagcgggcggaagcctgacaccccagcccccggaggggggaccctgagccctgccccaagtggggccctgggacccatcctgacagtgcttgtcctgggccttggctgagaaatcctcccattccaggcttcggcttcatcccagaccccaatacttaaccctgaccccatactacccaagcccccactgtgccccttctgtctctcagagcctcagagatgcctgggacagacagtgcgattccatcctgttctcaggtgtcacctcaggttcatccttctgagttcccacgggtcaatccagagacccaaagcctccgtcctcacacagatgctggcgatcattctatttccaggccggctctgggtgaggcttcagaagaacttcccaaacagcacagtgaacctgagatggacaagggaaaggggctctttccctgagtttgggaaagggagagtggggataaggcagagtaggctgggctaaagagaggggatctcatgcagaggcagggggatggcccacataactgctgggagcaggcttctagcaacagatagggaggtggcattgtagaacaggttttaaattgtgtggttgtcctggggctgagaacatagattcctggattcagggaggagaggcaaggcaactgagccatgatggaaatcacttctgttatttcattaatctgtacaactaccttgtgagacatgtattataattcctattttacagatgtggaaacagtagctcagggaggtgaggtgacttgtctaaggccacacagctccaaacagcagagccaggcattccttttttttcgctcttgttgtccaggctggagtgcaatggctcgatcttggctcactacaacctccgccttccgggttcaagaaattctcctgcctcagcctcctgagtagctggaattacaggcatgcaccaccatgcccgactaattttatatttttagtagagacagggtttcgccatgttggtaaggctggtctcgaactcctgacacctcaggtgatccacccgccttggcctcccaaagttctgggattacaggagtgagccactgtgcccagccagcctttttttttttttgacggggtctcctctgtcacccaggctggagtgctgtggcatgatcatagctcacgtagcttcactgaagccttgaactcctaggttcaagcaatcctcccacctcagccttctgagtagctggggctacaggtgcatgccaccatgcctggctaattttttaaatttttttgtaaagacagggtctccatatgtagcccaggctggtcttgaactcctggcctcaagtgatctgcccaccttggcctcccaaagtgctgggattacaggcataagccaccacatttgggcttccctgaatcctgatgccaagctctttcctctccatctttctgcctccctacacgctatgtgactttacgacagtttattagcactctctgtccccggtttcctctgctccctgaagagctgcagactaaccttgttaccccttgggcaaaactttatttttctaacctgtactaaccaaactatgagaacaggcacagggaccttgtagcatagtaagaatgttgaaaaaagaagtaaatgagtaacaagtgctcatgggaaatggcagattaaagacagtcagtaatgacagcagttaaaatgctctggacccttcttt

SEQ ID NO: 1244070 - DNA, 4001 bp, Homo sapiens
tctcgctgagatcctgggccatcctgccctagacagacctgatcctggaaaggattcagcagccaggatcataaatctcatcagctcttccagctccctccacacctcgacttctagcatcttccctgccatatccctcagttcaggcccctcatcattcaacagatattcactccatccttgcatgccctgcttcttcaagagtctgggctcaggaggggaggaagctcccagtctgatgggggaggcaccatttttgcctttggattgtctgtctatggaggaaatttggattgtctgtctatagaggcatctgtctgtctgtctacagaggaaacagagaagaaagaaaaaggagtttctttcagagaggaagatctgggaagcaacgttattgtttcatatagtgactcagagttttcctctttctctccaggtccagcaagggagagtatacaataatggtcaagagaagggggtcttggctgggcgcggtggctcacccctataatcccagcactttgggaggccaaagtgggaggatcgcttgagcccaggagttcaagatcagcctggccaacatggcgaaacctcgtctctacaaaagatagaaaaattagccggggtgatggtgagtgcctataatcccagctactcgggaggctgagatatgagaattgcttgaacctgggaggcgaaggttgcagtgagctgagatcatgccactgcactccagcctgggtaacagagaacaactgtttcaaaaaataaaaaaagatcccaggcactgtggctcatgcctgtaatcccagcactttgggaggctgagacaggcagatcacctgaggttgagggttcgagactagcctcgccaacatggtgaaaccccatctctactaaaaatacaaaaattaggcaggcgtggtggcgggcacctgtaatcccagctactcagcgggctgaggcaggagaatcacttgaacccagaagacggaggttgcagtgagccgagatcacaccactgcactccagcttaggcgacaagagtgagactccatctcaaaaaaaaaaaaaagagagagagagagacaagggggtctggagcttaccagactccaactctgatctgctgcttccttactgctttctcagtgtggccttagggaagtcactcaacctctttgagtattagtttccccagctgcaaatgggtattaaaaaaacctaccacatgcaattattgtgggtactaagaaaataatgtctataaaatattataatatactacctggcacataatgaacacttaatacacttattattatcactaataatgctattgttattattatcactgcagggttatcaggaaggccttcctggtgcctagccccagtgatactaagagtagatcccagcccagtgcaacctcagcccctctcacctgccacagaagagcacactctccaagtcacttgtcctggactcaggtaagatagtgtttgagcctcctagttcttcatcagctgaaaatcttcagataaagcagatggcctggaaaccaaaatctctgatgcctaagctgatcataggctcaaagttctaagcccatcacccgcttgagccttcaagccctcactacagcagagcagagagacagacattctccccacaaaaacaaacgcgaaaacagaagccaccttttcaccaccttgccttgcgttagcctcacacttttggtgacctcactagcttagagcccgcagcgcttctatttctccacctccaccctgcagccccacttaccccgcttcgcctgctttctcctccttcccttcccacctctgagcatgctctgaggctgtccttcctcctgaggcaagtcctagaccggcccctaacctccttaaccaagatgctttgtgttgcccattggatccccacagtttcaccttacgaagttctcctagctcactcttcatccactcattcaataaaaatgtccttgctcaccaagctgtgccacttagtacttggggcgtggccacctctaatgcctctgttcaagcttctttgctgccatgcctccctctgagccctgaatgtgggttcctgagcacagaacccacatcctggtttttttcttgctgtccccccaggaccacccaagggctatgccatttaacagacattgagctcctgctctggttgacacccatccaatgacaagggacccgctggaggagcaaaagttaagggaccaatatggtcaatgggaggtcctcttattctcctgtctctaggatgacaggcttggtggtgggaggggcagagaggaggcccgccgtccatcctaacttccgtgctccaggacccagtccaactctcagctgggagctctaagaatttgaaatcagaacaggatcctggaggttgtctggtacaactgtcctgttaatgcgtgaaccacagcccatacctcctaggcaggctcagtgctctgtccaccgctgcttcctaaaaccgcaagttgatctgaaatttgaacctggtgcttctcaaatccaagtccttcctgttgtctaatctgagtccctcacattacgcttggtcaatttcatcttgtcctgccttcatctgcacagagcgtgtagggcagatcttcatcacacacaacccttcgcaggcttgctaacacccctctggcaacctctctggtcatgtcttcccggtgtccaaccctgacccctcttgctgccgcatcggctgttttctatttttgctgtgctgctgccccacagtcctctggtatgacggatctccatatcctatccaccctccactcccctgtcccttggtgactcatccctgagcttcccaaggaagcccccaccctctgccctttcctcccgccttccatgagtggaaaatccacctccgccccctatagcaggccagcccccttcctccccagtctccgaccccatcccccagccgaccagtttcctctccaggaccagggagcaatcacagctgccccgaccttggcttcctctgctgggtgggattgggggctgggcccccaaatgggcccctggcttcccccttcctctgggcaggggacagagagacacaggctcggggagcaggactgacttcctcttgtcccggaatgagcatgcctgccctttgcaagcaggtttgggtctcacgcagaggaaaccaaaagcaataagagggagggaaggcagagcaaccaatcaagggcagggtgagactcaaaacgagcgggctccctggggagccagacagaggctgggggtgatggcggagctacagcagctgcaggagtttgagatccccactggccgggaggctctgaggggcaaccacagtgccctgctgcgggtcgctgactactgcgaggacaactatgtgcaggtaggtagagcgggcggaagcctgacaccccagcccccggaggggggaccctgagccctgccccaagtggggccctgggacccatcctgacagtgcttgtcctgggccttggctgagaaatcctcccattccaggcttcggcttcatcccagaccccaatacttaaccctgaccccatactacccaagcccccactgtgccccttctgtctctcagagcctcagagatgcctgggacagacagtgcgattccatcctgttctcaggtgtcacctcaggttcatccttctgagttcccacgggtcaatccagagacccaaagcctccgtcctcacacagatgctggcgatcattctatttccaggccggctctgggtgaggcttcagaagaacttcccaaacagcacagtgaacctgagatggacaagggaaaggggctctttccctgagtttgggaaagggagagtggggataaggcagagtaggctgggctaaagagaggggatctcatgcagaggcagggggatggcccacataactgctgggagcaggcttctagca

SEQ ID NO: 1244071 - DNA, 4001 bp, Homo sapiens
tccatcttcaacaggtccttctcgctgagatcctgggccatcctgccctagacagacctgatcctggaaaggattcagcagccaggatcataaatctcatcagctcttccagctccctccacacctcgacttctagcatcttccctgccatatccctcagttcaggcccctcatcattcaacagatattcactccatccttgcatgccctgcttcttcaagagtctgggctcaggaggggaggaagctcccagtctgatgggggaggcaccatttttgcctttggattgtctgtctatggaggaaatttggattgtctgtctatagaggcatctgtctgtctgtctacagaggaaacagagaagaaagaaaaaggagtttctttcagagaggaagatctgggaagcaacgttattgtttcatatagtgactcagagttttcctctttctctccaggtccagcaagggagagtatacaataatggtcaagagaagggggtcttggctgggcgcggtggctcacccctataatcccagcactttgggaggccaaagtgggaggatcgcttgagcccaggagttcaagatcagcctggccaacatggcgaaacctcgtctctacaaaagatagaaaaattagccggggtgatggtgagtgcctataatcccagctactcgggaggctgagatatgagaattgcttgaacctgggaggcgaaggttgcagtgagctgagatcatgccactgcactccagcctgggtaacagagaacaactgtttcaaaaaataaaaaaagatcccaggcactgtggctcatgcctgtaatcccagcactttgggaggctgagacaggcagatcacctgaggttgagggttcgagactagcctcgccaacatggtgaaaccccatctctactaaaaatacaaaaattaggcaggcgtggtggcgggcacctgtaatcccagctactcagcgggctgaggcaggagaatcacttgaacccagaagacggaggttgcagtgagccgagatcacaccactgcactccagcttaggcgacaagagtgagactccatctcaaaaaaaaaaaaaagagagagagagagacaagggggtctggagcttaccagactccaactctgatctgctgcttccttactgctttctcagtgtggccttagggaagtcactcaacctctttgagtattagtttccccagctgcaaatgggtattaaaaaaacctaccacatgcaattattgtgggtactaagaaaataatgtctataaaatattataatatactacctggcacataatgaacacttaatacacttattattatcactaataatgctattgttattattatcactgcagggttatcaggaaggccttcctggtgcctagccccagtgatactaagagtagatcccagcccagtgcaacctcagcccctctcacctgccacagaagagcacactctccaagtcacttgtcctggactcaggtaagatagtgtttgagcctcctagttcttcatcagctgaaaatcttcagataaagcagatggcctggaaaccaaaatctctgatgcctaagctgatcataggctcaaagttctaagcccatcacccgcttgagccttcaagccctcactacagcagagcagagagacagacattctccccacaaaaacaaacgcgaaaacagaagccaccttttcaccaccttgccttgcgttagcctcacacttttggtgacctcactagcttagagcccgcagcgcttctatttctccacctccaccctgcagccccacttaccccgcttcgcctgctttctcctccttcccttcccacctctgagcatgctctgaggctgtccttcctcctgaggcaagtcctagaccggcccctaacctccttaaccaagatgctttgtgttgcccattggatccccacagtttcaccttacgaagttctcctagctcactcttcatccactcattcaataaaaatgtccttgctcaccaagctgtgccacttagtacttggggcgtggccacctctaatgcctctgttcaagcttctttgctgccatgcctccctctgagccctgaatgtgggttcctgagcacagaacccacatcctggtttttttcttgctgtccccccaggaccacccaagggctatgccatttaacagacattgagctcctgctctggttgacacccatccaatgacaagggacccgctggaggagcaaaagttaagggaccaatatggtcaatgggaggtcctcttattctcctgtctctaggatgacaggcttggtggtgggaggggcagagaggaggcccgccgtccatcctaacttccgtgctccaggacccagtccaactctcagctgggagctctaagaatttgaaatcagaacaggatcctggaggttgtctggtacaactgtcctgttaatgcgtgaaccacagcccatacctcctaggcaggctcagtgctctgtccaccgctgcttcctaaaaccgcaagttgatctgaaatttgaacctggtgcttctcaaatccaagtccttcctgttgtctaatctgagtccctcacattacgcttggtcaatttcatcttgtcctgccttcatctgcacagagcgtgtagggcagatcttcatcacacacaacccttcgcaggcttgctaacacccctctggcaacctctctggtcatgtcttcccggtgtccaaccctgacccctcttgctgccgcatcggctgttttctatttttgctgtgctgctgccccacagtcctctggtatgacggatctccatatcctatccaccctccactcccctgtcccttggtgactcatccctgagcttcccaaggaagcccccaccctctgccctttcctcccgccttccatgagtggaaaatccacctccgccccctatagcaggccagcccccttcctccccagtctccgaccccatcccccagccgaccagtttcctctccaggaccagggagcaatcacagctgccccgaccttggcttcctctgctgggtgggattgggggctgggcccccaaatgggcccctggcttcccccttcctctgggcaggggacagagagacacaggctcggggagcaggactgacttcctcttgtcccggaatgagcatgcctgccctttgcaagcaggtttgggtctcacgcagaggaaaccaaaagcaataagagggagggaaggcagagcaaccaatcaagggcagggtgagactcaaaacgagcgggctccctggggagccagacagaggctgggggtgatggcggagctacagcagctgcaggagtttgagatccccactggccgggaggctctgaggggcaaccacagtgccctgctgcgggtcgctgactactgcgaggacaactatgtgcaggtaggtagagcgggcggaagcctgacaccccagcccccggaggggggaccctgagccctgccccaagtggggccctgggacccatcctgacagtgcttgtcctgggccttggctgagaaatcctcccattccaggcttcggcttcatcccagaccccaatacttaaccctgaccccatactacccaagcccccactgtgccccttctgtctctcagagcctcagagatgcctgggacagacagtgcgattccatcctgttctcaggtgtcacctcaggttcatccttctgagttcccacgggtcaatccagagacccaaagcctccgtcctcacacagatgctggcgatcattctatttccaggccggctctgggtgaggcttcagaagaacttcccaaacagcacagtgaacctgagatggacaagggaaaggggctctttccctgagtttgggaaagggagagtggggataaggcagagtaggctgggctaaagagaggggatctcatgcagaggcagggggatggcccacataactgc

SEQ ID NO: 1244072 - DNA, 4001 bp, Homo sapiens
ttttaatagcagaagcaaacaggcaagtagagaaattggtttagcagtctggcatctaagggttgcgtgacagaagccacagtctggacacccacacacagatacgagtattctcattcatggtgaagtgaaggttaaaataaaagggcagaagtaccagaggtaatggtataagaatctctctttcaaaaagaatacaaaacattatttcaatatgcttttcaaccagaaatagaaagcgtagttaacatagtggagcatatttgcccagagaccaaatgccagttcgaatctcggcacagccacttactgactctatgatttatcaacaatctacttaacctatgaacttcagcttcttgttttttaaacccctaccttcagggtttgcttatgtattggtaatcatatgcttacagcagctggcacagagtaggttgtcagtaatgagccgctgtaatattatagcatgctgcttcaaaaaaccacaggctaatgactagtaataaagatatcagtagcctcttctacataattttaaaatgttttctagcggccaggcgcggtgggtcacacctgtaatcccagcactttgggaggcagaggcgggcggatcacgaggtcaggagatcaagaacatcctggccaacatggtgaaaccccgtctctactaaaaatacaaaaattagccaggcgtggtggcatgcatctgtagtcccagctactaaggaggctgagacaggagaatcgcttgaacgcaggaggcggaggctgcagtgagccgagatcgatagcgccaccgcactccagcctgggcgacatagcgagtctccaaaaaaaaaaaaaaaaaagttttctagctggtacacacatttcaaatgggcattgtaatacatgttttaaactataagcacgcttttctgtgattggaataattgtcttctctagtaggaaacataagtaaaagcattttgaaagtatgataggcaaatctggataaatttagaattgagtttcttagaccaaggggctgatagtgacaatactgtggtttctagaggcttcagtgtatagcaataaaaacaggtcaaaggaatttggaaagtagtttctatgcggctgtaaagcaaagagacagttgggagaaaaaggtgagctttctctgctcttgttgatcatcataatccacgaatgagttttatgtaagctcactttatccgactatagtttcaggaattaaacaaatgcatttgtcaaatcacaggaaggtttttttggtgggagaagtatagcaaatgtaactgcaattcacacaggttctctcaactttttcaataaaaccgattctagactctagagcagaagggtaagttattttctcctccttcaaacacccagtcctggaagtccccaacctgtagttgtcatggagacccaataagagacattctgtctcctattctcttcatacttcctccgacggaccggaatgcaagttcctccttctcttttcccactcagttttccaatagtgacctcagctccaatgcgctgactcctccagtctccggggctctggatcttctccctcaacattcgtttcctctcagagttcgtaccccaagccccttcgtccgagttccattactccctcaacacaattctacccaggcgattgagagccctcttcctctacatccccgctctgtccactctgcccaacccctgccccacgtcccgctcacacgccccggccaggccagacccctaccccagaccgttcggtatccccaaggccccggggatcccacttaggcaagccccgctgctcagctcggccgctccgggagtctggttctttcctgtgctgcttctcccaagatctgtcctcactcagcccctctcaccctcgtaggacgcacccggaggccttctcgccctcaccttcccagtaactgctggtccctgccgccatctttgtcgtccaacgtcagccgggataggggagcagaggcgatgcaggccggaaagtcaccatggtgcgtgtttccgccttgagagccagggccgacgggatgcgagcctccgcggacactgccacctgctgatcaattcgttatcttacagcttttaagtagcgagagagaaaaaacttcggctttagctcctgtctttcattcccgctttctgcgccccaaaccatcatcatctccctcatctcggcttatcctttctctcagcaggtgcctacttgactgggaggagaatcatcctcaggcaactccctcaatttccctcaccttgtctctaatttgtatcttcagccaatttcttcctttctcagacatagagaccctttcttcccagagccatttccttcatcctacctccccgcctgtgctccatcatccacgttctttggcgtatgcgctcttctccactggctgctttccttgtctacagcagttctagtcccagccctctttgtccttgtcagccgccacatctagaaagagtgagctaactgcttctacatgctctcggcctgagccctcaacctgataaaatctgctgtccaaacccacactttatagatacataaattatcacagtctaccggtgctgacttaattctagtgaagtgtagaaaccttaattcctgtaaagttctttcccccactcatttataatatagttgtttttaagtatttcctctgcattcattgaggagaaccacatcagtgttacaatatttgcttcaagggtcaggcataagttagagaattcaagagaagaggaaagcttacttgatttatgcatattttactcttcttcgttcctagtgtcccaagattcctttttctaatcgtttcctttctgtttcaagaatttccctcagccattttttttttaaagagtagatcagctggtgacaaattctattagtttttcttcatctgagaatgtcttgatttcccttcattcttgggggatcggatattgttgccagatatacaatctgaagttgacaatttctttcttcagcacttgaaaaatgtgccaattccttctggcctccatagtttcagataagaaattgactaaaattggaattgtttttccactgtagctaaaatacattttctctctcactgctttcaagaactgttctttagttttcagaagttatgatgtgccttggtgtagatttctttggatttatcctgtttgggatatcctcagcttcttgattctgacatttatgtcttctgccaaatttgggggattctcaaccattgtttcttccaatactttttctgtctcatactgtttctcttctttttctgggagtctgatgacgtgaatgctagatcttgtgttaatgtcccacatagctctgaagttatgctaattttttttcagtctattttccatcattcggatttggtactatctactattctgtcttcagatttgctgacagaaagtatgtctttcctctgttccctccattctgctgttgagcctattcgttgagttcatgtcaattattgcatttttcgtatctaaaacttctgttcagttcctcattatatcttctgtttctttgctgagactcgttttatcatttgttctaagtttgtttgtaattgctcactaaagtatttttattagagctgctttaaagtcctcatcagataattccaacatctgtgtcatcttgatgttggggtctgttgtctttttttcactcaagtcgaagttctctgggctattggaatgacaatttttataaattgtatcctgatgtttcaggtatttgttatgagattctgatcttatttatgtcttctgtttaagcagacttcctctgacactatgctgctgggggacatagggaaatgcttgctacttccaggtggcagtggaagttcaggctctcccttggccttcactgattccccagggagggggtgccttgttactgctccgcatgtggt

SEQ ID NO: 1244073 - DNA, 4001 bp, Homo sapiens
aagctgctagagtccaagggtgcattgttggaggcctacagagcatctacactccacacaccttgtttggggtaccatttagaattcctcttctgagccatgcagttttctctgtgattagctgcactgaaaacaggtagtctaagactctctaaataaagttattcttgaatataaaatgggtcatggccttcttggcaacatcctttaactaaattaactagataagaccatacataacagattaacttcaaggcactactatgcccattgtgccctgctattgtgaaagataggccctttcttagtaacatgaacataatttcgtttcattctttctctaaattactcacagactagttttaagtcccttcctataacgtttatgtgagaatagggctccccagtgtaaaagaaaattctgtcattacaaagtaggttctgtattttcgcctgtccaaatgaaacacctcatcgccaaaataaaagaaacccataaacttagaaaatgaaagagaaagaggatcatcaccctcttattcctcatgcttcagggcatttcatttccaggccttgggagtgtgattttaagtgttttaatcaacaaaactacagcataagtttgaaagttctcaataggataggtatatacctcaaaaaattgagaagagaaactaaaacagatacttctacaccagagttcatagcagtattattctcaacagcccaatggtggaaacaactcaagtgtccatcaacagatgaatggataacaaaatgtggtagacacataaaacggaatattattccgtcataaaacagaatgaaattctggtaacaggctacaatatagatgaaccctgaaaacattaagtgaaataagccagatacaaaaggacaaattctgtatgactccacttatattaagtatctagaataggtaaactcatagagagaagtaaaacagaggttactaggtgttctggaaggaagaaatgaagtgctactgattaacaggcacactgggatgatgaaaaagttctggaaatggatcgtagtgatgtaagttgtgaatgtactcaatgtcactgaattgtacacttaaaaattgttaaaacagtaaatcttatgttgtgtatattttacaataaaaaataaaaatcataaaattccgtccctccaaaacagggtaaaaatcataattctgccccccgcccccaaaaatagggtaagtatggccccattaatactcaactacgtatctcagcaattccgaaagtgcaggacgatgcgaataaaggacactaccaaggaatttaagttatgagaaactaaattacaatttgattttcttagcgataacctgtaaccagatacgattaacaagtaataatagtgaatgctacgtggacagcaatttctttgtaccataaaaatgtggtctttagtataaatcgaataagaatacaaatactttcccgtacgtgccctgactctccaattaaacagtacactcctacggccaggggccgtgtctcctactccgtgtctcctctcgaggtctaccaaccaggagcaccgagttgacaagtgctggacaaagttttataacctgcaggtgccagtttcccgtcacccagtctacccagcaggtagtcacgaacttgcagaccccaggagtcatctgccccacgtctccaggccccagcctgaacccactgtctgtggctgacctgggagtcccgccaaggattaagcacttcggaggcatccccagcagtgccctggcggaaaaactcggcctctaccctggctgacgtccgaggcctcagccccagaagccaggctcacctggcctcgcctcgtctagcccctgcccgctccccgaccggccctcacttgtgcgtttgctggaacaggggatccatgtcgccggccccgcaggccacggctccggctctggcttcctcggaacacgtcctcacagccccccttccggtttccggcttccggtcgcaggaccctccctcccctgccggccagggctgcccgcacgcgcgccttactagcagtggttgcgagatcggagaaggggaaggagaaatgaggccggcgacggaaggataagtgtagtcacaggctcggcttcacgtgaagggcaaggcggtgtacatgttcgctgaaggctagcctcaggattcagtcaggcgttaggaaggacaatcgcgggatactaacgagaggtcctcagagcaaagttgaaggcgagccgctatcatctgctgttctctgccgcagagaggactggaggttcttgcttggcttcactttaaaccatttaatcgggggtctggagatttcgctcttcactgtttttcctggcgcaagcttttcctgtttcgcatttgtctactcactctcccgcctatctaccccccattcctatttatccatccagtaaacctacattgaatgagtggttattatgtgtcatgtgtaaagtagggaaaaccgggttcctcctgccctcaaagaggttctggtctgggaaaggaaataagatatgtatactctcaaaagacaaaattacaagaaatgtagttatagattttttttctttattttattattttttattattatactttaagttctagggtacatgtgcacaacgtgcagggttgttacatatgtatacatgtgccatgttggtgtgctgcacccattaactcgtcatttacattaggtatatctcctaatgctatcccttccccctctccccaccccacaacaggccccgaagtgtgatgtcccccttcctgtgtccaagtgttctcatcgttcagttcccacctatgagtgagaacatgtaatgtttgtttttttgtccttgcgatagtttgctgagaatgttggtttccagcttcatccgtgtccctacaaaggacatgaactcatcattttttatggctgcatagtattccatggtgtatatatgccacattttcttaatccagtctgtcattgttggacatttgggttggttccaggtctttgctattgtgaatagtgctgcaataaacatacatgtaaatgtgtctttatagcagcatgatttataatcctttgggtatatacccagtaatgggatggctgggtcaaatggtatttctagttctagatccctgagaaatctccacactgtcttccacaatggttgaaccagttaacagtcccaccaacagtgtaaaagtgttcttatttctccacatcctctccagcagctgttgtttcctgactttttaatggtcgccattctaactggtgtgagatggtatctcattgtggttttgatttgcatttctctgatggccagtgatgatgagcattttttcatgtgtctgttggctgcataaatgtcttcttttgagaagtgtctgttcatatccttcgcccacttgttgatggggttgtttgtttttttcttgtaaatttgtttgagttcattgtagattctggatattagctctttgtcagatgagtagattgcaaaaattttctcccattctgtaggttgcctgttcactctgatggtagtttcttttgctgtgcagaagctctttagtttaattagatcccatttgtcaattttggctttcgttgtcattgcttttggtgttttagacatgaagtccttgcccatgcctatgtcctgaatggtattgcctaggttttcttctagggtttttatggttttaggtctaacatgtaagtctttaatccatcttgaattgatttttgtataaggtgtaaggaagggatccagtttcagctttctacatatggctagctagttttcccagcaccatttcaaaaacgatggttagatcccacgaagtaggtggtaatgccttaaccgtatgcgtgttgtcaggcccaagggcctcttccatccttgtcaaagggagtgctaaccttctctcctttaatacaacacagtt

SEQ ID NO: 1244074 - DNA, 4001 bp, Homo sapiens
agtccagggcctgtggtttcacatgcccaacccagctcagcagcaggatgaggaccacagaggcaaagagcagccagaagagacccaagacatagaagcccagggggaggaggcagcaaaagtcggggtggagaaaagggtcatttctggagctctccaaatgcccttggagcaccccacggagctttggtggctgatcaagttcagggatggtttttttggtggattctaagagtgatacgggttttgtggtagttaaaaatgtgctttttggagtgatcaggcttgtggcagacaccaggatggtcgggcttgtggcgatggtcgggattggggtgggctccggggtggtcgggctgggggcgggctctgaggtgggctctggggtggtcgggctgggggcgggctctgaggtgggctccggggtggtcgggctgggggcgggctctgaggtgggctctggggtggtcgggcttggagtgggctccagggtggtcatgtttggggcgggctccgggacgggctctgaggtggtcgggcttggggttggttcagtagtggattttggagttttggagaatgtgatggattccatgtgaagtgtgaaatttggggtccatctaggtgggaatgtggtctgctccttagtggattcttgtgttggatgcaaggaggagggcatttggctgtctagagaagcagtggaccatgagtagaatagaccccagggggttgtatgggctttggtggggaacttgaccacagtccttgtggcacgcaccttatcgccctcagtgtcctcttctgggtagtaatcatataggtctgtgtcaccttcatcaccaagggtggggcacccctttcctgggtatttgtagacgggaaacttgtctgaattgtcacactgcacactggccacgttagaggtcatggccttgacgtccacaccttgcttccatacgtagacattttcagcattgtcctgcagccagcgacgaaaatagaggatctcacagttgcataaccaggggttcccgtggagaaaagcaaaaggcaggaggtgggacccaaaaaagccctttggtattgtatacagcgagttctcttggaggagaagggtgtcgagattctccagcccattcaggagcccagcggggagctcagtcaagttgttgttagccagactgagcttctccagcttgggtgtgggcgtcaggagccctgggggcagggtcttcagctcattgcctttcaggtagagctcttggagttcgccaagaccacgcagggcaccaagaggcagcgaggtcagccggttgaaggagacgtccaggacggtgagagcaggcagtgtctgccctagcaagggcaggctttgcagctgattgtgggatagatccagggtccccagcactggcagcgtcccatcgacctggagcttggtgagctcgcacctatctaggttcagctgagtgaggcgagtgtaaggcatcagggttgccagggagaaggtgtacaggaggttctcactcaggtggaggatggttgtgtctttcggcaggtctggaggcagcgctgtcagattcctcttgtcacagttcacttctaggtggctggccactttggagacctcacagatggggtgggggtgtaaggggcttggcagcaggagcagcaagaggaggagaggcatgaggacctgtgggcaagggagccttgagtggatccccctgcatcccctggaagcatccccccaggccccagcccccttccccctgcagcttcgcttccagaaacagcatccacacctcctgtcctccctactcccatctcccacccttgcctgcagaacttaaaactactagctccaggtccttggctctttcccctccctcagacccctctcctgccccagcaccaaccccggcttacaggcaggcagaaagacctccgaaggcacagagcgtcttctagggtgccactcgactccgtccttctctcttctagccccatggaggactaagccagtggcaaggaaggggatgggggtgaggaggaaatgcaggcctgatagggattccagtgaccgggaatcccctggacacaagcccttatcgcctcactccacggctttcccccaggccctctttgtggttctctcttccgctttccttttacacaggggagatgggggtggactcctccaaacagccttctgccatcttttaaaaacctctccagggccgggcgcgtggctcatgcctgtaatcccagaactttgggaggctgaggcgggcggatcacctgaagtcaggagttcgagaccagcctgaccaacacggggaaaccctgtctctactaaaaatacattagccaggcgtggtggcgcatgcctgtaatcccagctactcgggaggctgaggcaggagaatcgcttgaaaccgggaggtggaaagaggttgcggtgagccgagatcgtgccattgtactccagcctgggtgacaagagcaaaactccatcttaaaaacaaaaaaacctctccagatgcccgcttctcttcctcttcacagctgcattctgagagttgcctacttttaattctctcccacctttctctctgccttctcaccccagtctatgctgatttctttcccctgctactccattgactcggttcttaccaaggtctttaatgctctccctcctctacatccatgggaaacttctccactgtgatcttactttatttcggcagcctgcatacccatggccactcgccccttgggattctccttttggcctctgtgacacatgaccctgtaattttcttggttttcttcttacctgtttggttgggccttctcagtctccttcatagattccccttcttgaacaattaaactgcccccagagtttgtgcttaggctgtcttcattcccagctaatttttatatttttagtagagacggggtttcaccatgttggtcagcctggtctcgaactcctcatctcaagtgatccacccacattggcttcccgaagtgctgggattagaggcatgagccaccgcgcccggcattctcttcttttcttacgctatgcaaccacctgagattatcctcatccattcccttgccttcaaccaccacctacaacctaatgactctcaaatctatgtctctagtccagacccttctcctgagacacaagcacatatgtccagctgccttctggacatctctacttggatgtcccacagacaccaaaacaatatgttcaaagctgaactcaccatctctctccaaatggcttctcctcctgtgttgctcagcctggtgagtggcaccatcatccactcatttacctaaccattcagtcaacacaaacaaaatccctaatagtcatctctaacgtctcccgtctttcatccccatcaccaagtcctggtgattttatctcccgtctctctcaaatctactctccatccacaccatcctgccagcattcctagtccaaggttgttgttgtttcttgttcatatcctcctcctcctcttcttcttcctcctcttcctcctttcttcttcttcttctttttttttttttttttttttgagatggagtcttgccctgtctcccaggctggagtgcaatggctccatctcggctcactgccacctctgcctcctgggttcaagcaattctcctgcctcagcctcctgagtagctgggattacaggcacccgccatcatgcccggctaatttttcatatctttagtagagacggggttttaccatgttgtccaggctggtctcctttgctctgtctcccaggctggagtgcagtggcgcaatcatgcctcactcaaggacaaactcctggacccaagggatcctcctgcttcagcctcccaaggagttgggactacaggcatgcaccaccacacctggctgatttaaaaatttttttctagagacagaaaaacatttgtttgttgcc

SEQ ID NO: 1244075 - DNA, 4001 bp, Homo sapiens
ctgagtattgaaaaagtacaggctaaccccctgaatgtttttcaggaaacagcattcacactctgctatccacaattttcaaaatcttcattaaaggccctgaaaatcctgtttgctaagcctgctggaattctgtggttgacagtcatcttccctcaaaacttaactgtccatattatctattttcgattttattaggtcaccttgagattattctctcctctgaaaagcatttgcgggctttagttatcagtatgtctctaccggtaatttaaaaatcaataaagctcatacaccttgcagccaactcatattttatagtgcttgctaatatatatatatgtgtgtatatatatatatttctcagggatcaaaaggctaacatgaactgcttcaaactttggtgaatctgcattatatccttagaacatcctgagactctcctgtattgtgctgcagctatacagcaggcgcatgatcacaaggctttttaacagcccccagatcccttactgctgcaaaacttctcataagcgttctatgtactagactgttaacagtgctgagttaaaattgttaaactgctttacctatttatttaccaatcctatcatctcagggaattcaaactctttaaactgccttctgaaacacatctagagtgctttcgtactgctttgagtaggatctgcagcgggataaaaacttgagttctgagattcatcccgacccaaattgcagttgccaggatatgcggtagtaatgcagtgttttttttttttttttgagactctacggatgtattttacctagaaatagccaatctctactaaatcccttttagtcttcgagatttccgcggtaacaatttcaacagaaaggtattttcaacagcgaaaaaacaagttattctaatttggcctttattttttactcaatagagcttgccatcgtaagggcatttttccatactaacatttgcaattgaagaaagaaaaatcaagcttttggcactagtgaccccatgcgtggacggcctattatcatcacgcttctcacaaatctttcgagataggatttgaggttaggctcacatcggatcatagtccagtaacttactgctttccaagcccaattaacagcctaataacagcaacacttatgccccgcgaaatctcaatgtatgactaaccaataaggcgtctgatagcgaaggcaaccttttcccaggtaaggaagaggaaaagcagacaatgaaaggaattgatttatcacagtgaagaaagaaaagagaaggaccccaaaaggatccgtgagagcaaaatcccggggttcggaagccttggcctcagcaatactctcccccaagccctctcagcccaacccaaccacccctcttgtcccctgggagccagcccttcgccggcacagatcgggcagacctggagggcacagcccctcacacggcgctcaggcccggttccgaaatccgatgccaaacaggcggaagccgcaagccccgcggcctgagtttcaggggtaagagaatgcgggtgcgaggagatgcggcctccctcaagccgggaggcctcttgagaaagcagagacgggagaagagcgagctggttcgcaagtcggagcaaaactggaaggaaagagggctgggagccggagatgaaggaggttctgggctagaccagcgccttccccgcatcctcggcgacgcccgtgtttacctgaaagtctcggtcttcgttgaagcgggagaagcggtccgccattttgccgccttcactcctctcaggacgacgctctccggttcgctccttccctcctgcgacacccacccctccccggttccccgcctcctcccacgcccaccgggcgcgcgcagccgagggagggagcgagaatgcgcgtcctgacgggagccccgcggcgcaggcgcctgccagccctggaggctgacccttccctctagcccctgctccgcgcgcgacccggagcgaccccggtggccgcgcgtgcgcactcccgcccgagagccgcgagagcttccggagggaaaggtcagagggggcaccgtgcggacaaatctggatgttttgctgttgctcacttccgggtgtcttttctcactgttgcttccccgtgtgcgcagaagtccatcgtcttcactaaatagcagcataatgttgggccgaaagcgcgaccttagagccagactgcttagcttcgaatctcagctcaccctgaggattcaacggtgaacgagacaggaatgatctcctcttatggggatttcattccagtggaagaactcacataactcgtaaaataaatatttttaaatatcaacaagtgccacaaaaaagtaaaactggccacagtgctgagagggacagtctctgaaaggacctttgaccgaggcacagcgaggagcctacagcattggggcatagggaacgttagacccaaaggcccaaagactgcaaggagcttgacttcgagccatcctttgagagaagtatttcacaagggaccgaagttgatccagatcgactaaagctctctgggcttcagtttcctttttatacaatagggaaattggattcagtaatctctgatgctcctgcctagcgctgactatgagagtcaagaatcggatttttccatcccttctgaggacctcacccagtgctccaggactcttagccaaaatacataaaacacatagaagggtggcaggacttctctccttttgaaaagagtagttgacagaaatcacacaatggaaaaatgggtcttaccctgccctgaaagagtcaaatggaatgtaattttttgaggaagggtgtgtattttctagctgttaccctttgccccacccatgcttcagcctacgcttccatctaaggggaggcagggcacacagaattcaaacattgtattctttttttttttttttttttgagacggagtctcgcactgtcgccggagtacagtggcgcaatctcggctcactgcaacctccgcctcccaggttcaagagattctcctgcctcagccaccctagtagctgggattacaggcgcccaccactaagcccagctcatttgtttttttttttttttgaaaaggagtctcactctgtcgcccaggctggagtgcagtggcgcgatctcggctcactgcaagctccgccttccgggttcacgccattctcctgcctcagcctcccgagtagctgggactacaggcgcccgccaccaagcccggctaattttttgtatttttagtagagacggggtttcaccgtgttagccaggctggtctcgatctcctgacctcgtgatccgcctgcctcggcctcccaaaatgctggaattacaggcgtgagccacctcgcccggacttttttttttttttttttttttgtatttttagtggaggcggggttcaccatgttggcaaggctggtctggaactcctgaccttgtgatccgcccgcctcagcctcccaaagtgctgagattacaggcgtgagccaccgagcctggctcaaacattgtaaagagacttaagggtagcgtgaaagattgaatcacgaggatacacatcacactgacctcttcttcctctcaaaagcccactgaaatgacagcagaggaataagaagtgcataaattcacatggacaaagagacctggagaagagacaatggcagacaacagatgtcaacattttggaggccagagagcacagataaatggaaatgactttagtagagtggagaaaaagaagtcatagagtaggagaagacaggaaagaagttgatcaatgctaaagtgcaccagaaaggctcaggaagtagaagcccctggtgccactgatgattcgatgtctcttttcccacccaggtagcaaactagaggttttccctctggaaaggctgaaccagagagactggactttataggtgagaaggagcaaccatgctg

SEQ ID NO: 1244076 - DNA, 4001 bp, Homo sapiens
gtggttgtttgccccaggatccttacgcagacactgagcctgttagtgcagggggcggggcgggggaaggaggaggaaggaactggtgggcggaggcaccggggaaagagctagagtagatgctggtggagcaaaccagggtgctctaaggcgcacaggcaggggaaggggtcgggctgggcaggggcttcagcttcaggagagacgagctgagggtggcatggggttcacaggtatgtctatgcctgggggagcaggaagtgaggagaagaggcaggatggcaggatgggggttctggggggctgcctcgtgccccggggcactctgtgagctggcctgtgttcagctggggtcaaacctggggctgaggactttggggacaggcagaaggactcagggtgctgactctatgagcatccagactgaaagggaagagagtagggcacctctgtgaggagttggggaagtcgtgccaggtaggagtggtaaggctgccacagacagggctatgatcccaagaggctcaggggaccaggtgcacagggtcagtcctgcagtggccatggtgggggaggtggaggctacccccaggggcaggatggcaggcagccgtgcacagggtggggcatcctctgggagcagccggacgaggctgcctgcagccggtgctgggaaaccacagtcctgcaagctgttgtttccctggccctggtgaaatggaccatccctcaagaatatcaatccctggcaaataaacaacagccgttgctggtgtgcactcagaagaggccagactggctctcctgccctagaggaagagtgaccagagcagcccacaagcaggtacccgggacatggatgccccgtggacggtctcgggaggagagctcaggcccccctggaatcacctcccatggcctgtcctctgggaatgcagcagaaaatatggcaggaaatatagggagcttcccagctctgggagttagatctcacatcagagcctggaactccccatcccaaccccccctcggatactcacagcgcaggccctgctgccccctggtggccacatcctgaccctgcaagcctgaaagtcccatggtttggctaggcaccctgggtggcacagtgggactggagacggagctgcccgctcagggcaggtcctctggtggagtgctgggaccccagccccagaaagtgcaagtagcacagatgacgccccaggccaccacctccttgcagcaggaggctaggggtgagaggaggctgaccctctcttcaaggagctgccatgggtgaggggcaaggagggtccctgccaacatttaccgagtgcccaccctgtccctacactttgttttttaaattttatgtatagatatagagagagtttggggcctcgctgtgttgccgaggctggtctggaactccaggcttcaagtggtccttctgccttggcctctcaaagagctgggattacaggtgtgagtcaccatgccaagcccactttgtttctttgagggatgtacacttgactggaaaccttaaatattcttcagacggaacacaagggtttcaaccaaggctgtcacacaggctacacagaaaactagagctccctggattcagagcgaggagagggagagatggaggagggggactgagtttgctacaatgatgccccatgcacgtccttccagcaacttaccatcccaccccatagaaggcctgttctgggaggcagctggattcacctggcggaaactgctggagtccttggatggccttattcggaggtcccagcttccccctgtgacctgtggagacctcagccacctggaatggctgagacaagaatgctggcttttctgtgcatgggacaccattgatttgtcttcctcagtatatgcttctgtacccaggacagcagtgatgtcctgcagggaagtggggacccactggatcttttgctccatgggcaacatcataatactcattgctaacaacgctgggatccatggttcaagagatggagcctggagatgtccagctcagtggcagcagcagacaggacagggcaaccacgtcatcagccagcacacagcctatacagaggtgagaggccccttcttggtggtggcgattctttcctacatggtgtggtgtcagtgaccagggtaggctgctagcccacggtggaagggatcctatccactaaggcagtcacctctgagccagcctgggcaaggtgaaagatgttatgaagacccagccgcacaccttgactttttttttcttttctttttgagacagagtctcgctctgtcacccaggctggagtgcaatggtgctatctcggctcactgcaacctctgcctcctgggttccagtgattctcctgcctcagcctcccaagtagctgggattacaggtgcctgccaccatgcctggctaatttttgtatttttagtagagacggggtttcaccgtgttagccaggctggtcctgagctcctggcctcaggtgatatgcccacctgggtctcccaaaaatgctgggatcacaggtgtgagccaccgcacccggccacaccttgacctttttggtctctgaagtcttcagccctgatcagtccagccagagccaccaggcctgagcaccagggtctctctctctcttttttttccttctgcctccctacccctcaagacagggtctcactctgtcacccaggctgtggtacagtggtgtgatcatagctcactgcagcctcgaactcccaggctcaagtgatcctcccatctcagcctcccaaatagctggcattacaggcaagcaccaacacgcccagctaattttcgtattttttgtagagacggtgtttcgccatgttgcctaggctggtctcgagctcctgggctcatgcaatccacctgcctcggcctcccagagtgctgggattacagatgtgagccaccacacctggccaaggattccttcttatttaagtttttgtttgtttgagacagagtctcaccctgttgcccaggctggagtgcaggggtgcaatctcagctcactgcaacctctgcttcccgggttcaagcgattttcctgcctcagcctcccaagtagctgggattacagtcaccagccaccaagcttggctaatatttgtagttttagtagagacggggttttaccatgttgcccgggctgggcttgaactcctgacctcaagtgatccacccgcctcagcctcccaaagtgctggaattaaaggtgtgagacatcatgcccggcctcatatttacctttatgtgctcccctgtgtacacggggcctggaacttaaacccatgatctcctgtccccagtccaagtggcccagtgactcagggaaccctaagtcaggacaggaggcactacagatgcaagggagggtgccaggtagggccaggctgcgtctggagcccacccctctgaggtgttaccacagtccagtgtctgatcaccccctttgcagattcagaaactctttatctggtcccaagcttgcaagagttttccgttgcttttacagtactagagattccttgtccaaagggatcacttatcacaattggaaaaacttccccaaaaagacagcatgggctggacatggtggctcacatctgtaatcccagcactttggggaggccgaggcgggcagatcacgaggtcaggagatcgagaccatcctggccaacatggtgaaaccccgtctctactaaaaatacaacaattagccagccactacaggtagtgggtacctgtagtcccagctactccggaggcaaaggcaggagaatcgcctgcacccaggaggcagaggttgcagtgagctgagatcgcaccactgtactccagcctggcgacagagtgagactccatctcaaacaaaacaaaacaaaacaaaacaaaacaaaaacacaacatggggttgtggaaagaaaag

SEQ ID NO: 1244077 - DNA, 4001 bp, Homo sapiens
caagccccctcaagagttttccttccgctgggtgtggtggctcacacctgtaatcccagcaatttgggaggccgaggcgggcagatcacttgaggtcaggagttcgagaccagcctggccaacatagtgaaaccccatctctactaaaatacaaaaagtagccaggtatgatgatgcgcacctgtaatcccagctactcaggaggctgaggcaggagaatcatctgtacctgggaggctgcagctgccgtgagccgaggttgcaccactgcactatagcctgggcgacagagcgagactctgtcttgaaaaaaaaaaagttttccttctccggggaagcctcattttacagctctcagttgctagagagcagtaggttgaacgcctggagtgcccacccagctctccactaacaagcctggtgcatagattgtcactgtcatccacaccaagacctctcctgcctcttgcactcccttctcaggcctgggggccaagacctctgcctgtctatactgacacatcttttttttttttttttgagacagagttttgctcttgttgcccaggctggagtgcaatggcgtgatctcgggtcaccgcaacgtctgcctctggggttcaggttcaagtgattctcctgcctcagcctcctgagtagctgggtttacaggtactcgctaccacacccagctaattttgtatttttagtagagatggggtttctccatgttggtcagtctggtcttgaactcctgacctcaggtgatccacccgcctcagcctcccaaagtgttgggattacaggcgtgagccactgcacccagctatactgacatatctctacacacatgtgtatacctgcatatagatgtatgctacatatgtatacctatttgtatatgcacaggctcacagacattcctgcatgtgctcaagcacataaacccagataaatatggattgatttatacacatgtacactcacacctgtatgtgttaacagatagttgcagattcccagagccgactgtaagtacacacagctgagtacaaatacccacatctgtgtgccccccaggcatgcacatgttcgtgccaaatggcccaggcacagctgaggggacctgtacttccttcccctacatccccacacatgcatcaaatcctgcacaaacccacttacctgacttctgggctgaggtctggcttgagtccatagaaggtggcagagagtgtgatcagccatccaggtcggagccgtccctcctggcattccaggaaaggaggagacagcctcacctgctgcgtgtcccccacatatccatctgcctgcggccacttggggctgccgaggctccctaggtcattggtcaacactcgcttcttcagggcaggggtgtccaggtccccaggagggttctcctcctgcacccagttcccagacaagtcctgcaggatggtttcctccccagtccgggtggcctgcagggccagctgtaggtggctggcccctggtggagggttaaaggtcagcaaagccctgtacactcttgggtccccctcggccacgctgcggaccagtgcctggtaccattccacatcctcctccacactggactcacggatgtcgttggcttgcagcagcatgttgagaaaattggcggcctgggcaagggtgcccgctgccccctgtaggcttggggggagccctggcatggctcctgccccacgcgcttcatagcgctcactgcaattcacctgtgatagctgctgggcatctccagagtagagataagcgagggcggcctcggccccctctaggggcacctgcatgggtacagatcctggcttgacttgggaagacagagggggcagagagcggatgggccgtggaccccccagagcccaggcacagacaaaacagcagcccagcagcccccacataggagggggcatgaccgctcccctggtgcccatccttggggcagctctcaggaccctggggtccaggctcaggagagcccaggcagaggctggctgcagtctgggggctgtcggcctccacgcctcctatgctggcgttccttcttcctctctccgtctccctctcacgctggtgccagctcgcctgcttttttcttctctctaacgtcaccagctggcttctggatgtaggtatgagggccctgccccctactgtctcagtgcggccccctatctcaaacctcttaatcccagcaccccactctttcctcccctcctatccagtattcaggctccctccatcccccatccacatctgctcccgagggagagagatgggagggaaggggagacgaaggcaccagttgtgctctttctccctccctccctctgcctgccctttgctccattaggagagatgggcaaatccaggatggggcaccatagcaaccgcagatgagcttgtgcccctctctccacccctctgctccactcaggctcctggcagcaattgcaacaggcacactaaggggccaagctgcatctcctggcagtctgcgctggctgcctgcacccccctgaccctgtgctgctgagctgggatttgagaatggggatgttgagggcaggaaagacagcctaatagtaccgtaattggtctttgtacagactgaggcagcttataaggtgcttttcatgtgccttatctgaatgagtcttccccacagccatgtatggtgaatgttcttatccccatttcacagatgcagacactgagactcacccaaggtcacaaagcagctcactcagagacttacatccagagctctgactcccctacattgcccatccaaaccaccaccatcaccgttactcagcctcagggactataacaaagcctcctagcagaggcgtcaagggacttccctagaaccacagtgttgtttatgacagagccgcagcctccacccaggtgtccgtccctacaacccaggcctccttctgaaccaaagtcgacaagcacagtggcaatggtggcgggagagaggtgggcaaggagaagacagtgaacacagttttgcctccatttcttacaccttcattttgtcatcctaagttctaccttcttctttttttttttttttttgagatagattctttgtccacccagctggagttgcaccagcgtgatctcggctcactgcaacctctgcctcctgggtttaagcgattctcctgcttcagcttcctgagtagctgggactacaggcatgtgccaccatgctcggcaaattttattttatttttttttttaaattttttagtagagacgggggtttcaccatgttggccaggctggtctcgaactcctgacaagtagtctacctgcctcagcctcccaaagtgctgggattacaggtgtgagccactgcacctggccccttctccttttcttcatgaaaactgtggctactctctctcgcttttccccatttttcttacccctcacctccttcctgctgctaggcacagtaactggggggccctgagtcagtgctgtctgagccggcctccttggatccggaagggcatggattcttggggaagccacagaacaaagctcctgcctgcccacccatcacttttcccttgatgatgggcttcctgcttcaccaggcaatctggccccgcaggcgcaggctgtctcttggcttcttcccttcaaaccccctccaaacccccaatgtctggaacctttgatgtccaagatcattgagtgtatgtaggtagggatgggtggtggttgccaaacatgtcccttgctttccagttgacctctgcaaacaataattctttttttttagacagagtcttgttctgttgcccaggctggagtgcagtggcacaatctcggctcactgaaacctctgcctcccgggttcaagtgattctcctgcctcagcctcccaagtagctgggagtacaggcgtgtgccaccacgcctggctaattttt

SEQ ID NO: 1244078 - DNA, 4001 bp, Homo sapiens
gtccctaagcccccacctccagtttccccctgattttgtggttggtgaccagcaacttccttctgcacctgacccttcaagtcttgcttctcctgccaaccccctcaatatagaaactttcaaggaatgagagaggagcctgtacctgcccctcaccgcatccaggtaccatgctgctgcccagcagccaggctgctgcttttagtaagttgctgagtaacttaacagcctcagaggaaacaacctggtcccatcctgaaatatcttatttctctggttcccccagaaatggaagggcaggtgggaagacagaaatacatggactcaggtgggaaacctgggctttctgggcgtggctctcatccactgcctaggacagggaccctcagagagttaaagagaagctcagaagagcacagctccagccctctgatgccgggagtgcacattcagccaatgccttttttttttctttttttgagacggagtctcgctctgtcgcccaggctggagcgcagtggcgtgatctcggctcactgcaagctccgcctcccaggttcatgccattctcctgcctcagcctcccgagtagctgggactacaggcgcccgccaccacgcccggctaattttttctatttttagtagagacggggtttcaccgtgttagctaggatggtctcaatctcctgacctcgtgatccgcccgcttcggcctcccaaagtgctgggattacaggcgtgagccactgcgcccagcctttttttttttcttgagacgaagcttcactcttgttgcccagactggagtgcaatggcatgatctcggctcactgcaacctccaactcccaggttcaagcaattctcctgcctcagcctcccgagtagctgggattacaggtgcccaccaccatgcccaactaatttttgtatttttagtagagacagggtttcactatgttggccaggctggtctcaaactcctgacctaaggtgatccacctacctcagcctctcaaagtgctgggattacaagtgtgagccaccgttcccggcccaatgccaccttttaagatggtggctaagggactgacaagatggactcagctctggtcagaggcttttcctcaggaccctggaggaaacttctgcctcctgtgggtccccagaccctgcactaagactgagccttctgatccctgaacgttcaaatcatgtccgtgtctcccctccagggctgtaaggtctttgaagctggtgaacaagacttctagaatccactgccacagctggtgctgtgcctgaacacagtgggcatttggaagtcacctctggatggtcccaggtgcatttctccacacccagggttgtcccctccatgttggagttgcatcttctgcttaaagattctcagagggttcaaggaggggggtaggaggggaacctccttccgccctgagtctcccccaccccacagctgaagcccagctccagcctcagattattttctggacaaaagggccttttgcttcacttccctggaatcagttgtacaaatatttttaatcgcctccgaaatcggcctttccccaggctcagccaccctgcccccagctctcctgtgagtcagtgcagtccagttgctgaacctccctcctccctccttctctctccagggggcgcagaggcctggtgggctcagaggctcagaggcccagaggcccaagcagccctgactggtttcccccagcaacaagtggcttcatccagcaaccggggagacagccaggccttctcacttctccagagcaaaactcccttcctcgctccagcatcatccacacacaagcctgagaccccctccacccaccagggccaaggataccgcactggaaagagagctccagcgcgtcacagggccaaccaaactcaacactgacccatggccaatggctgtcttcaagggtgctgtgaccagggcactcttcagggaggttcccccagggataccacagagcacttgccttcctcccatcccacacactcaagagcctatagggaaagacgatggcccgactgacagccttcctgcctccactcctatcggtctctcccagtccctggttaggtcccactgtctcacccctctgtgcagggcgctcaggcgtttaccccatcgataagaaggcgcacaggagacgcctgtgcctggaaggagcggcctcagtgtgtaggttggtggggggtgggttggggttcctcgaacctcagcctagacaccccacccctatccccctgcccctgccccgcaccaagaccaggcatttgggccaaaatgccctgagctctctgagacttggaaatcttcaagggtctgctctggaatgtcactctggaatgcgccccaccccccaatgcactccctcccccagtccagttgaaggcacaggggtggggggccggcggggagaggaagctccaggagcacaaaaccctacttccaacagtctcctctcccgggctttaggatcttgatcgtggagtttgtaagtgattgggtcttccagcgtgtaacactgcgggcctggggatggaggtgcaaaggacgctggaaaagccagccgggagtgggggttcgggatctaggggccaggctaccagaaggggaggcgctttgatagtctgaatttccaaacttccctcagggggattctgaaccctctcgtccctacttgggtcgacggtactggggtctacacctgcgctccctgggtggctggaatggggagcaagggaaccagtcactctctcccatttttagggccacagaaacctgccctccacatccacagtagcaggcggcagagaggacgccacccacgagagagagtgaccgcggactcccaccgagaggcaggcggtggaggggctcctcttggagaccccgattatggagtggtttcccctccctccagcccgagccgcagcgccgggctcccccacccccccagtccccagccggctcgggtttgaaaactttcagcgaccgagcggagttggcgcggcgtccccagcccgcaggatgtccagtccccccgcctctgccctcgcccactccccgccgtcccgacccgactcttccgggcggcggagcgggaaggcagcagcccttacctgggactcgccgccggccccgctccagcgcagcgtttggggccaactccagccccaggcggggggcgggcgggggtgggagggacgcggcgcggggcgctgggccaggcccggtcctggctgggatggcggggcccgggccgggacgcagggcctgcctctccctgggaccgaggctgagccaggcgcgctgggttgctcgctctcgcgcgggcctgtccccaggcagggctccttgctttcggcgagggtgggctggagcctgcatcaccgttacatcacctccattcagggcgctaatcgggcgcccgccgcgctccaggtacgtgcgctccgtttacacaggaacaaagcctgcccggccctccccgccccgactcacctccaggctgagccgactcgtactttccggctggtgagggagatgggagtttctggccctgccggcgtgtgggttgttgctgttgactgccacgcccccgcatgcgggcgcgcgcacactcacgcgcactcactttctgggctcggccttcgccggggcaattggtgtgagggtgcagccctgcgcaccccccaccgcgtcttccagagagcgcgcctacggacacgcgcggggctaccttggcgcgtctccgtgggggacacctagcctttgtcaccttcgtcctggccctcccgtgagacacacttcaggcacagttcgctgggagcgggccggagcgaggcgcacactcaagacagagtccgtctttgtcacgccttctgcgccccctcccctccccagcttgcacacgtggacacaccgcacaccgaggttcgccttttgc

SEQ ID NO: 1244079 - DNA, 4001 bp, Homo sapiens
taccccatcgataagaaggcgcacaggagacgcctgtgcctggaaggagcggcctcagtgtgtaggttggtggggggtgggttggggttcctcgaacctcagcctagacaccccacccctatccccctgcccctgccccgcaccaagaccaggcatttgggccaaaatgccctgagctctctgagacttggaaatcttcaagggtctgctctggaatgtcactctggaatgcgccccaccccccaatgcactccctcccccagtccagttgaaggcacaggggtggggggccggcggggagaggaagctccaggagcacaaaaccctacttccaacagtctcctctcccgggctttaggatcttgatcgtggagtttgtaagtgattgggtcttccagcgtgtaacactgcgggcctggggatggaggtgcaaaggacgctggaaaagccagccgggagtgggggttcgggatctaggggccaggctaccagaaggggaggcgctttgatagtctgaatttccaaacttccctcagggggattctgaaccctctcgtccctacttgggtcgacggtactggggtctacacctgcgctccctgggtggctggaatggggagcaagggaaccagtcactctctcccatttttagggccacagaaacctgccctccacatccacagtagcaggcggcagagaggacgccacccacgagagagagtgaccgcggactcccaccgagaggcaggcggtggaggggctcctcttggagaccccgattatggagtggtttcccctccctccagcccgagccgcagcgccgggctcccccacccccccagtccccagccggctcgggtttgaaaactttcagcgaccgagcggagttggcgcggcgtccccagcccgcaggatgtccagtccccccgcctctgccctcgcccactccccgccgtcccgacccgactcttccgggcggcggagcgggaaggcagcagcccttacctgggactcgccgccggccccgctccagcgcagcgtttggggccaactccagccccaggcggggggcgggcgggggtgggagggacgcggcgcggggcgctgggccaggcccggtcctggctgggatggcggggcccgggccgggacgcagggcctgcctctccctgggaccgaggctgagccaggcgcgctgggttgctcgctctcgcgcgggcctgtccccaggcagggctccttgctttcggcgagggtgggctggagcctgcatcaccgttacatcacctccattcagggcgctaatcgggcgcccgccgcgctccaggtacgtgcgctccgtttacacaggaacaaagcctgcccggccctccccgccccgactcacctccaggctgagccgactcgtactttccggctggtgagggagatgggagtttctggccctgccggcgtgtgggttgttgctgttgactgccacgcccccgcatgcgggcgcgcgcacactcacgcgcactcactttctgggctcggccttcgccggggcaattggtgtgagggtgcagccctgcgcaccccccaccgcgtcttccagagagcgcgcctacggacacgcgcggggctaccttggcgcgtctccgtgggggacacctagcctttgtcaccttcgtcctggccctcccgtgagacacacttcaggcacagttcgctgggagcgggccggagcgaggcgcacactcaagacagagtccgtctttgtcacgccttctgcgccccctcccctccccagcttgcacacgtggacacaccgcacaccgaggttcgccttttgcacgcacggtccttctctgggacctccaccagtcaccaagcgtacgtgggatcgtcaccaagcgctcctctcacgcgtgggccgagtccagaccactctggaccgtgggcaaaggtccccctcggcccgactaccccgcgcccgggtttcctgtgaccgttccaggttctgcccaactcggagcgcgctctcccctcccggcgtccccgttccctgctccgacttgtcctaattagccttcacggttttgttccccgaggtacagtgtttagcgcgaccccctgggcctctgcgctccgggacacgttggctctgactccgagtccgtcctttccaggaggtcaggttcccaccagccccaccccccactccctgttccggggtggatctgtgggttgccaccctttcccctccggccccaggaatctgctgaagctggaccgcagaaattgggaagcgaatccaggctggtacttatccagcccgataaacaagagattttccggccgccttcccccggggctgctggcctcgcggggggtggggtgcgcagtcctgggggcccgcagcgaggcctagttagcccgcgccagaggcccgtaggggctgaggcgcacagaggagggagaggttgttgggcctggccagggccctggagacgcggagggagggcagggcgccgagtctcggggtgccggttctcatgacgccgaattgcctgggggatcgccagcggtgcgccggtcggagccagctggtggcggggcgggcggcccggagtgtttgctcaaccctgagcgcccgcgagggggaggggaggcagctggtcacgggctagggggtagcaaggtggaggagcgggggctgggaaaggggagggtatctcccgggctgcttgtttgcgtgcctgccgcggtctacgacaaccgggagtctaaactctatgaatcacccggagttgctggagcgataaacctcaggctggttcctcccctcgcacaccggcttctcggactcctggagggaatgtttgcttagcggccggagctggcggtgaggccctggttctctagaaccctgtatcccttcctggccttgccctcacgggctggtctggggtggcgaagactgaattgtttcaagtctcttcaatattaagaagaggggcgcagtgctgctgctgatctgttgctcactcctgggctcccttccgtagctccacctcccaccctaagattcagaggcccccatgccagggaggcaaacgcttgtagggtccaagcagttgagtgccaacgctagaaaggcaaacggcgggtcagacctaggcgaggggcatccgtgactgtgggctgggactagttctcgtgaagcaggcaactggtgctgaacacagtgtgctgggaggggccgctcattagcatatgtgaaaagccagctaagagctagaggaaggtggaatggaaatagtccccgagactgcttgtgaccttaagaagccaaagatgaattgtggatctggcagatctgtttcaatttattttcaagctttgggaatctcttttccctacctagattctccaaaaaggcaactctttaccactccctcccgacccaggcgggggaaaggctggggcatctgaggcctggacggagcagcggagccctgcccactgccagccctgcatggtagatggcggcggatatgtagggaggtttcctgagagctgtttgctctttttgtgttcactccgtctcacttcctgggcaggatttgcctttaaaggacaaagcaagtcctttggggccgatgacatgggcttcagccttcagggtccctgttggtctctgctctagtcccgggggcctgtgctggtccagagtggggaggcaagagttggagaaggcatgagacccctccaccatgagtcagaccctggtgggggctgctggacccagcgagcctgtgatgctggaagggaagttctgtgggaggtggcgctgctttccgagactccagccacagggtcctctgtgcccccaaatgtccttcactttgatttaataccccagtaggcgtagaacccattgcaaactctgttttcaccaaaaaactacactctgagaagtgttcaaagagtgctactgttcaaagagatcttgaggccca

SEQ ID NO: 1244080 - DNA, 4001 bp, Homo sapiens
gccgcgtactgttccagatcctgggagcaggcacagacaagagtcaggcaggatgggaggcaggaccctggccccaggccctgagggtcaggagttggggcctgactgtcctagccagaatgtcgccctgggcccataaccagaaccgggcatgggggtacgagactgactgctgtcccaggagctacgaagaccgctggggtgggcctggcgcaggagcctcaggagtgggaccctgcacccgggggctttcggggatagacacccactagtgactgctggtcgctaggctgagcggggaggagacctgccctggcttctccatgagcagcatctgaagctgagctacaagcctcatgtgagtgcgcaatcagaaacgctgatggtttcggggtcagaaaaagacgacagcgatcactgaggaggatcattctacctgctgtgcaggctgcagcggggagtgtgccctggacccctcagcaggactgagacacccaaggtccccccactgggctccgtaccaggctggggttctccaccacgtagttgacgtcaggtgcattctgcgggtcttcctgggggtccacgtcgatctgcatgggctccacggccccctgcaacatgggccaggcacctggcacctcgtcctggggactgccccaggagggcgagagacccgcactgttctctgaggtcagctctgcccaagatcttccaggccagtcggaccacactcccgccgctgctgtcccccaggtgtgccctcccagtcacccccgcccccacccaggctcctgtgccaccacatcagggaggggtctcctcacaagactctaaggctcagaagcagaaacccctcgcctgattctagccgctcatctctgaaagccagaaagcagacaggggacaaccaactacacaggggcctctgagggcccctacacgttcccagccaccatcctgatgtagtttcctccaagccacggagaagaacgggacgccacctcaaccccaggaggcaggaggaccagcccccggaatctgtcctgagcagcggagcagcaatactgggctgagagtcacgccacggagttgggagaaggggaaaagagtcatctcagggagcctcatggcccccagctgggagacacagagaagccaggacctcggcttaacacaaagcaggctggaaaagccgccatgccgggcactcgccggacccgtgggcctcccgcgctccttcgggaaaagcaccaagagctcggctccctccgcaggccccgggcccaccggggctccctcccctcctgcgcttggcactgagtccctgtcctcggccagcagagcagcaggggcccagccacagcaggggcggccggggccctgctcccccctccctcgctcgggggtccctgtcctggaaggtacctcgtagagcagcgtacaggccgacaggctggcgctcaggctgaagtccccggccgtgccgggcaggacgaggtctgacctactgctgtgaggggtgcagtacagatctgtcactgacgaggaggccgagctgggggccgagctatccctcattctgtcctgactttctgcaccccccgaccctgacacagagctggctggctgctgaagggagaaagagcgttagcgtcggggcggccgggaacctctcccgtgagctgctgggaggggaggcggggcgggcgcggcccggcggcccccgatcgcagcgcgcagccacggcggagacgcgccctcggccctgcagcccccgacgcgcgctgcccgcggaggcccggcacggagcgtgcccgaccgactcctggcgcaggccccgcgcccctgctcgacctcagcccggccccagtggcggggggcgcgggggcgcggaggcccggggcggcctcggctcgttacctgcaagttaaacacctgaaccggcagcggcatcttgcacccaccccgccgcggcgtgccgtccacttccggggcagcgaagccgtcgcttccggggcgcggggcggggcggggccgctgcgttcttaaaggggccgccgcccacccacggctccggccaggttctccgctcgcagcgccgggggtcccggcggccgcatgagccgcgcgcgtggggcgctgtgccgggcctgcctcgcgctggccgcggccctggccgcgctgctgttactgccgctgccgctgccccgcgcgcccgccccggcccggacccccgccccggccccgcgcgcgcccccgtcccggcccgctgcccccagcctgcggcctgacgacgtcttcatcgccgtcaagaccacccggaagaaccacgggccgcgcctgcggctgctgctgcgcacctggatctcccgggcccgccagcaggtgcgccggaccccgaccccgacggcgagccccacgcccacccgccccgcctcccagggtctaggcccggcccaggcccccggaggctccgcgcggggcgggtcggtctccggcctgggcagcgccccagaagcctcatagattgtttctcccccagacgtttatcttcaccgacggggacgaccctgagctcgagctccagggcggtgagtgtcccccactccccggcgcccgcgggatctgccccccgagcctttctcgctccgaagccacggccccttcgctgctgtgggtgcctttctctgcccaggctcccgaggcccggggaggccccgacgctgcccaggtcacgcggcctgcggagggcccaccctgccagccaagctctgctccccaccagcctctcacactagccgcttcccggggcgtggggctagtgccacgtcccctgaagaagcgccagcagggaatccgcccttccaggccaggtcagggcgagctgcctccgtcctgtttccactcaagagatcccaaccgatggccgcctgcttcagcctcggtggcaccagcagggtcagcgcgtgagggctagggctgtggttggacccaggcaaggtgtccaggcatgtcagacagccacgttgtgccctggcccttgggggcaggtggggcacaggccttaccccaaccccagtgccatcctctacgtgcgtgcttcccgtctctgattcgcaggcgaccgtgtcatcaacaccaactgctcggcggtgcgcactcgtcaggccctctgctgcaagatgtccgtggagtatgacaagttcattgagtccgggcgcaagtacgcggcgctgacccgacccgcagagagctcagagccaagctgggtgggggcctcctgtccagccatgccaggccctcgtgcccaggactcccctcgcccacaggtggttttgccacgtggatgatgacaattatgtgaacgccaggagcctcctgcacctgctctccagcttctcacccagccaggacgtctacctggggcggcccagcctggaccaccccattgaggccaccgagagggtccagggtggcagaactgtgagtgtcggagcagacgccatcggagcagacgccttccttgacaccagcccgggaggcacagcagagggcgtggaaagctggcttgagaagggcatagggttgggggcccaagctgatccacccaggtggtttgcatgtggtgtttcaggagcaggccaggaggccctcaccgtactgggcagagagggggtgtctgggccaggtggggagggtctggaggctacgggtcaatggcctgcagaagcccccggctctttttgctccaagaagcttctgttacctgggtgggatctcctaaggggcagcttaagaaagatgcctggggagtcccatgaagagtcaggggtgagaagccctgtcctgggcagctctgaccaccaccccatcttcaggtgaccacggtcaagttctggtttgctactggtggggccgggttctgcctcagcagaggccttgccctcaagatgagcccatgggccaggtgagtgggggtccagctgcccgggctggga

SEQ ID NO: 1244081 - DNA, 4001 bp, Homo sapiens
aggacctgagagctagagctcctgcatgggatgttatcacctgtctgagtgggctgaaagtggccatgcacagcatagggctgtggctgtggctgagataggtactgcactgcagggaatgccgaaggagctgagaaaggaaaagacagagccattaaaatcttttactgaatggcattcctcctttgaccttgaggaaggccaagccccatccctcctattactcacctctgagctgctgactaggactataagctggctgtgtgggcccatagtgaggtgggggctgagcagtcccataggcaccaccaggactgccttggaattgtccatgctctggtgtccctgcaaaagcagctgctgagcccacgtagtgccgggtctaaggaaggagaatgagaactcgcctacaaactccttgaaagctgaaacccagtgacttgtgtgtatctgtatgccccgtttccccctaaacttaagtgcttgatatgtttgtgacttgaatactggtggcaaggatgcatggatggaagtactaggggctaggcatccaatcctactctcaccgtaagcacttggggtccaaacatttgtttggctctgtcagctgccatgagggtgcctgggcgattgtgtcctccagggctccctagaaagggagaagggcttcatgatgctgaaatgggaggctgtgacctccaagaaggccggttccatctggtggtttctttagtcctcaccctgcatgctgaggagatgagttcctgtgtgaacagtcaggctctgctggtatgcagctgatgttagggtggtcaggtcactggagtgaaaggaagacaggtcaaagtcaaggacagatgccttctcttttgccattaaacactggttcttttactacctgatcccagttccacttggcccccatttcagtttttagcactctgatcccacctctgttcctttcgcctccgtttttcttcctcatgtaaaactttcttgagctgcaggaaaagctggtgcttctcttcctgtagagccaaaagcttctcctccaacttcagaatctgggatggggtgggaaaagaagatgaaggcagggagagtcaaacgaagaaatcaaagctgggaaagttcaagggactgcttacttgttccttggtctcctctaatgacattctctcttccatctcctttttcttccttctctcctgttcttccttcatcttctgttccatcatcttatccacctcttcttcctctggagaatcaggcagaatgaagaagaggcagggtagtgaaaacaattccaacgttacagattgaagaccagcaaaacccagtcatcccaacacgcctgtatgctctttgcctcgaggggacaagctccccatcgcggcaatagggaacggaaaggctttatcaggtgctctccaaggtccttcccatctcaagggttctggagcgtggaacaggacgcttaaatcccaccacaacggggctattccttccctcctctgcgctcggcagcgggcgcgctggttggccggtgggttgaggccagccttgaggtacaggagccattctgggccgtgcgtccccctgctatggccccggctcaccctgccgcttgcgctcccgctccatcataatgtgccggtgcagcgccctggccatggcgttggaaagcttggggcgctccaggagtgcgggcatggtgctgccgtgggcgctcgggccgtgggcgcccggctgtctctgactgccagacctcagacggggcctgcggggaggcgggcgctcagagggggccgcgcccggcccaggcggaagcccgtccgcccggcccgctcgccgccccggtcacgtgtcccaggagcccgccacccggccgggaccgcagccccagtcccaccgcgcgcgggcggcgccggggtccccggctcgctgctgccgctccctgcccagccagcgcggacgactgcccttcctacccgccttctctgcgctttctcagcggctccgacgcgccctggcccctgcgtcacatccggcggcccggccgagtccttccggagtcacggcggcggccgacctcacaggtgaaagaaggcggaagcgcgctgcgacgggtgcccgcggcgtacaaaccccgtcgccgggaacgtgagcgacgacggctgcagactggccttggcatcctcagctctctttaatttcgcgggcccacctggtggcaccccaggggacgcgggctccggagaggggcgcgcgagagagaggccgaggcggaggctctgagacggtgtttattggctccttagaaatcagagtcagtaacaactgtacagaggcccccatcttccgtgcgcccacccttccccactcccgcccggtggccccggaaaaagcagcttcatgtgggcacagggagagactcctctgggattcacagtaaccagaaacaaaaacggaaataaattaagtgatgtggggtaggggagtaaaagggagtcatgttccccaaatcagtgcatgaagaggggtaccagggcctggagctgggctcccacgactcctcccatcagacggagtgctgggcctccggacatggagctgtgccacttgccacctacatctgagagcctgcctacatgctcctgcgcggctgccaagctccagcacctgcgcatgccacgagtcacgggaatgaggtggaggcagtcgccactcagagtccatgggcccgcggcccgactgtgcttgtagtagtggtgtctcacccctcattccacccgtaccagcagggcacagaggagtgtggcccccttctccttagtgacccactcaagttcggctggactgaagtgagggtcaggaggttctccaagggcagcggaagggggtcccggggtgtaggagccagggcgcacacacacctggaacgccacctgagcctggtgcgtccgctgggatttggggtcccggaatctgtcagacaagaaaaaataagggagtgaagcctctcgccccatcacctcccccttgcaaagtctgttccaaccacacaagccttgctgtacctaggaaatactcccaccttatgggaacttcgctctagctgttctacctgaaatgctcttcctcccaaagcctgctcagctacacccttcacttccttcttcaagcctttgctcgaatctctcccaccttcttaggatgtccacaccaaccgcactgctgtctccgccccattctttctctgtttccatagtccttacttattacctttaaaaatactaaatactggcggggcgcggtggctcacgcctgtcccagccctttgggaggccgaggtgggcggatcacgaggtcaggagatcgagaccatcctggccaacatggcgaaaccccgtctctactaaaaatacaaaaattatccgggcttggtggtgcgtgcctgtagtcccagctactcaggaggctgaggcaggagaatcgcttgaacccaggaggtggaggttgcagtgagatcacgccactgcactccagcctgggtgacagagcaggactccgtctcaaaaaaaataaaaataaaaataaataaataaataatacttattacgtatgaacattgtagagagaaaaggcagaagttccacaagagcaaggttcctttttttgcccactagaagagtatataagtagtatttgttcaatgaatgaagaaagggctgagttggagactggcagctagcaagacgagatgagaaaaggggagggcgaatcatgaagaccccagtggctgcgcttgggccctctccatccgagcccctggaaatctctccccacccctcccagtactcactgcactttggaggccagggtctccgccccagcatattgaagggagggggaaagcagcacaggagggggctgctcctcccgaggaggtgcacagttctcgccaggctcctcgaaccctaccccaggttctcccttca

SEQ ID NO: 1244082 - DNA, 4001 bp, Homo sapiens
atgacaggcagcagaaagtaggttcagggagcccagggctggctgtgttgggtctggaccgtcgccctttcccatggagatgtcaaggtgacatgggcttcctgagtctgggtctcatcatccaggctgctcgtgcagagatgggagtgaagccactaaccacatgcccctccagctggcaacagcatgggggtgcgtgcacccagaaacgcctggcctatcagggagggaggctttgtcccagggaggtgatgtttggggccatttgtccagggtgagtccatgagccagagttttcatccaagaccaaagttcagatttcaagaacgggcttcatcgcccactctcccaggctggactcaatctgtaggcaggcagtgccatggcaggggctggcccacagggagcactggaaaatacttgctagacgagaggacaggatggtcgcggagctcagcttccaccccagccacttgatccctccaagcctggctcaacgcctcccgcgcaccccattcctatttcatcactgccccactccctcccaacaccacacttgggtctagagacctcgaagtgctctcagatgagaaaccaagacttggatccccgcagagggtcatgccttgggctcacagccccagtgctcagcctggccctgtccccatctggccacatgtccacgaggccgacagccagcactgcagtgaccccaggtgccagcaccagcaccccagcatagagaagaaggaattgctcctcctcctctggaccccaacccccagcccagcctgttcagaccaagcgcaagttccacagccaaagggacacgggttcaaaactgactccataccgagcaggtcatgttgcctccctgtgcctcagtttagtcacctgtgaaatgggggtgccagtccccattgcttaaatggtacatgaggtgtgctgctgagttcggggcctggctatagcagggtgatggcacagggagctctcccgtcttgtgcttgaagcttgtggccaagggcagcgcccagggctcagcgcagaggagcatccagtctaacacccattgctccagtggggaaactgaggcccagggaagggcagtcacttccctagtgtggtttactggcagttccagtgcacacgtcttggcatggccactcccagaatcctgggcatggctttcatatgcaaacttttaagcaaggacatttccagagacacattccacaggcccaactgtctagaccgtcttggaaggctgcaacatctgtcaaaagcggcccagacaaggagaaatgaacggtggtatgactctattttcccttttctccacactactgggaagctcatccttgacactttcatcttagctattttagccctactaggttagcatgtgtacttatttctttcctaagaccttctctctctccctctttctcgctctgttctccattcccatactctgtctctctctctagctctcattctctccctctctcaacaattttcttttcaaactttttcctggaaaactgggggttgaactaactcctgccagacactgtggtaatatctcatcgaatcctcacaacagccccaaaggagggtcattagttatctccccatttcctagatggagaatctgaggctccgagggaaaaggtggcttgtccagagtcacacagccaataactggagaggctgggcctgtcttccaggggccacagtctgcttgggacagtcccaggtccctggttcctaaatccacccccaccccgtgtggggccaactcagcaggctccagcccccctaccttgagtgtgtctcccttgttgaaggccagctcgtcgctctctgtagcctgaaagctgtacagggccacggactccatgccgctgctcggggctccagcagctgggctcagagctgggccgacagcttcctgcttcctctgcagtcgaggacggtcttcctttgttttgagtgcgcgtttgttcttttgaagttgagactgaaactgctcctgatgggggagaaacaggaaacagacatgtcacagagcagggagggcttgtgagccagctctgtccctacctcagaccccaggtgccaggaatggcccttggggagtctccctgaagctctgggagtggggcccccttgtgcccatgttttatcatccgtaaaagtgaggtgcctggaggagaagtgccaaagctgtcctgctggctcaggcactgagtctcatggcaccagatgctggcctcccttcaccaatctgccaatgactctccatcttttcctaaaccctgatgcctcttgtgatgccctgcctcctgctccttcaatcccaagctcctcacctggcattcaaggcccttgcaatccaccacctccacctgcccctacaaacagcccccattctcatcctttgtcatccccttcactctaaacaaacccagggcttcagccacagcaaggggccacaccaaactctcatttcaaccccagacttttgcacacgtggttcctctgcctggtgttctcctctttctgctcccaggagactcctattcatccatcaaagaccagctcagaaggtacctcttctggtttagacactgggcaccttaggtgggacttaaatcctaaggtcaacaagacttgtaggtcgggcgcgatggctcatgcctataatcccagcactttgagaggccaagatgggcggatcactggaggtcaggagttcgagatcagcctggccaacatggtgaagcctcatctctaataaaaatacaaaaaattagcctggcatggtggcatgtgcctgtaatcccagctactgggaaggctgaggcacaagaatcgcttgaacccgggaggcagaggctgcagtgagccaaggatccatccaggctccaagcaatcctcccacctcagcctccagagtagctcggactacaggtgcccaccaccatgtctggctaattatttgtatttttagtagagatgggttttcaccatgttaccaaggctggtcttgaattcctggactcaagcgatcctcctgcctgagattgcgccattgcactccagcctgggtgacagagcgagtctccttctcaaaaaaaaaaaaaaaaaaaagagaattgtaaataaatctctacctttccttagtgggtttgttatgagcagtgttatcggtgtagcaattctgaaactgttttgcaagtgttgcaggatagcgcacaaatggacaagcacagctgtattgtttggaaccagggttctccctgggaaagaagggagacacagacgtggaaggaaaaccaggcagagccctgtggtgttgcatggacactggatgaatcagtgtgaagtcacattgttttttttctgtaaagaagtttttcttccttcatttatattaatataggctcatggtttcatattttagccagtggattataatccattactattacatttattttgatgcttaaaatgcccctgattaggccagtggggtctccttcaagctgtctccttatccttttgacatggacccatcattctatgaacacaccctgaccttctggccaataatagaagaatcgcttgaacctgggagatggaagttgcagtgagccgagatcgcaccattgcactctagcctgggtgacacatcaagactccatctcaaaaaaaaaaaaaaaaatagttgagagggaagaagagaagatgacagctgcccgccgcccactctggagtccctgagccaaccaggcaggatggagctggccctggcctcacccagctccattccagggcttctccacgctgccctctactcaaagacccctgccttctggctgcccccgaccccaagggtgacaggatgttataaggcccctctttccggctctgttgcagctgaggtttcaaagcctcagaatgatgcaatggaggggttgggatcggcccccgcc

SEQ ID NO: 1244083 - DNA, 4001 bp, Homo sapiens
ctggaccgtcgccctttcccatggagatgtcaaggtgacatgggcttcctgagtctgggtctcatcatccaggctgctcgtgcagagatgggagtgaagccactaaccacatgcccctccagctggcaacagcatgggggtgcgtgcacccagaaacgcctggcctatcagggagggaggctttgtcccagggaggtgatgtttggggccatttgtccagggtgagtccatgagccagagttttcatccaagaccaaagttcagatttcaagaacgggcttcatcgcccactctcccaggctggactcaatctgtaggcaggcagtgccatggcaggggctggcccacagggagcactggaaaatacttgctagacgagaggacaggatggtcgcggagctcagcttccaccccagccacttgatccctccaagcctggctcaacgcctcccgcgcaccccattcctatttcatcactgccccactccctcccaacaccacacttgggtctagagacctcgaagtgctctcagatgagaaaccaagacttggatccccgcagagggtcatgccttgggctcacagccccagtgctcagcctggccctgtccccatctggccacatgtccacgaggccgacagccagcactgcagtgaccccaggtgccagcaccagcaccccagcatagagaaggaggaattgctcctcctcctctggaccccaacccccagcccagcctgttcagaccaagcgcaagttccacagccaaagggacacgggttcaaaactgactccataccgagcaggtcatgttgcctccctgtgcctcagtttagtcacctgtgaaatgggggtgccagtccccattgcttaaatggtacatgaggtgtgctgctgagttcggggcctggctatagcagggtgatggcacagggagctctcccgtcttgtgcttgaagcttgtggccaagggcagcgcccagggctcagcgcagaggagcatccagtctaacacccattgctccagtggggaaactgaggcccagggaagggcagtcacttccctagtgtggtttactggcagttccagtgcacacgtcttggcatggccactcccagaatcctgggcatggctttcatatgcaaacttttaagcaaggacatttccagagacacattccacaggcccaactgtctagaccgtcttggaaggctgcaacatctgtcaaaagcggcccagacaaggagaaatgaacggtggtatgactctattttcccttttctccacactactgggaagctcatccttgacactttcatcttagctattttagccctactaggttagcatgtgtacttatttctttcctaagaccttctctctctccctctttctcgctctgttctccattcccatactctgtctctctctctagctctcattctctccctctctcaacaattttcttttcaaactttttcctggaaaactgggggttgaactaactcctgccagacactgtggtaatatctcatcgaatcctcacaacagccccaaaggagggtcattagttatctccccatttcctagatggagaatctgaggctccgagggaaaaggtggcttgtccagagtcacacagccaataactggagaggctgggcctgtcttccaggggccacagtctgcttgggacagtcccaggtccctggttcctaaatccacccccaccccgtgtggggccaactcagcaggctccagcccccctaccttgagtgtgtctcccttgttgaaggccagctcgtcgctctctgtagcctgaaagctgtacagggccacggactccatgccgctgctcggggctccagcagctgggctcagagctgggccgacagcttcctgcttcctctgcagtcgaggacggtcttcctttgttttgagtgcgcgtttgttcttttgaagttgagactgaaactgctcctgatgggggagaaacaggaaacagacatgtcacagagcagggagggcttgtgagccagctctgtccctacctcagaccccaggtgccaggaatggcccttggggagtctccctgaagctctgggagtggggcccccttgtgcccatgttttatcatccgtaaaagtgaggtgcctggaggagaagtgccaaagctgtcctgctggctcaggcactgagtctcatggcaccagatgctggcctcccttcaccaatctgccaatgactctccatcttttcctaaaccctgatgcctcttgtgatgccctgcctcctgctccttcaatcccaagctcctcacctggcattcaaggcccttgcaatccaccacctccacctgcccctacaaacagcccccattctcatcctttgtcatccccttcactctaaacaaacccagggcttcagccacagcaaggggccacaccaaactctcatttcaaccccagacttttgcacacgtggttcctctgcctggtgttctcctctttctgctcccaggagactcctattcatccatcaaagaccagctcagaaggtacctcttctggtttagacactgggcaccttaggtgggacttaaatcctaaggtcaacaagacttgtaggtcggtcgcgatggctcatgcctataatcccagcactttgagaggccaagatgggcggatcactggaggtcaggagttcgagatcagcctggccaacatggtgaagcctcatctctaataaaaatacaaaaaattagcctggcatggtggcatgtgcctgtaatcccagctactgggaaggctgaggcacaagaatcgcttgaacccgggaggcagaggctgcagtgagccaaggatccatccaggctccaagcaatcctcccacctcagcctccagagtagctcggactacaggtgcccaccaccatgtctggctaattatttgtatttttagtagagatgggttttcaccatgttaccaaggctggtcttgaattcctggactcaagcgatcctcctgcctgagattgcgccattgcactccagcctgggtgacagagcgagtctccttctcaaaaaaaaaaaaaaaaaaaaaagagaattgtaaataaatctctacctttccttagtgggtttgttatgagcagtgttatcggtgtagcaattctgaaactgttttgcaagtgttgcaggatagcgcacaaatggacaagcacagctgtattgtttggaaccagggttctccctgggaaagaagggagacacagacgtggaaggaaaaccaggcagagccctgtggtgttgcatggacactggatgaatcagtgtgaagtcacattgttttttttctgtaaagaagtttttcttccttcatttatattaatatggactcatggtttcatattttagccagtggattataatccattactattacatttattttgatgcttaaaatgcccctgattaggccagtggggtctccttcaagctgtctccttatccttttgacatggacccatcattctatgaacacaccctgaccttctggccaataatagaagaatcgcttgaacctgggagatggaagttgcagtgagccgagatcgcaccattgcactctagcctgggtgacacatcaagactccatctcaaaaaaaaaaaaaaaaatagttgagagggaagaagagaagatgacagctgcccgccgcccactctggagtccctgagccaaccaggcaggatggagctggccctggcctcacccagctccattccagggcttctccacgctgccctctactcaaagacccctgccttctggctgcccccgaccccaagggtgacaggatgttataaggcccctctttccggctctgttgcagttgaggtttcaaagcctcagaatgatgcaatggaggggttgggatcggcccccgcctcagttctgaggtgcttctagccatatgaggggaggaggacttccccttat

SEQ ID NO: 1244084 - DNA, 4001 bp, Homo sapiens
agccgagatcgcaccactgcactccagcctgggcgacagagcgagactccgtctcaaaaaaataaaataaataaataaatgcttgtgtttagtagaagaaagctgattataagaattaactctggccgggcgcggtggctcacgcctgtaatcccaacactttgggaggccaaggcgggtggattacctgaggtcaagagttcaagaccaacctgggcaacacagtgaaaccccatctctactaaaaatacaaaattcgctggacatggtggtgggcgcctgtgatcccagctactcgggaggctgaggcaggagaatcgcttgaacccaggaggcagagttgcagtgagcccatatagcaccattgcactccagcctgggcaaaaagagcaaaactctgcctaaaaaaaaaaagtcactgagctgacccaatcttcctattataaagacatactagaagaaaacataagcaggcacagaagcataatcttaaaagaaaaagagtaaaagacaaaaataatacaagcaaaccacacttgcgacctagtggcaggactgatttcttagggatgaattcaatcttttgagcctccccgttctcagagaggggacttcagcctcccacggctctctagcaacccttctggctgactgcagggaacgcaggggacgcgcaaaagtaaaggaacgaaagcaaggaaagagagtctcttcccgaggaaaaagacggaatcttgaaatgagagaaaacgaacagcacgaaagggaagaaacctcgaaaaattacgccagagtggggactacaaggaggaaggggaagtacattagaaaaaaaggggggggtggggggaggaaggggcaaatgacttgcattacacaagcatttcgtgtccctagtggaaaggacagaagcagatagagaaggaaggaaataactggagaaagaggagtaagaaagccaaaatagactaatgctaatttctctcatgtgtctgacatttcggaaagtcaacagcatcaaaaagagacagacctcaagtgcacttcagtcccctgcaaactgcactttcacagcgtttgaagccagccttgaaaaactttctaaacaagccataactcatgtgtggcttacaatcatagagagggcgcgctgcaaatgaaaattaccagcgcccgctctcgccgcaatccttcctcggtgcagtccaacctgctactgctgaatttttcttgacaaatatttttcaaatagtttttttttttaagtgtcagaataaaggtatctcccccggctccagcagcaaacgttccaccccaaagtggattcccgcacaaaattaagcccaaagacgccaggagatggtgacgtggttgccgtgcaggtcgaaggcacatcaatcaccacagctgcagcccacaccagtcccccgccgccaggctcgggtagactgactcggtcggcgttcggcccgcctgggcttcccgggccccttccgtgcaaaccctcccgatgaaggcaggggacctcgccagagaaccccgacctcttcccccggactgcccagagccaagagccggaggaggacggtccccaggaaggaagcgccccaaaaggggaaacgtagagtccggagccccggggattgcgctccacgtcccaagcctcgccgccccgacgcgaaccccggggccggtcccggttcccccggggcccactcccgctgtagagccaagaggaaaaggcacgagagaggcgccgagcgcagcctcccgtactcaccgtggcgcagctgctccgctcagcgtccggcccgcccctccacaacgctgcgagcggccggcgaccccaaggctgctctgcgagggcagcgcttgctcccgccgccgtcaccgccacaggcacagactctgccacagccgccgccgccgctgccgccgcccggtcgccgaagcagcaatacctcctggcttccgctccccgtcggtgtcccgcgagaacttctccacgaggccccgccccgcccccgcgagacttcccccggcggaaaaggcccagagcgcaagcgctcctcctcagccgggcccctgcgggtagggaaccagctaggtgtcagggcgcatgcgccagacctccccgcagcaggtggcctccgcacggctccgcccccgggtcgccgtaaccctctcggtgccagagcgggtaaatgacagcttagccctgaaggactcttcccccgtctaatcactttattttcctcttctaccaaacctaggcagttggatgggtaggggcttgggggaggaagagatcttccagaatgaagcactccaaatagaggaccaggtcttaaaatatttgagaatccggtccgtacaaactctgctgtgttgaatgattggtgagtttgtttgctcattgattgaatcactgcagagtttgtacggaccggattctccaatataggccgaacactgtgctggggatagaacagaaatcttggcccttaaggaattcacggtctaggaagtagaagaaaaataaacaaataatgccataagtactgttataattatttggagtttgctgaggaagctaaaaaaatggagggggtactgctacactgcccattgcagaagagccttcacagatgtgatgcggcgatgtctgatctgagtcttggaggatgagtaggaatttgccaggcagagaagccagagtaagggcatttcagggaaagggaatggcacgtaagtacagaggctaagtacagaggaacggaggcgtgagagagaaagtcgtgttctgtgcagtgctaagtagttcaattcctgtatgaggccggtgagtacgggggagtggcagaagatgaggcttggagaaataattcttatttttcagttcccaaagctcttccaattaaaggatagaacacaacacacctagcgttactgtgccttctggaagccaacaaaatagcgctgaggtgagaataaccaagcatctgattctatagagaaaagaagcccattgaaacacagaaaatgaattgtgctttcaccaagtatttattgagcatcacctgtgtgcaaggggctctgcagggtcaaagaccaaccagatgaagcccctgctttcagtgctttgtaatctagagttgcctaatctgtaagacaagcagttggccccaagtgccactgaactacacatagggatggctgaggagggagccagtacttggtgctgagctaatcaagaaggatttggtttgaacggcaaagtgaaagcagggaggaaagaggaaagagtaatggaatcagccttttgttttttttttttttttttttttttgagacggagttttgctcttgttgcccaggctggagtgcaatggtgcgcgatcttggctcaccgcaagctccgcctcccgggttcaagggattctcctgcctcagcctcccgagtagctgggattacaggcatgtgccaccacacccagctaattttgtatttctagtagagatggggtttctccatgttggtcaggctggtctcaaactcctgacctcaggtgatccgcccaccttggcctcccaaagtgctgggattacaggcgtgagccaccatgcctgtttttttggttttttttttttttttgagacttgcactgttgcccaggctggagtggagtgcagtggcatgattttggctcactgcaacttccgcctcctgggttcaagcattctctcacctcagcctctcaagtagctgagattacagcagcctgccaccacacccagctaatttttgtatttttaatagagacagggtttcgccatgttggccaggctggtctcgaactcctgacctcaggtgatccacctgcctcagcctctcaaagtgctgggattacagatgtgagccaacactcctggccatcaaccaatgtttttgattagtccaagccccagtaattggggggaagagtgatgagagagagggg

SEQ ID NO: 1244085 - DNA, 4001 bp, Homo sapiens
gccgagatcgcaccactgcactccagcctgggcgacagagcgagactccgtctcaaaaaaataaaataaataaataaatgcttgtgtttagtagaagaaagctgattataagaattaactctggccgggcgcggtggctcacgcctgtaatcccaacactttgggaggccaaggcgggtggattacctgaggtcaagagttcaagaccaacctgggcaacacagtgaaaccccatctctactaaaaatacaaaattcgctggacatggtggtgggcgcctgtgatcccagctactcgggaggctgaggcaggagaatcgcttgaacccaggaggcagagttgcagtgagcccatatagcaccattgcactccagcctgggcaaaaagagcaaaactctgcctaaaaaaaaaaagtcactgagctgacccaatcttcctattataaagacatactagaagaaaacataagcaggcacagaagcataatcttaaaagaaaaagagtaaaagacaaaaataatacaagcaaaccacacttgcgacctagtggcaggactgatttcttagggatgaattcaatcttttgagcctccccgttctcagagaggggacttcagcctcccacggctctctagcaacccttctggctgactgcagggaacgcaggggacgcgcaaaagtaaaggaacgaaagcaaggaaagagagtctcttcccgaggaaaaagacggaatcttgaaatgagagaaaacgaacagcacgaaagggaagaaacctcgaaaaattacgccagagtggggactacaaggaggaaggggaagtacattagaaaaaaaggggggggtggggggaggaaggggcaaatgacttgcattacacaagcatttcgtgtccctagtggaaaggacagaagcagatagagaaggaaggaaataactggagaaagaggagtaagaaagccaaaatagactaatgctaatttctctcatgtgtctgacatttcggaaagtcaacagcatcaaaaagagacagacctcaagtgcacttcagtcccctgcaaactgcactttcacagcgtttgaagccagccttgaaaaactttctaaacaagccataactcatgtgtggcttacaatcatagagagggcgcgctgcaaatgaaaattaccagcgcccgctctcgccgcaatccttcctcggtgcagtccaacctgctactgctgaatttttcttgacaaatatttttcaaatagtttttttttttaagtgtcagaataaaggtatctcccccggctccagcagcaaacgttccaccccaaagtggattcccgcacaaaattaagcccaaagacgccaggagatggtgacgtggttgccgtgcaggtcgaaggcacatcaatcaccacagctgcagcccacaccagtcccccgccgccaggctcgggtagactgactcggtcggcgttcggcccgcctgggcttcccgggccccttccgtgcaaaccctcccgatgaaggcaggggacctcgccagagaaccccgacctcttcccccggactgcccagagccaagagccggaggaggacggtccccaggaaggaagcgccccaaaaggggaaacgtagagtccggagccccggggattgcgctccacgtcccaagcctcgccgccccgacgcgaaccccggggccggtcccggttcccccggggcccactcccgctgtagagccaagaggaaaaggcacgagagaggcgccgagcgcagcctcccgtactcaccgtggcgcagctgctccgctcagcgtccggcccgcccctccacaacgctgcgagcggccggcgaccccaaggctgctctgcgagggcagcgcttgctcccgccgccgtcaccgccacaggcacagactctgccacagccgccgccgccgctgccgccgcccggtcgccgaagcagcaatacctcctggcttccgctccccgtcggtgtcccgcgagaacttctccacgaggccccgccccgcccccgcgagacttcccccggcggaaaaggcccagagcgcaagcgctcctcctcagccgggcccctgcgggtagggaaccagctaggtgtcagggcgcatgcgccagacctccccgcagcaggtggcctccgcacggctccgcccccgggtcgccgtaaccctctcggtgccagagcgggtaaatgacagcttagccctgaaggactcttcccccgtctaatcactttattttcctcttctaccaaacctaggcagttggatgggtaggggcttgggggaggaagagatcttccagaatgaagcactccaaatagaggaccaggtcttaaaatatttgagaatccggtccgtacaaactctgctgtgttgaatgattggtgagtttgtttgctcattgattgaatcactgcagagtttgtacggaccggattctccaatataggccgaacactgtgctggggatagaacagaaatcttggcccttaaggaattcacggtctaggaagtagaagaaaaataaacaaataatgccataagtactgttataattatttggagtttgctgaggaagctaaaaaaatggagggggtactgctacactgcccattgcagaagagccttcacagatgtgatgcggcgatgtctgatctgagtcttggaggatgagtaggaatttgccaggcagagaagccagagtaagggcatttcagggaaagggaatggcacgtaagtacagaggctaagtacagaggaacggaggcgtgagagagaaagtcgtgttctgtgcagtgctaagtagttcaattcctgtatgaggccggtgagtacgggggagtggcagaagatgaggcttggagaaataattcttatttttcagttcccaaagctcttccaattaaaggatagaacacaacacacctagcgttactgtgccttctggaagccaacaaaatagcgctgaggtgagaataaccaagcatctgattctatagagaaaagaagcccattgaaacacagaaaatgaattgtgctttcaccaagtatttattgagcatcacctgtgtgcaaggggctctgcagggtcaaagaccaaccagatgaagcccctgctttcagtgctttgtaatctagagttgcctaatctgtaagacaagcagttggccccaagtgccactgaactacacatagggatggctgaggagggagccagtacttggtgctgagctaatcaagaaggatttggtttgaacggcaaagtgaaagcagggaggaaagaggaaagagtaatggaatcagccttttgttttttttttttttttttttttttgagacggagttttgctcttgttgcccaggctggagtgcaatggtgcgcgatcttggctcaccgcaagctccgcctcccgggttcaagggattctcctgcctcagcctcccgagtagctgggattacaggcatgtgccaccacacccagctaattttgtatttctagtagagatggggtttctccatgttggtcaggctggtctcaaactcctgacctcaggtgatccgcccaccttggcctcccaaagtgctgggattacaggcgtgagccaccatgcctgtttttttggttttttttttttttttgagacttgcactgttgcccaggctggagtggagtgcagtggcatgattttggctcactgcaacttccgcctcctgggttcaagcattctctcacctcagcctctcaagtagctgagattacagcagcctgccaccacacccagctaatttttgtatttttaatagagacagggtttcgccatgttggccaggctggtctcgaactcctgacctcaggtgatccacctgcctcagcctctcaaagtgctgggattacagatgtgagccaacactcctggccatcaaccaatgtttttgattagtccaagccccagtaattggggggaagagtgatgagagagaggggc

SEQ ID NO: 1244086 - DNA, 4001 bp, Homo sapiens
tcaagaagacagacaggatgaaaggccagggagggggctcagggtcctgccaggaggggcacgacacacccatcacccgctagcaagagacaccagcacctcaataccagaacacaatcccccactcccaccccagtctaacctccaaacagccccggtctccaaacagccccagtgacttcattccaggctgcagggggccacgcctgcctcgaaatcacagaccaacagtggggtggggagaggagcagagaattcgggagggcagtgcttggaaggggttagaagtagattcaaatcacattagagcctggcctcagagatcagagagggccagtccaaggctggggtttgccttcagagccccccagccgtgcccttaagcttctaaggctggaggcgggtggaatcgtcaagaccaatggggtgagcagggaggaggaaggggtcctggctgtgggcctggcagcttagagatctggagttttcaaactgaggccccggtaaagcttcggttggaaacaccgacccccaaaatcagtttgtcccctcaacgaggtaactccgtccgtggcttcccagctgcctcctcccccagtggttccagccccacccgcgttcccgtcctcccaacctccttgtttacttcctgaatcacgccccacctggctggccctaagggcaggtggcggggcccggtgttcagggccaacagaaaacaactctgcttcccagagcagggggaagggcttgcgggactgaggcctgggccaggggcctggatgtggcgggagagcccccgtccgcccagtactccacgccccgcccccacgggagaggcttataattttttagggtgcagggcccaggtgagaaggtgagaaacccctggatgactcctagtataagggaggacccaggactctgaggccccgcccactctcactcaggaaaaatacccaatgggagaaggcggggcagctcttttaaagtttaattcgggaagaatgctggagtgtctctgcagttaatcattacaggctgcccgcctccatgaggtccccccaccaagcatacagtaggatatcaggagaggggagagcagagtccaagaccggcggaccaaaagagggcattcctggggggcggtgcggctagttggggggcggggtggggggcgttccaccttgccggcagatgcattcattctctgtcctcaatctgccagggagacccagaccgggaacctgggtctctccctagcctcatcaagcagaagaaaccatctgctatcccccaccccactctccccaggccccaccgcactgcagagcccctcatacacccctccagccttcctgcccatttcatgctgaagccaggagggaccccgtctcacccggcctccactttcccatcggagggccggaggcggtgttgctgagaagggcatacaatctggagagatgaagcctcgacaatttagaggatccctctccttcactgccctccaaagtggagggggccctccccacatctccccgcagcccgcagagacgtctgtcttagagacttggggaaacccaaactggggtaaactgggcgagccagagagtgagggcggctctccccgggtgtgcggggaggggctagtttcagcgggaaagccaagtcggaggagagaatcaggtcttccttcccattctcagctgctgcctgcagggaggtgtacagggagggaacaaggagcgctggaaaccaggatggggacgaaaagagggcgggtggggaggagggggcagggtgggaaatggacagaaaagagaaaagtgggaggccaagcaacccatcaggagacccagcctttccctaccggcctccagaccggccgtgcctgcccccaaaggataaatgcccgcttgggttcttacctgaaccccgagcgtcaggacacccggctgggaccacgtcttcagggagggagacgccaggcccttaactacctgtccccctccagcccccgcccctggcctgacatcaccgagcgggggagggggagagccaggtggctccaatcctcccacctgggccgccggccagttcagccggagactggcacagcctggggccctggtgcggctgggggttgcctggcaggctgtcgtctgagaccgatctcggtccccttacctggaggagccccagcaggagtagcaggacacccgttccgaagtctggctccgtctaggaacccccagattcctggattttatttcagatccactcccgcttctctacaggtggtaggagggtgtcccgacttcggacagagaagtcagaggcgggggggagccctgtgtgtccagattccaggcccaaggaaactaaaattatcttgggcagatgggggcgggtccaggggaggcgcctgggaggaggaaacctgggaggagggcggagactccctgactacgccaactgggattgtttttgcccttcctagcctggcagcaggtgccaagggaggatgcaggtgcctggggagaggcggggaagacagccgaacagacagtaccacgagcgaagatcaagagtcccgaccacctgggagggaggggggagggcctgggggctgcaaggtaaggggaaccaccccatccactcttttccaacaccctccccgaacctggtctgttcattggccaagcctgggggcctgtctgcagctctggatcccaccccatggggcaaagagcaccctgccgagagggacgccagccagggtggtgtccagcaacatggcctgcccctcgatctgcagtcacccttaccgtggtggctgcgccctggcccctcagaggtacccagggtaagccctccctcccccgccccccaccttctgagcaaagtccagagtcttggcttctcctttaaaatcgagggggttaggcagggtggcacagtgggaggagccatggtgacctggagaaagctctggcctgggcccctggggattcctcttagagggatcactttattttatttttttttgagccagagtcccgctctgtcacccaggctggagtgtagtggtgccatcttggcgcactgcaaactctgcctcccaggttcaagcaattctcctacctcagcctccggagtagctgggattacaggcgcctgccaccacacccagctaatttttgtatttttagtaaagatggggtttctccatgttaaccaagttggtcttgaactcctgacctcaggtgatctgcccacctcggcctcccaaagtgttaggattacaggcataagccaccacgcccggcctgagggaacactttagttctctcagggatcactttagctgtctcattcagtgctgggcaaacacagggtacttgggagaggggttaggaggtggagatcaaaggctgcggccaccacccagcttgatgtgggtgacaggaaaacaaacaatccttagggtgataagaggtccaccctggaaggggcacgaatgagtggctcctgcctcaattttctccagagttttcctaggaaaaccggtatgagtgggcccagcaaagaagtgggggaggaggcaaggtctctttggtgatggagcagcttgtgcaaaggcagagtagacaattcactcattcatttattcaactatctgtttagtacctaccatatgccagccccatgttttgtgctggggatacaggcgtaaacaacaaaaacagaccccgcccatcctcacacagccaatcaggaagattgatgttaaccaaagaatcacacaaataagaaatgacaggagacaactatgctgggaaaatgactcacatagggagtcaggaaagacttctcagtggaggtgacagctgagcagaggagaagctggctgacatgggaagggggttggaatcggtggatgggaattggggaaggaggccactttccccagtgaggaaatcaatgccagagctctg

SEQ ID NO: 1244087 - DNA, 4001 bp, Homo sapiens
aacttcctggcttaggagaaacaaaaacagccctgcctccacccttcccccaactccccaacccactgctagccagagcggaatgggggaggcacggggctgggaacaggatgggggaggaggatgtgggcctgaggctcctgacatcacctcctcctccccaccctcggcctagctccaggccaggtgggacctacgatctgctctcacccccagtcccaaaccacctcctcgccagggagtccctcgcctgggaaggagagaggcaatgcccggcctggattcagaggcccatttggagagaagccagcatcccggcggtgcccctccccacccaaagcatcgctcagagcccctgccctgtgtggatgaagttcctcctgacacattctcctgggtgtcccggccagaggggtaccacaggagcaggagtggaaagggaaaacactcaagaagacagacaggatgaaaggccagggagggggctcagggtcctgccaggaggggcacgacacacccatcacccgctagcaagagacaccagcacctcaataccagaacacaatcccccactcccaccccagtctaacctccaaacagccccggtctccaaacagccccagtgacttcattccaggctgcagggggccacgcctgcctcgaaatcacagaccaacagtggggtggggagaggagcagagaattcgggagggcagtgcttggaaggggttagaagtagattcaaatcacattagagcctggcctcagagatcagagagggccagtccaaggctggggtttgccttcagagccccccagccgtgcccttaagcttctaaggctggaggcgggtggaatcgtcaagaccaatggggtgagcagggaggaggaaggggtcctggctgtgggcctggcagcttagagatctggagttttcaaactgaggccccggtaaagcttcggttggaaacaccgacccccaaaatcagtttgtcccctcaacgaggtaactccgtccgtggcttcccagctgcctcctcccccagtggttccagccccacccgcgttcccgtcctcccaacctccttgtttacttcctgaatcacgccccacctggctggccctaagggcaggtggcggggcccggtgttcagggccaacagaaaacaactctgcttcccagagcagggggaagggcttgcgggactgaggcctgggccaggggcctggatgtggcgggagagcccccgtccgcccagtactccacgccccgcccccacgggagaggcttataattttttagggtgcagggcccaggtgagaaggtgagaaacccctggatgactcctagtataagggaggacccaggactctgaggccccgcccactctcactcaggaaaaatacccaatgggagaaggcggggcagctcttttaaagtttaattcgggaagaatgctggagtgtctctgcagttaatcattacaggctgcccgcctccatgaggtccccccaccaagcatacagtaggatatcaggagaggggagagcagagtccaagaccggcggaccaaaagagggcattcctggggggcggtgcggctagttggggggcggggtggggggcgttccaccttgccggcagatgcattcattctctgtcctcaatctgccagggagacccagaccgggaacctgggtctctccctagcctcatcaagcagaagaaaccatctgctatcccccaccccactctccccaggccccaccgcactgcagagcccctcatacacccctccagccttcctgcccatttcatgctgaagccaggagggaccccgtctcacccggcctccactttcccatcggagggccggaggcggtgttgctgagaagggcatacaatctggagagatgaagcctcgacaatttagaggatccctctccttcactgccctccaaagtggagggggccctccccacatctccccgcagcccgcagagacgtctgtcttagagacttggggaaacccaaactggggtaaactgggcgagccagagagtgagggcggctctccccgggtgtgcggggaggggctagtttcagcgggaaagccaagtcggaggagagaatcaggtcttccttcccattctcagctgctgcctgcagggaggtgtacagggagggaacaaggagcgctggaaaccaggatggggacgaaaagagggcgggtggggaggagggggcagggtgggaaatggacagaaaagagaaaagtgggaggccaagcaacccatcaggagacccagcctttccctaccggcctccagaccggccgtgcctgcccccaaaggataaatgcccgcttgggttcttacctgaaccccgagcgtcaggacacccggctgggaccacgtcttcagggagggagacgccaggcccttaactacctgtccccctccagcccccgcccctggcctgacatcaccgagcgggggagggggagagccaggtggctccaatcctcccacctgggccgccggccagttcagccggagactggcacagcctggggccctggtgcggctgggggttgcctggcaggctgtcgtctgagaccgatctcggtccccttacctggaggagccccagcaggagtagcaggacacccgttccgaagtctggctccgtctaggaacccccagattcctggattttatttcagatccactcccgcttctctacaggtggtaggagggtgtcccgacttcggacagagaagtcagaggcgggggggagccctgtgtgtccagattccaggcccaaggaaactaaaattatcttgggcagatgggggcgggtccaggggaggcgcctgggaggaggaaacctgggaggagggcggagactccctgactacgccaactgggattgtttttgcccttcctagcctggcagcaggtgccaagggaggatgcaggtgcctggggagaggcggggaagacagccgaacagacagtaccacgagcgaagatcaagagtcccgaccacctgggagggaggggggagggcctgggggctgcaaggtaaggggaaccaccccatccactcttttccaacaccctccccgaacctggtctgttcattggccaagcctgggggcctgtctgcagctctggatcccaccccatggggcaaagagcaccctgccgagagggacgccagccagggtggtgtccagcaacatggcctgcccctcgatctgcagtcacccttaccgtggtggctgcgccctggcccctcagaggtacccagggtaagccctccctcccccgccccccaccttctgagcaaagtccagagtcttggcttctcctttaaaatcgagggggttaggcagggtggcacagtgggaggagccatggtgacctggagaaagctctggcctgggcccctggggattcctcttagagggatcactttattttatttttttttgagccagagtcccgctctgtcacccaggctggagtgtagtggtgccatcttggcgcactgcaaactctgcctcccaggttcaagcaattctcctacctcagcctccggagtagctgggattacaggcgcctgccaccacacccagctaatttttgtatttttagtaaagatggggtttctccatgttaaccaagttggtcttgaactcctgacctcaggtgatctgcccacctcggcctcccaaagtgttaggattacaggcataagccaccacgcccggcctgagggaacactttagttctctcagggatcactttagctgtctcattcagtgctgggcaaacacagggtacttgggagaggggttaggaggtggagatcaaaggctgcggccaccacccagcttgatgtgggtgacaggaaaacaaacaatccttagggtgataagaggtccaccctggaaggggcacgaatgagtggctcctgcctcaattttctccag

SEQ ID NO: 1244088 - DNA, 4001 bp, Homo sapiens
cgtcatctccactcactgcaacctccacctcctgggttcaagtaattctcgtgccttaacctcccgagtaactgggattacaggtgcccaccaccacgcccgtctaatttttgtatttttagtagagacagggtttcaccatgttggccaggctggtcttgaactcctgatccgcccgccttggcctcccaaagtgctgggattacaggcgtaagccaccacgcccggctccagtgctctttctttagcacaaagttgctcacaggaagagctgagggtccacccaccacaagcctggtggtcacaacagatttcacaacccacagactctcaggctcagccctcagggtcagggcaaaggcccactcctttgcctccacgtgtggggcactcactgcgctgggctgtgccccgggtttttccagcactttgttgccagacccagttgccagagcctgttcatacttggcgaggtttggcctgcccaagtgatgagtgatgcagaggggagaaggaggtggggaaggatgggagtcagaaaggcaggagagcgggctccgctgcagtgcaagggggagagcagggcctggggtaggggtcctggccccagcagcccccaaaccttgcgtaccctccccaggccatcctcctgcccaactctttcctgaagccccagtgctagagccacctcctctgagaagccttcctggccttccacattcagactgaatgactctctctcagcactgtgcgggggccgcatcatccattactgtgcacctgtcctatccacccatttgtctgagggcacctggtacccccaggcaaggccaatctcacccatgtcttatcacttataggggctgcacagacactcaagacaagtaaagacaggacagcaggcaaagacgagcactagaggtggaggtggggctggcaccttctccgcaggaacccagcagacccctttggccgggctgagacctgggagaacctgcaatcccagcccccagcctgttctccaaacactgggccagtactatgaggccacctggggcacctgggattgacccctcaggagggagcaggcacctgacccttcagtgagggcatcaggggatttgggggacaggtgagtcagggcgggcgggacaacactgcctagggctctccattcaaccttgactcatccacacaacttcctggcttaggagaaacaaaaacagccctgcctccacccttcccccaactccccaacccactgctagccagagcggaatgggggaggcacggggctgggaacaggatgggggaggaggatgtgggcctgaggctcctgacatcacctcctcctccccaccctcggcctagctccaggccaggtgggacctacgatctgctctcacccccagtcccaaaccacctcctcgccagggagtccctcgcctgggaaggagagaggcaatgcccggcctggattcagaggcccatttggagagaagccagcatcccggcggtgcccctccccacccaaagcatcgctcagagcccctgccctgtgtggatgaagttcctcctgacacattctcctgggtgtcccggccagaggggtaccacaggagcaggagtggaaagggaaaacactcaagaagacagacaggatgaaaggccagggagggggctcagggtcctgccaggaggggcacgacacacccatcacccgctagcaagagacaccagcacctcaataccagaacacaatcccccactcccaccccagtctaacctccaaacagccccggtctccaaacagccccagtgacttcattccaggctgcagggggccacgcctgcctcgaaatcacagaccaacagtggggtggggagaggagcagagaattcgggagggcagtgcttggaaggggttagaagtagattcaaatcacattagagcctggcctcagagatcagagagggccagtccaaggctggggtttgccttcagagccccccagccgtgcccttaagcttctaaggctggaggcgggtggaatcgtcaagaccaatggggtgagcagggaggaggaaggggtcctggctgtgggcctggcagcttagagatctggagttttcaaactgaggccccggtaaagcttcggttggaaacaccgacccccaaaatcagtttgtcccctcaacgaggtaactccgtccgtggcttcccagctgcctcctcccccagtggttccagccccacccgcgttcccgtcctcccaacctccttgtttacttcctgaatcacgccccacctggctggccctaagggcaggtggcggggcccggtgttcagggccaacagaaaacaactctgcttcccagagcagggggaagggcttgcgggactgaggcctgggccaggggcctggatgtggcgggagagcccccgtccgcccagtactccacgccccgcccccacgggagaggcttataattttttagggtgcagggcccaggtgagaaggtgagaaacccctggatgactcctagtataagggaggacccaggactctgaggccccgcccactctcactcaggaaaaatacccaatgggagaaggcggggcagctcttttaaagtttaattcgggaagaatgctggagtgtctctgcagttaatcattacaggctgcccgcctccatgaggtccccccaccaagcatacagtaggatatcaggagaggggagagcagagtccaagaccggcggaccaaaagagggcattcctggggggcggtgcggctagttggggggcggggtggggggcgttccaccttgccggcagatgcattcattctctgtcctcaatctgccagggagacccagaccgggaacctgggtctctccctagcctcatcaagcagaagaaaccatctgctatcccccaccccactctccccaggccccaccgcactgcagagcccctcatacacccctccagccttcctgcccatttcatgctgaagccaggagggaccccgtctcacccggcctccactttcccatcggagggccggaggcggtgttgctgagaagggcatacaatctggagagatgaagcctcgacaatttagaggatccctctccttcactgccctccaaagtggagggggccctccccacatctccccgcagcccgcagagacgtctgtcttagagacttggggaaacccaaactggggtaaactgggcgagccagagagtgagggcggctctccccgggtgtgcggggaggggctagtttcagcgggaaagccaagtcggaggagagaatcaggtcttccttcccattctcagctgctgcctgcagggaggtgtacagggagggaacaaggagcgctggaaaccaggatggggacgaaaagagggcgggtggggaggagggggcagggtgggaaatggacagaaaagagaaaagtgggaggccaagcaacccatcaggagacccagcctttccctaccggcctccagaccggccgtgcctgcccccaaaggataaatgcccgcttgggttcttacctgaaccccgagcgtcaggacacccggctgggaccacgtcttcagggagggagacgccaggcccttaactacctgtccccctccagcccccgcccctggcctgacatcaccgagcgggggagggggagagccaggtggctccaatcctcccacctgggccgccggccagttcagccggagactggcacagcctggggccctggtgcggctgggggttgcctggcaggctgtcgtctgagaccgatctcggtccccttacctggaggagccccagcaggagtagcaggacacccgttccgaagtctggctccgtctaggaacccccagattcctggattttatttcagatccactcccgcttctctacaggtggtaggagggtgtcccgacttcggacagagaagtcagaggcgggggggagccctg

SEQ ID NO: 1244089 - DNA, 4001 bp, Homo sapiens
aagaccaatggggtgagcagggaggaggaaggggtcctggctgtgggcctggcagcttagagatctggagttttcaaactgaggccccggtaaagcttcggttggaaacaccgacccccaaaatcagtttgtcccctcaacgaggtaactccgtccgtggcttcccagctgcctcctcccccagtggttccagccccacccgcgttcccgtcctcccaacctccttgtttacttcctgaatcacgccccacctggctggccctaagggcaggtggcggggcccggtgttcagggccaacagaaaacaactctgcttcccagagcagggggaagggcttgcgggactgaggcctgggccaggggcctggatgtggcgggagagcccccgtccgcccagtactccacgccccgcccccacgggagaggcttataattttttagggtgcagggcccaggtgagaaggtgagaaacccctggatgactcctagtataagggaggacccaggactctgaggccccgcccactctcactcaggaaaaatacccaatgggagaaggcggggcagctcttttaaagtttaattcgggaagaatgctggagtgtctctgcagttaatcattacaggctgcccgcctccatgaggtccccccaccaagcatacagtaggatatcaggagaggggagagcagagtccaagaccggcggaccaaaagagggcattcctggggggcggtgcggctagttggggggcggggtggggggcgttccaccttgccggcagatgcattcattctctgtcctcaatctgccagggagacccagaccgggaacctgggtctctccctagcctcatcaagcagaagaaaccatctgctatcccccaccccactctccccaggccccaccgcactgcagagcccctcatacacccctccagccttcctgcccatttcatgctgaagccaggagggaccccgtctcacccggcctccactttcccatcggagggccggaggcggtgttgctgagaagggcatacaatctggagagatgaagcctcgacaatttagaggatccctctccttcactgccctccaaagtggagggggccctccccacatctccccgcagcccgcagagacgtctgtcttagagacttggggaaacccaaactggggtaaactgggcgagccagagagtgagggcggctctccccgggtgtgcggggaggggctagtttcagcgggaaagccaagtcggaggagagaatcaggtcttccttcccattctcagctgctgcctgcagggaggtgtacagggagggaacaaggagcgctggaaaccaggatggggacgaaaagagggcgggtggggaggagggggcagggtgggaaatggacagaaaagagaaaagtgggaggccaagcaacccatcaggagacccagcctttccctaccggcctccagaccggccgtgcctgcccccaaaggataaatgcccgcttgggttcttacctgaaccccgagcgtcaggacacccggctgggaccacgtcttcagggagggagacgccaggcccttaactacctgtccccctccagcccccgcccctggcctgacatcaccgagcgggggagggggagagccaggtggctccaatcctcccacctgggccgccggccagttcagccggagactggcacagcctggggccctggtgcggctgggggttgcctggcaggctgtcgtctgagaccgatctcggtccccttacctggaggagccccagcaggagtagcaggacacccgttccgaagtctggctccgtctaggaacccccagattcctggattttatttcagatccactcccgcttctctacaggtggtaggagggtgtcccgacttcggacagagaagtcagaggcgggggggagccctgtgtgtccagattccaggcccaaggaaactaaaattatcttgggcagatgggggcgggtccaggggaggcgcctgggaggaggaaacctgggaggagggcggagactccctgactacgccaactgggattgtttttgcccttcctagcctggcagcaggtgccaagggaggatgcaggtgcctggggagaggcggggaagacagccgaacagacagtaccacgagcgaagatcaagagtcccgaccacctgggagggaggggggagggcctgggggctgcaaggtaaggggaaccaccccatccactcttttccaacaccctccccgaacctggtctgttcattggccaagcctgggggcctgtctgcagctctggatcccaccccatggggcaaagagcaccctgccgagagggacgccagccagggtggtgtccagcaacatggcctgcccctcgatctgcagtcacccttaccgtggtggctgcgccctggcccctcagaggtacccagggtaagccctccctcccccgccccccaccttctgagcaaagtccagagtcttggcttctcctttaaaatcgagggggttaggcagggtggcacagtgggaggagccatggtgacctggagaaagctctggcctgggcccctggggattcctcttagagggatcactttattttatttttttttgagccagagtcccgctctgtcacccaggctggagtgtagtggtgccatcttggcgcactgcaaactctgcctcccaggttcaagcaattctcctacctcagcctccggagtagctgggattacaggcgcctgccaccacacccagctaatttttgtatttttagtaaagatggggtttctccatgttaaccaagttggtcttgaactcctgacctcaggtgatctgcccacctcggcctcccaaagtgttaggattacaggcataagccaccacgcccggcctgagggaacactttagttctctcagggatcactttagctgtctcattcagtgctgggcaaacacagggtacttgggagaggggttaggaggtggagatcaaaggctgcggccaccacccagcttgatgtgggtgacaggaaaacaaacaatccttagggtgataagaggtccaccctggaaggggcacgaatgagtggctcctgcctcaattttctccagagttttcctaggaaaaccggtatgagtgggcccagcaaagaagtgggggaggaggcaaggtctctttggtgatggagcagcttgtgcaaaggcagagtagacaattcactcattcatttattcaactatctgtttagtacctaccatatgccagccccatgttttgtgctggggatacaggcgtaaacaacaaaaacagaccccgcccatcctcacacagccaatcaggaagattgatgttaaccaaagaatcacacaaataagaaatgacaggagacaactatgctgggaaaatgactcacatagggagtcaggaaagacttctcagtggaggtgacagctgagcagaggagaagctggctgacatgggaagggggttggaatcggtggatgggaattggggaaggaggccactttccccagtgaggaaatcaatgccagagctctgggcaggaggagatgcagcatgcggagacagagagtggggttggaggagaagggaggaagcagaggccacgtgggtgaacctggacaggtgtggaaggtgtggagagaggaagctgtgcttctgcaaatgtggcctctagacctccctaaccttgtgtggaaaatagattcttgggctcctctccagcaactgaatctcagtctctagggctaagacccaggaaggtgtggtattgacaagccctcaggtggctgttctgcaaaccaggtttgagagccatccatcctgtttgtccagatgggcaggagtagcggtcaaagaccagaccctgcaagttgtatttagacttaagtagaagcacagaggagagggcacatttacattttggaaagatcatcctggatattgaaggat

SEQ ID NO: 1244090 - DNA, 4001 bp, Homo sapiens
attacatgttgaaataataacatttggggtatgtttagtcaaagaaaatatactattaaaattaacgtcacctgtttctatttgttttaatgtggttactagaaaattttaaattgtacttgtggctcccattttatttctttggacagtgtgaccctggatgaagggcccaggctctccctcaactgcaaaggggcagaataagcagtctgccattagcatctccaacctcctttttctaaatgtatttctctttccaactccctactcccctcaagcttccaccctccccagtcaagaccttttcttagccaaggacctagagctcattcacatgaaggaataagggtctggtaatagctgaaaatgttctcattcccactctctccaataggaagacatcctcatgggctggggacaccagagactctctccaaagggaaggtgtcctgctgggttgggggttgggggtcggggggtgggggagttgaggcaggttgtacctctaatcaaggggcctaaaatgggggagggatcccagaatacctccagagccaggggccaaaactaggtaagtccctgggctccaaatagcaaggggcagactcaaggagcttccgaattctgtctcatcaccccgtctaacccagccaccctacagaggtaggagggacaaactccactttcccccgccacaatctcctcccttgcctccccctccccacctcccacctacccacccccgccagccccactgcactgctgaagccttcctccagccactgctccctcctcacacaggacagctacaccctggtgcccacaaatgaagtccagacagcttagtcccatagacagagccctctgcaccctgaccgcaaccaaccgtcctcccatccctggaacccacagctctgccagtctgctggccaaacagccccattctgccctcatctccaggcctcgttccagcatcccccaggctggaatgtcctcatcccaacagaagtctactctccttcagggcccagctgaaatccctctcccacaggcacctgccttgatgcctcaggctctaggcgcagggactgcggccaggctggggcacctgcccttcttccccctgccctggcttcccctcctgggtggggagctctgtgtagtggtcccctccacccctccattctgccctgcggcaggtgtgtgtgcactcattaacaccctgccccacactggactgcgggctccttgagggcagacacattgtctcagagacctctgcccacccacccactcagggtctcaccccttccacaaacagcccttaaactaatgtttgacaaacacagagatccccaaagagccccagagaggatggcagtggtcagtcctgcaggacacagcagcatctagaagggtctgagcaccttcccaggctgggggccttctccttcccgggtcctcacagctcagccagaccccctggcacggacctgcacacacatgcacactcccgcactcatacccgctcacatctgagataccgatggctctccctctcccaggctaggaaactctgtcgcaggagtcctccccacccaccagcagaacccccggaccccctgcccttccggtgagccgcccctcctttgccgtcgggtttccctccctcccttttgcccagccaaaacccgaacccaggcgccaggggagaggaccgccgttctagcttgccccactgctgggggcacggagttcttgctcctccaaggctacggcccccgtctccgcggaccccgcccggactccccctggccaccgggacgccccgccccctcccctccgcagcaatctcttacactcgggctgtgaagttcggggtatttttaggccggcgataaataattcatagggaacgtggcatcaggctccccccgcgggaggagggggcgcgagcagcgagagccaccgtcacccgcggctcaaggacactcgcgatgcggcggcggcggcggcggcggcggctccgggcggggacccgcgccacgcctcctggcggccaagctgagcaccacgcacccggcgccccccgccccacgctgccccccgccggcgtccgcggctccggggcccccacccccactcccccaagctgggtcgtgaccccgagtcccgcagtggggggaccaagccagcctggcaggcggccccagtaccatcccaggcccgcccgggggccctgggcgaacccaggtgtcccggacctgcctacctgcccctggcacgctcttattcttcgggagtttagaaacaggctcaaagtcactagcaccgccaagacctggacgggctctgaaatacagccagcggaatggtaccctccccaaataagtgtctttcctcgattttcctgtggcccggggtcagggactgaactaagataacgccaccatccgagggctgggggaccgagccagaagtccccttggacgaccagggctgggaaaccgagtggacgaatggggtgggcatcagggcctggcgggaattcccgtcttgctcacccagcagctccttgcagggtcgcgggacgcacctgggggttcaggttgccgggtgcctttgctccgcgtgtccccgccctgcccgcgtaggcaggaaacaggagactcggggcttcccctccccgccgtcggggatcctgggcgaagcccccagagaccggcgcaggcggctggtgcgcagccagggcccagcgccaggtcttgctcgcccagtgccctctctgcctacccttccctttgcgctctggaagcccgggagccgggcacgggccagcatctgcaagatgccactactctggaagcccactccgattctcccaggtcgcaggaaggagagagctaggctggggcaaaggagatggggcagagctggaaggggaagaagcgggactcgcggcgggggaaggggtctgggcgccgaggcgagtgcgcagcaggtgcccagcagacctagggaaactggggcactgggctggggagccgcacagccccctttcaccttctcgactcctttccaacccctcgctctggtggatcccagccccggcccccactcccggccctgttccccgctctccgccccggcggcttccagcagcaacagtttgggtccgcggcagcccagactcccctggtcccgcggtgctgccgcgccaagcgaaggaggaggagggctcggcgaccctggggacgaacgtcttggacgcttcgcccgcgtccttctctcgcgtccgccgcgcgcctgtctgctcggcctcttcttcgccttctctccggccgcccgggtcaaaacccaaggccaggttcttgagggtccgggtcctccagccgccccctccttgagccccgagagtcctgcgtgggtccaaccccccgggtgtcccgcctctgtctccgccgtccttgctcgcgcgccgcgggaacccagccccaagttggcggcgaagttggtgcccctcgcccgccgctcgccacttaccgaggggaaggggcgctgcgcccgcgacgagagcccgcgccggccgcctccctcgcggtgtctgtcccagagcctcggccccggagggctggcgcgctcagtctcagctccgcgggcgccggagcccgggcgcggcggggcgggggcgggggcgggtggcgcggcctggtccgctggccccgacccgcccctgcgccccgcgaccctcccgaagctcgcacggcgcccggctccgtcccgggctgggctgcgcaccgcgcctcctgctcccagagctcgcagccgactgtgcgggagctctcaccgccgcccgcgagggcccgccccgccggggcccgccacctccgccccggcccggcccggcccgctgcccctcgaggcccctcccgccgcattcccgggcccctctcccctctccggaaccgcgtccccagacctgacactcggggcaagtgcgc

SEQ ID NO: 1244091 - DNA, 4001 bp, Homo sapiens
ggcctcgttccagcatcccccaggctggaatgtcctcatcccaacagaagtctactctccttcagggcccagctgaaatccctctcccacaggcacctgccttgatgcctcaggctctaggcgcagggactgcggccaggctggggcacctgcccttcttccccctgccctggcttcccctcctgggtggggagctctgtgtagtggtcccctccacccctccattctgccctgcggcaggtgtgtgtgcactcattaacaccctgccccacactggactgcgggctccttgagggcagacacattgtctcagagacctctgcccacccacccactcagggtctcaccccttccacaaacagcccttaaactaatgtttgacaaacacagagatccccaaagagccccagagaggatggcagtggtcagtcctgcaggacacagcagcatctagaagggtctgagcaccttcccaggctgggggccttctccttcccgggtcctcacagctcagccagaccccctggcacggacctgcacacacatgcacactcccgcactcatacccgctcacatctgagataccgatggctctccctctcccaggctaggaaactctgtcgcaggagtcctccccacccaccagcagaacccccggaccccctgcccttccggtgagccgcccctcctttgccgtcgggtttccctccctcccttttgcccagccaaaacccgaacccaggcgccaggggagaggaccgccgttctagcttgccccactgctgggggcacggagttcttgctcctccaaggctacggcccccgtctccgcggaccccgcccggactccccctggccaccgggacgccccgccccctcccctccgcagcaatctcttacactcgggctgtgaagttcggggtatttttaggccggcgataaataattcatagggaacgtggcatcaggctccccccgcgggaggagggggcgcgagcagcgagagccaccgtcacccgcggctcaaggacactcgcgatgcggcggcggcggcggcggcggcggctccgggcggggacccgcgccacgcctcctggcggccaagctgagcaccacgcacccggcgccccccgccccacgctgccccccgccggcgtccgcggctccggggcccccacccccactcccccaagctgggtcgtgaccccgagtcccgcagtggggggaccaagccagcctggcaggcggccccagtaccatcccaggcccgcccgggggccctgggcgaacccaggtgtcccggacctgcctacctgcccctggcacgctcttattcttcgggagtttagaaacaggctcaaagtcactagcaccgccaagacctggacgggctctgaaatacagccagcggaatggtaccctccccaaataagtgtctttcctcgattttcctgtggcccggggtcagggactgaactaagataacgccaccatccgagggctgggggaccgagccagaagtccccttggacgaccagggctgggaaaccgagtggacgaatggggtgggcatcagggcctggcgggaattcccgtcttgctcacccagcagctccttgcagggtcgcgggacgcacctgggggttcaggttgccgggtgcctttgctccgcgtgtccccgccctgcccgcgtaggcaggaaacaggagactcggggcttcccctccccgccgtcggggatcctgggcgaagcccccagagaccggcgcaggcggctggtgcgcagccagggcccagcgccaggtcttgctcgcccagtgccctctctgcctacccttccctttgcgctctggaagcccgggagccgggcacgggccagcatctgcaagatgccactactctggaagcccactccgattctcccaggtcgcaggaaggagagagctaggctggggcaaaggagatggggcagagctggaaggggaagaagcgggactcgcggcgggggaaggggtctgggcgccgaggcgagtgcgcagcaggtgcccagcagacctagggaaactggggcactgggctggggagccgcacagccccctttcaccttctcgactcctttccaacccctcgctctggtggatcccagccccggcccccactcccggccctgttccccgctctccgccccggcggcttccagcagcaacagtttgggtccgcggcagcccagactcccctggtcccgcggtgctgccgcgccaagcgaaggaggaggagggctcggcgaccctggggacgaacgtcttggacgcttcgcccgcgtccttctctcgcgtccgccgcgcgcctgtctgctcggcctcttcttcgccttctctccggccgcccgggtcaaaacccaaggccaggttcttgagggtccgggtcctccagccgccccctccttgagccccgagagtcctgcgtgggtccaaccccccgggtgtcccgcctctgtctccgccgtccttgctcgcgcgccgcgggaacccagccccaagttggcggcgaagttggtgcccctcgcccgccgctcgccacttaccgaggggaaggggcgctgcgcccgcgacgagagcccgcgccggccgcctccctcgcggtgtctgtcccagagcctcggccccggagggctggcgcgctcagtctcagctccgcgggcgccggagcccgggcgcggcggggcgggggcgggggcgggtggcgcggcctggtccgctggccccgacccgcccctgcgccccgcgaccctcccgaagctcgcacggcgcccggctccgtcccgggctgggctgcgcaccgcgcctcctgctcccagagctcgcagccgactgtgcgggagctctcaccgccgcccgcgagggcccgccccgccggggcccgccacctccgccccggcccggcccggcccgctgcccctcgaggcccctcccgccgcattcccgggcccctctcccctctccggaaccgcgtccccagacctgacactcggggcaagtgcgcctcggaggacacaccagcctgcccggagcctgggtttgagcccgcagctcacgagtgtgtgaccttgggccaatttcgaggacccctcaggttatacagcgaggcagcatcttgagggctgccataaaagggagtgaccactctctggacactgcaaagccctagggagactgaggcactatttttaaaggccagtgtgtctgactggaaacggaagcaggaaggctttgagagccaaagaatgggccccaggctagactcgcctggggcacccagaggtacaggggacaagctgcttctcagtcccccgctcccatttcttttctgttttgattgtactgagggctccccagggaggggtggtcccggtcccggtcccgggcagccctagtgtggacagaagacaggcaacccgcagccacagcagggccgagcggagaaaggaagggtggctatgccaggcctggctgccgagccccatcaagcccccaatgaggcccctgagcagggagccgtctctgcagcgccacctggtgatggtaggggagctacggccagaaggtgacccccgaccccaacccttccaaaaaaagtcccccatcaaccatggctcttggttgcagctgttttatttccagcatgttcccaacctggtgaccctccacagtccagcagtagagagatgggtaaggggttagatcggcccacacctccacctgtccctaaggttacctcagttgctgaaagctaaaaccttgcgcgcaagggcgaccttccccaggagggaggagagacgctggaagagcagccaagcctccaagccagggccggccgggatcagcagaggtgcaaagtcccactcagacggacccagcccttcccctcccaacactcatcccttccctgctgggggccggggctggggctgggctcagtggcccaggaggcgcagcatctcc

SEQ ID NO: 1244092 - DNA, 4001 bp, Homo sapiens
gtagtacagtggcgcgatctcagcttactgcgaactccgcctcccaggttcaagcaattctcctgcctcagcctcccaagtaggtgggattataggtgtgcgctaccacacctggctaatttttgtatttttagtagagatgggggtttcaccatgttggtcaggctggtctcaaactccagacctcaggtgatccacctgccacggcctcccaaagtggtgggattacaggcatgagccaccacgcccagccgacatgtcatttccattgtattaggtataagtaatctagaaatgatttaaagtatgtataggttatatgcaaatattacaccattttatctcaggggcttgagcacccacagattttggggtcctggaaccagttccgtgaagataccaagggacacctataacacgtcacacatcaggtcatggtgacgtcaggctttgatggccccagagcgtattggacctgggttcatatcactagtggcacgatgggcagtgcctgggaatggtgcaacaggtacaacagaaacagggtacagggactgcctgaaaatcgcacttgggtcctaatcctagaattgccaactgtgagggcctgagaagttgctctctgtctgtgcctcagttaccccacgagtctaggtgtggataccactgcggggggaggggcaggaaatctcacccacccagtcactcacatcctctctgctccacctggctttcctcaagtgcccctcccctaactcagcatccccaagaggccacctcctggacagataaggatgaagttcactggtcctggacagtggaccctctcctcagccccacagctcccaggcaaagcacctgcagctggcaccgcctgcttcctgggtgttctcagcaggctgtccgctgccatggcttgctgggaaggggagtctgtctgcacaggagtgttcggctccctggtgaattacctgtgcatgtggcccctcctgtttaccctaaattgagggagtatagtgtatgcttctactgaatacaagcactcgcatacagaaacagggatgaggaggcgagtcgcagtctctcatgccaccctacaccgccaaaacagccagaggggacagcagcctcttcaagaccctagctccgttatcttccactaggtggcaccccccaactccgagtgccaaggggagaggaaattcccaaaaggggagccaacctagctgcaaatgagcaggaaaaagtggctgggagaggcggaagctagctcgtcccacccgcaacaagaggaagtaaggaggagccagaccaggttcagtcaccactcccaagtccctactaccttcgagaagccaaggtctcaggtctcgttcccaggccctcggagctcccagcccagggtcgcgcgcccctccggctccaggccgccgcgggaaccacccaccaccaccaggagaggggaagaagccagcacctaccgacaggggtggagctgggtcaagaatggtgtggtccctgctttgggggaatgctggggaggtagaaagccccttctaacggggcgtcactgcaattactgcttcctctttcccataaaactccccctagtgtatcagaacccccaaggagtttcagtaagcggttcttctgttgtctccggctgagactccaggggaacctcaagctcacatggccctggcgggcccctgggcaggagcaggcgagaggtctgcgcggccgctctcctacctgcgtccgactccgcggtccttgggcagcagcaaccgggtagcgctcagactacagaccccagcgcgatgacccgcctacctcagtttccattggccagggatcagggctacccgctcccattggctacttatcaatatagaggtggggccagcctggaatgctgtgtttcttttctactcaaatcactctcctccctgcttcctctcgccccacaccccatttctagggatcatgtgattggagaatcatgtgacgtcgggacagcctcagcagggcagctggtgctcgtcgccttccttaacccatcctgcaggcgcctgggggagtttgctagagatgatagcgcgtgtctggggcattgacagtgcgagggagtgttatgaattgggaatatttgtgctcgcctttctatccttttgtttgtttgttctgagacggagtctcactctgtcgccaggctggagtgcagtggcacgatctcggctcactgcaacctctgcctcccgggttcaagcgattctcctgcctcagcctcccgagtagctgggactacaggcgcgcaccaccacgcccagctaatttttgtatttttagtagagacggggtttcaccatgttggccaggatggtctcgatttcttgacctcgtgatccgcccacctcggcctcccaaagtgctaagattacaggcatgagccaccgcgcccggacttgtgtgtttgttttagagacagggtctcgctcagtcgcccaagctgatcatagctcactgcggcctgcaactcctgctcccaaagcgattctcctaccgcagccccccaaggcgctgggattacaaatgtgagctactgagctggctcgctcctatcctatcctgccctgtcttgtcctgtcctgtcctgccctattctgccctattctccaaactcggttgacatgctaggcaggccccagagtgagttgaaggatggtttccaggacaaagataaacagccccaaagccctttcctcaaggtgctcagcaggacagggagcagggattggtgggagacagtctcaggctgaatctaatttaagatacaaggttgtgcgccagttgccaggtgtagggagaggaagtagattgtctccaggtggggaagaagagatttcattccaccttaggagcatctccttgagctgagtctgggaagattttaactggcaggtggaggaggaggtgttgggaagagccctgggaaaccagatgggaagggcaggcttggcagggattgaatgccatgttcaatgccagtgggcttcaggagctgctgggtgcctggcacgggctgggctgtggtgggggctgtcgaaagagaagtggcttcctagtctccagatcggccctgccttcgaggaattgatatgggagggtgaggagagaaaatgtaccacagaacagattagccagtgacaagagtcagcctgcttggtgccaaagggcctgggccaggcagagatggatgatgggagatgggccaggagagaggagaggcccagggaaagcctgatactgggccgtggaggaacggcagtgtctgcacaggggatggagactgctgcagcctgagcaaggaactggagctgaggatgaggcaggggcagggggatggctaaccaagctcgaggcagcagaagtcggaggagggaaagggtgccaaccgagctgtggagtcgtgtggcaggggttctaagcctggagctagagcagacccagacagcggataagacacctggcctgctgaggacctagtactagtctgtgccctggtgacacatttgtgcttattttccttcctgtgtatcttgagactagggagtatagtttatgcttctattgaaacacacacacacatgaaactttcatgaaatgttaggtgaatcgatcaataacctactaattacaaccacccagaaccagaaaaaaatacaggtagaagaaaaaaaacctaaacagactgaaacaaatatcacaaagtctaatcgtcaaagccgtgattcttgagcagcggcaattttgccggccagggacatttaggagtgtctggagacaatctgggttgtcacaactcagggtggagggacactggcatctggtaggtaagggccagcaatcccactaaacatcacacgacacacagaacaatcccccacaacaaagaagtatcctgcccaaaaggtcaatagtgctgagactcaacaacctac

SEQ ID NO: 1244093 - DNA, 4001 bp, Homo sapiens
aaattttttttgtagagacagagtctcactatgtttcccaggctggtctcaaactcctggctcaagtgatcctcccacctcagcctcccgaagtgctgggattacaggtgtgagccactgcgcctggtctagagcatttatttagcaatggaagtaaagctttctctcacaccagagactagcaatagccagagtcggaggacaccaggggagggaaggagatgctgctggcaacaagagcctgggtggccaagctgttcacctgccccagttgccctttccatgtgtgggttacacttccctgcaccctgtccttccctcatgcgtgccacaggtatgagtacacccactcccctctcacagcccctgggggatgcctggatccagacttttttttttctttttgagatggagtcttactctgttgcccagggtggagtgcagtggtgccatctcggctccctgcagtctccacctctcagattcaagcgattctcctgcctcagcctcccgagtagctgggactgcaggtgtgtgccaccacgcctggctaatttttgtatttttaatggagacagggtttcaccatgttggtcaggctggtctcgaactcctgacctcaaatgatccgccctccttgacctcccaaagtactgtgattacaggtgtgagcctctgtgcccagccaggatccaggcattttgatgctcttcacctttgccccctctgcttacaatacccgcttccggatctgaagactccctagtcctccgctaatgctcaattcaggtcacctcctggaacctcttccctcagtcctccaggcagctggtgactgtatctgtgtttccaaagcgctcttctgatgcaccttcctttgttatgatctgttcacctgaccctatcagcaactcgtctgtgacttcccagagggcaggaaatgggtcttagtcacctctgcagcagcaagtaccacacctggcacagagttcgagcttggcaaatgtgtgtggaaagaaccaatgaatgtggccctgagagatgtgcgctaggatgagagggccctggagaatgtggggcccatgggaacctgagaggcaacattttttttttctttttgagatggagtttcattcttgttgcccaggctggagtgcaatggcatgatctcggctcactgcaacctccatctcctgggttcaagtgattctcctgcctcagtctcccaggtagctgggattacaggcgcctgccaccatgcccagctaatttttgtgtttttagtagagacggtgtttcaccatgttggccaggctggtcttgaactcctgacctcaggtgatccgcccatctcaccctcccaaagtgctgggattacaggtgtgagccaccgcacctgacctgagggtcaacatcttaagtctctgtctttgaagtttgagtccaggtgctctggctgggtggccgatcggcacaccccagttatccccgtgggtggaagaggccacaccagctggcttggaagcatcccacatccaccacaggcacttcacagcagcagggggggcaggaagcacggcacagatgcgtggggctgttctgccagcttcaaggtgctttttttttttcaccctcattcctgggagggccaggatggggcaggacaacctcctggtgctacctgggtgcacctgggaagggcttgggcaacagcagcctcctcttcaccagagagatgtccacaggcctgcctctcccttccctccccaaggcctatcgggatacttatcccactggactctaggggagttccattcccttcttggtccacccatcttcctgtgtcctcagagcacccctgccttccctgctgtcatcaagttcttacctgggagcggggctgggtcctatccagcagctgggtctggggtgagggcctagggctcactgggtctgtaggttgagaggatgaccatcccttgccaggacaggctgctttatgcagggacagaggcttccggggaccccgcctgccctagtgaccccacccccctcccactccacttcctggagaacaacatcaacctgttccacgtgtgccctggcctcctgagggctgagggggtggatagggagctgccaggcaggtgccagcgtgggtgggggtagccaaggctgatagagaggtggcagctggaggttggcttgtggattgagaggagaggaaggcaggtgcctttgggaggggtgcagagggaggcagtgggagtgtgtgtgtgtgtgtgtgtgtgtgtgtgaccagggatggcatctctgttctgtcatcatcaccgtcattggggagcatctcggattcatggtgggggtctgcgggtgtcctgggatagggattcctgtatgtccacacattccagtagagagcagagcatctgcagtgccgccctccatcctgggcttgtcagcctgtgtgtattgctgccttactccatttgttttagctacatagacataactctgataccgctagaagcagatgtctgagtaggcagagatggagttagaccaaatgggtttgtgttgtttagtgttcagcgtctctgcttctcacagaatattgtatacacacatcagcatatccgtaggcaggggcacggcgatattcatggaaaagcccaggaggcttgtcgtgggctttcagatgttgcaccagaggtcactcaggtcctcctcttagcttaaatctctgcctagaaggaattttaaaggaatttcaaatgttgcctacatggtcacattgctagaggacagaataagggacttacaagcaaggcccttacagtgttgggccatgtggccatgcatatgtgcaggtataacctgacacagcagagccttcctgctcccaccttgaggctcttcttagtaccactcatggaaaaagaaacgcaaccctgaatgctgtgaagagtaaattccatcttttttttttttgagaaggagtctcgctctgtcctccaggctggagtgcagcggtgcaatctcagctcactgcaacttccacctcccgggttcaaacagttctctgcctcagcctcccgagtagctgggattacaggcatgcaccaccatgcctggctagttttgtatttttattagagacggggtttcgccatgttggccaggagggtcttgatctcctgacctcatgatccgcccgcctcggcctcccaaagtgctgggattacaggatgagccactgcgcccggccaattccatctttactgaacgtttccttgaggggctgatggtgaatgagactagaccattccacacttaggaaaactccctaaaatagtcattactccacttgtgtccccaaagtctcattcaatatgacagatgctcccaaatatctcttctctatgtcttgaaacagaacaaagccaagccttgcctctgcctctctggtccctgctcactctctttttctttacatactttcccatccaccctacacctttttgagacggggcctcgctctgtcacccaggctggagcgcagtggcttgatcatggctcactgcagccacccaatacttcatcctccttccacagctccagccattccagcaatcaaatgtcccttctccttaggagaggcagaggtgggggcttgagtgtgtgggaaggttgtcgttaggctgggtgcggtggttcacggctgtaattccagcactttgggaggcagaagtgggtggatcacctgaggtcaggagttcgagaccagcctggccaacatgagggaaacaccatctctaccaaaactgcaaaaattagctgggcgtggtggcaggtgcctgtaatcccagctacttgggaggctgaggcaggagaatcacttgaacccgggaggtggaggttgcagtgagccgagatcgtgccactgcatgccaggctgggcgacagagcaagactccgattcaaaaaaaaaaaaaagaaaa

SEQ ID NO: 1244094 - DNA, 4001 bp, Homo sapiens
aataaaacaacttgtccaaaggttacgcagctgataagaggcagagccaggctttgaaaccaggtgcttccagccctaaagcctgcatcctttcttaaccagtaagcaaactgccctcatttacttattcatttaaatgataaacacatgagaagagctcgctaaattaaaagcagattattttacaagggaaaaaatggaaaaggaagaccatttaggaacggtttccagtggaaataaatctccacttctcccactctcctcccaccatgcagctcttccgtgcatttcttaaattaaggtgtgtggatgtgtacaaatcccacagtttcgttgttgattggttgataacaatggggaattgagaaggagatggagtacaaacggtcaaggcctcctggctggccacctgtcatctaccttatactgaccttggagcccagaatccagttcatctaaccacttgtccccatctgtgtccagaatgtccatcagggtgaggcctgttgtgtagtgccggcatccaaagaaagttctcttctcccccaccagatggaagcagcggaatctatcagcatcaacaaggcttctaacggcaatcatatcccctccagcatccatctccttaactacaattcttgtgatttcctcaaatacgctgaacattgcgcctggaccaactcagaaacagaagccaatttcagtttttgggaggagggtattggttcaagtatttaaatcttccacatttggcagcctgaggtgtcaggcctctgaacccaagctaagccatcatattccctgtgacctgcatgtatacatccagatggcctgaagcaactgaagatccacaaaagaaatgaaaatagccttaactgatgacattccaccattgtgatttgttcctgccccaccctgatacaatatagtctccccgccgccgcccttaagaaggtactttgtaatattctcccctgcccttaagaaggtactttgtaatatttctccacccttgagaatgtactttgtaagcctatcccaaacatataagaactaatgataatgccaccaccctttgctgaccccttttttggactcagcttgcctgcacccagccttgttgctcatataaagcccgtttcgtggactctcttcacatggacgcacgtgacatgaggtcaaggaagagccaaaggttccaggacaatcagtacctggaatgatttgcctgccttacttctagaacgtgaggcagccatgactcagtaaagagggctaaacatcacagatcccagattctcctctgcccctcatggtacccatctggaggaaaaaagtagcagctattgccccaaatagagaaagtgagacccattttctacatctcccacagcagagttgcccccttgttccaaggggcccaagggatggaaaggcaggcccaccatgccccagccagactagccccaacgttgatgaacagaggaaccagggaggaatgacgggcacggttgccagacttcacattactaacctcaactggtcgtttcttcccttggctctgattcttgggctccctgccttgctgtattctgcaaggcaattggatgggtgcctccctaccaacaatttcccaatgaggtggtggtaaattggcctcagaagaaacaaaagcttcctgggatccacttccccatcctacctttggccaccttcccctatatcccttctgcccagcacaggcacttatccactcactgcttcctcctctgtctctggccccatcatggtggttgactctcagttcactaccaacctgggaattctaggtgtctggaaagacagtacccgggaaccacaggcccatctcaagtggtacccacctcctctctgacctcagctgttcaccagaaatggaagttgtgagaatccccacagatctctgcacagttcctggcctctgaatctcaggaagctaaaataatgaaactgaaagttgtccaggtgtggaacttcctggacgggtgggtagggctgggtgccccacctcccaagcctttagataagccaccttataactgagctggaggcagattaaggccagaaccccccttttttttttttttttgagacggagtcttgctctatcgccgaggctggagtgcaatggcgcaatctcggctcactgcaagctccgcctcccaagttcacgccattctcctgcctcagcctcccgagtagctgggactacaggtgcctgccaccacgcccagctaatttttttgtgtgtgttttttagtagagacggggtttcaccgtgttagccaggatggtctcaatctcctgaccttgtgacccacccacctcggcctctcaaagtgctgggattacaggtgtgagccaccatgcccggccagaaccccttcttcttcttgtacctaaggagtgggtaggagatcctggtatgtattctaggtgagtgtgggccagacaatggtgcacaccgtggcgccctgggccatgcaatccagtgtgtttggaatagagaaatggaatatgagtaggtatcaagtgccagcaggcaatggctgtgtctgtgccagggacatgaggaccataacccagcagaaccagctgcccaaatgccatgcgacggtcaacactgaagacccaggacaacagcagctaacacctggaggcaacagggtgggcctgtaaggagcactcagcctccctccccatctcgtgctcccgtgtacactctcaaggagatgctggtcttccttatctggatgccatctggcttctccacctacctccttctccagggagaggcctctgacctcacccatgtcctctctcagagataaccaccccggtgagcccagcctgtcttccagcctctgcatgcctcagttctgaaagaacatttgaagggatgacaggccaggcgtggtggttcatgcctgtaatcccaacactttcagaggccgaagcaggcagatcacttgaggccaggagttcaagaccagcctggccaacatggcgaaaccccgtctctaccaaaaaaaaaaaaaaaaaaaaaattagccagatgttttggcacacacctgtaatcccagctactcaggaggctgaggcatgagaattgcttgaacctgggaggcggaggttgcagtgagccaagatggtgccactgcactccagcctgggcaacagagcaagactcagtctcaaaaaaataaataaataaataaataaatagacgacagtggtggtagtaacaattacaattataataatatggctaccatatattgagtatttactatatgccaggcactgtgctaatgctcacaacagccctaagaggcattatctttacacaacagtggaataaactgaagctcagagaagttgacacagcaacatggctaataagtggcaaagctgggatttgaacccagatcgttgttgatgttctccagcacctcaccctgactatactcttgcaggctggtgaaagcaaccagggcacccctactcccaggagtgaaagcagtggctatatttctctttccaatactgtgtgggctctactcggacaggggtggtggctggacttgggcaaatatcccacactccctgacactcactccaagggtgctgtgatggtggaccggggctagagaccccaggctgctggggacagctcctcccttctacctgggactttgtgcctctcctgggaatagcagctgatactccccagaacacgctggaaggtcagtgccctcgtgagataaggattccttgctataggactcctctctctcctagccatgttggcctcagaaagtccccagaacctcttcccctgccactcaggcttatggtgggaggaggaagtatgaaaagtcccctccactgaaaggccagaaggaaacgcagcgctcccaagggagaggtgactggggaaaggccttggggagagaagtgag

SEQ ID NO: 1244095 - DNA, 4001 bp, Homo sapiens
catcctagttctgggttaaagtatttttccattttcagtgaattgatcatttggcaaactgatttttttttttttttttgagagctgacttttagcaaattggctcttagcaatttacttttcagagaattgactcagtctttgaaagatgcgaatctgaaatttctccaaaagccccttgcttgcttaacgaaactctgcttgtggaaaggtccaccacctccaagtaatctgggtactgctcttggtcacttaaagcagttcctggcacactgtaatactctaaagctgctcagggctgttagagctcttttccgtctcttggcatgagacctcataaaaagaaatggactgtatcagagaggtctgagctatgagcgccttgctattgttcatattatgaaatattttttcacattatgaaatataatgaactcctcaccatattccactttgggctccaagtgagagttcaacacttaaccctggggcttctgaaacccaagtaccccaggaataactgagatcagaggcagggggttggaataattgactcttccataaattccctcaataccttagggatttctgctcatcagaaacttccccttcagtcttgatagccaaggaacatgaaaggataataagaatcaccaccgacctgggagataacttttattgggtgctccttttgtggcaggcactgtgataaatgattcacgtaatttgttctcatttgattttttttttttttttttttgagacagaggcttgctttgtctcccaggctggagtgcagtggcgtgatctcagctcacggcaacctgcacctcccgggttcaagcaattctcttgcctcagcctcctgagtagccaggactacaggcgcatgccaccacgcctggctaattttttgtattttttttttttaagcagagacggggtttcactgtgttagccaggatggtctcgatctcctgacctcgtgatccgcccacctcggcctcccaaagtgctgggattacaggagtgagccaccgcacccatccctcacttgattcttacaacagtcctctagagttgacacaggaggaaactgaaacttagagcaataaaacaacttgtccaaaggttacgcagctgataagaggcagagccaggctttgaaaccaggtgcttccagccctaaagcctgcatcctttcttaaccagtaagcaaactgccctcatttacttattcatttaaatgataaacacatgagaagagctcgctaaattaaaagcagattattttacaagggaaaaaatggaaaaggaagaccatttaggaacggtttccagtggaaataaatctccacttctcccactctcctcccaccatgcagctcttccgtgcatttcttaaattaaggtgtgtggatgtgtacaaatcccacagtttcgttgttgattggttgataacaatggggaattgagaaggagatggagtacaaacggtcaaggcctcctggctggccacctgtcatctaccttatactgaccttggagcccagaatccagttcatctaaccacttgtccccatctgtgtccagaatgtccatcagggtgaggcctgttgtgtagtgccggcatccaaagaaagttctcttctcccccaccagatggaagcagcggaatctatcagcatcaacaaggcttctaacggcaatcatatcccctccagcatccatctccttaactacaattcttgtgatttcctcaaatacgctgaacattgcgcctggaccaactcagaaacagaagccaatttcagtttttgggaggagggtattggttcaagtatttaaatcttccacatttggcagcctgaggtgtcaggcctctgaacccaagctaagccatcatattccctgtgacctgcatgtatacatccagatggcctgaagcaactgaagatccacaaaagaaatgaaaatagccttaactgatgacattccaccattgtgatttgttcctgccccaccctgatacaatatagtctccccgccgccgcccttaagaaggtactttgtaatattctcccctgcccttaagaaggtactttgtaatatttctccacccttgagaatgtactttgtaagcctatcccaaacatataagaactaatgataatgccaccaccctttgctgaccccttttttggactcagcttgcctgcacccagccttgttgctcatataaagcccgtttcgtggactctcttcacatggacgcacgtgacatgaggtcaaggaagagccaaaggttccaggacaatcagtacctggaatgatttgcctgccttacttctagaacgtgaggcagccatgactcagtaaagagggctaaacatcacagatcccagattctcctctgcccctcatggtacccatctggaggaaaaaagtagcagctattgccccaaatagagaaagtgagacccattttctacatctcccacagcagagttgcccccttgttccaaggggcccaagggatggaaaggcaggcccaccatgccccagccagactagccccaacgttgatgaacagaggaaccagggaggaatgacgggcacggttgccagacttcacattactaacctcaactggtcgtttcttcccttggctctgattcttgggctccctgccttgctgtattctgcaaggcaattggatgggtgcctccctaccaacaatttcccaatgaggtggtggtaaattggcctcagaagaaacaaaagcttcctgggatccacttccccatcctacctttggccaccttcccctatatcccttctgcccagcacaggcacttatccactcactgcttcctcctctgtctctggccccatcatggtggttgactctcagttcactaccaacctgggaattctaggtgtctggaaagacagtacccgggaaccacaggcccatctcaagtggtacccacctcctctctgacctcagctgttcaccagaaatggaagttgtgagaatccccacagatctctgcacagttcctggcctctgaatctcaggaagctaaaataatgaaactgaaagttgtccaggtgtggaacttcctggacgggtgggtagggctgggtgccccacctcccaagcctttagataagccaccttataactgagctggaggcagattaaggccagaaccccccttttttttttttttttgagacggagtcttgctctatcgccgaggctggagtgcaatggcgcaatctcggctcactgcaagctccgcctcccaagttcacgccattctcctgcctcagcctcccgagtagctgggactacaggtgcctgccaccacgcccagctaatttttttgtgtgtgttttttagtagagacggggtttcaccgtgttagccaggatggtctcaatctcctgaccttgtgacccacccacctcggcctctcaaagtgctgggattacaggtgtgagccaccatgcccggccagaaccccttcttcttcttgtacctaaggagtgggtaggagatcctggtatgtattctaggtgagtgtgggccagacaatggtgcacaccgtggcgccctgggccatgcaatccagtgtgtttggaatagagaaatggaatatgagtaggtatcaagtgccagcaggcaatggctgtgtctgtgccagggacatgaggaccataacccagcagaaccagctgcccaaatgccatgcgacggtcaacactgaagacccaggacaacagcagctaacacctggaggcaacagggtgggcctgtaaggagcactcagcctccctccccatctcgtgctcccgtgtacactctcaaggagatgctggtcttccttatctggatgccatctggcttctccacctacctccttctccagggagaggcctctgacctcacccatgtcctctctcagagataaccaccccggtgagcccagcct

SEQ ID NO: 1244096 - DNA, 4001 bp, Homo sapiens
gagcacgttcccccagtgtaagtctcggtgctcaaagcgcagtgatgcctctgccactgcgagggaggctgtgagctggtgtagaatgctctttgcagtagccaaggaagacaacttggttcgcatttgctctaagtcaatccctccaaactcaaattccagcacaatgaagagctggtcgtctttaaaaaaatcaggccggtcatttgcagagcctttggttgaattatagtgatcccaggctttgaggagcaagggagggtaagatccctggacacagtgcactgagttcagcccgataaagccttctgtgcggttgcacacttcaccggataagaggctcaactctttggagatgatgatctctggcaggatttcctcaaaggttttctgatgggatccattgactaaatctggtccttcaatagcaatgatttttatggctacgggtgtgtgatcagcaattgtttgaaacacttcgccaaacaccccttccccaatcttctcacagcgttgcagtttttctgtgggaaggcaatggctaaaggggacaggacccttctgactgcattccccataaaccttttcagcatcagatgcctttttgtttgaaatacttagagtgtttaaggggcttagcaaatacatagaggaggagtgccaagaggacggagcaccacttgttctgttcatgacaggccggtttgaacattctgataggagggatccagagagagaagtggcagtggtatagatgctgcagacctctgacacatcagtcacaattttcttcttgtggaaactgaaggaagccctggttttggtccaaaagcagacattctgtaaaggagtcaggtcctgggtggggaacgaatcttttcccagcttttggccctttttaaagcggtgggaatggaggagagaggtttccgttgcctcctgatgtttgctcttccggcttgatctagttctctccagcctgtctattccccttggcacaatgcggcccttgggaacactggcctcctgatgctctctccggacggcctcttgaagccctctctcttgacaagagtcctggcctgtggccctcctcttgcctgtgcttgacagacctggaccctctggtccatttcccaccaccagtttccttttacagcaggactctctcatattcttcccatctgcccgaaactcagaatcctcaggggttcctgagttcataaggccaaagagaactgacctgaggctggcgcgggtttggtggaccatcctggtgtccttggctcctcctgtcgcttcctcctgggagcaggggagagatgctcggtccagggagacttctgggaggtggaggccgctcgggacggctgaggctgcaaccagacaggcggaggtgccgatcgagatgacactgtcccttggcgttggggacccggggcagggcgaggccagagagctgaacagggaggcactgatgcccagctcgtcgccgtccctgggctggccgcacacgctgaggtccgggctgaggcggccggagtcgcggctggggaagggcggaagtcggagcgggccgcagggtgtgctgcacttctgcgggggccgagctcgcagccccaggcgtcttggggtcacggttaggcttgggcgagctcgcagcttccagcgctttggggtcacggtcaggctgggccggtccttgggcactcggccgccgggacgcctccgccgccgcctcaccgggctgccggggaagtcggggtcgtcgggatcgtcaggatcgtcggactgcgaggggtcgccgatgctggcgtcgctgctgccgctgctgttgaagaaacgcctccggtcctgcggcgggaaccactgcgcggcttcccggcccggccgccgctgtctcctgccgtccgcagccccatatgtgcggaaaagccggctcccaggtcccgggagcgaagccgccatggccggcacccgccaagaggttcaaacgcaaacatcgcgagacttccgtgcgacgcggacgcgcccgcctgccgcggggtcctagctcccggccctgcgcatgcgcacctcgccagggccggggccgggacgggacggaaaactggcggcttggtttgttcagcgcgtcgcggtcatggctctcgtttcaggcctccacggtgtgcacctggagtcaggagcgcgcttgtgcgtacagttcggttcaggtaagcgcggccgtcccgagaggccaggggagggcggagggcctgaagcgggtaacgagaggccaggagactgtttttcctgggttacccctgccggccagtgccgggggctgccaggccctccctagcttcgtccctgggtctcaattgctcccgctggagcttcgcttgggccgaggtgagcgctgaaattgctcacaccctctattctgggaccttacgatgctctgtgtccgaagtgttaaaaagatttcagactttccgcacggaaaggaattgtgttcactagacctcgcttttccagcatgtggaagaatggcattcagtgagctgtgtcatcgcttcagataaagaaaatgtcaccgtggctgcagagatctcctgggatcactctgaggaggtgtttgagactgaaatgctccagatttgattatccagttgctcacgggcatcgcccctagaagagataatagcatctttgcataacatgtccatgtccaaaatagatcttttggtgcaaaaaaccaaccctctgtcccaacccgttccttagctaccctcaggagggagatatactccagttacagtacaaggaactcgagggattacctgtgactcctctttcctacatccccacgtctattccagcagcaagccctgccatttcagggccaaaatatatcctaaacccattcacttctctccatttccactgccgttgtaattcaagctaccctttcttgccagggctgttgcaataaccttcggcctgcctttcttgcctctgcttttcccacattctttacaaataattcccacgtaacagctatccgtcttctaagagcagacattagattgtgccattcccctgcttattaaaaataacaaacaaacaaaactgatgcttgagcacacttagactaaaatccatacttttttcatggccagagcaaggcagtacttgatctggtctctgcttaattcttcaacttcatctcctagtactcgcctttctctcccactgccccttttataatcgggttattctgtcctattcttctagctcgccagtacagcattattctggccacaagactttgtacttgctgttcctttgcttgacactgctcttcctctaggtcctgacgtaggtggtttcttcttaaatttagctcaggtgttcttttcttttttttttttttttttttagatggagtcttgctctgtcacccgggctggagtgcagtggcacgatctctactcactgcaacctccgcctcccgggttcaagtgattctcctgcctcagcctcccgagtagctgggattacaggcgccggcgaccacgcccagctaatttttgtatttttagtagagagggggtttcaccatgttggccaggctggtctcgaactcctgacctcaggtgatcgcccgcctcagcctcccaaagtgctgggattacaggcgtgagccaccgcacccgacctaggtgttcttttcttttcttttctttctttcaagacggagtttcgctcttgttgtgcaatggcacgatctcggctcactgcaacctccgcctcccgggttcaagcgattctcctgcctcagcctcccaagtagctgggattacaggtatgcgccaccatacccggctaattttgtatttttagtagagatggggtttctccatgttggtgaggctggtcttgaactcctgacctcaggtgatccgccctccttggcctcccaaagtgctgggattacaggcgtgagccaccacgcc

SEQ ID NO: 1244097 - DNA, 4001 bp, Homo sapiens
gatgttggaaatacactatggatctggttaggattgcccctgaatccacccagggaactttctgcttcttgcaaggtgtctaggcccttgaaaagctaagaccaccagatgaggccccagaggaaatacctctgaactagggatgaaggttggattggcatcctccctccttcctgctttcaagaacaccaagtatttattttagacagctgggagtatgtggtggtggaaacgggtttactttgaagccaattgcaaaaggttttgcagtttacagttcattagagtttactgcttgatgttggacttgagaggtcgaattgcctactctctagaggcaatcctcgtacactaagagaccccaagtggggccagagcctctacattacccaggaaactccaaacagctagagctgccagtggttctttctccattggctgcatcctcctctccctgctttggctgtcctctcccctctcccttgccttcttccctcctcccgggaccgtctacctgctgcagattgaggtcagagggcagctcgcggcgctcttgagccctgcgcaggctgtccagcacgctgccttcagagggacagtggcgcgtgagggtgagcacggcatcgtgggccctgcgaagctgggagctgttggcgagtgcggccaaggcctccgggcctggggacaaggcgtagtggatcgtgtcgaagggcaggaagaccagggagccatcggtcaggcccagctcctctgcggcctccaggaggtagcgctgctcctcgccacccagcagcaccgagtgcatcaccatgatcactgctgcggacagaggcttggctcgcggcgccgtccggctgccggcaggaccagccgacctcctcgcaccctgcaagggagcctacctgtgaccctgggcccgtcccgaaccttcctcagggcctcccgggctccagacaggtccaagggctccatggaagtcacggaggcgacaggcaggccccgggccctgagtgccgtggacagtgagcgtcccgcctccacccacaggtcctggggggcggtgaccagggccacgcgcgcccagccgaatgcgcgaagcagggcgtagagggcatccgcggcgggggtcacggcaggggccgtggtgccctccgcctgcgtccaggggcagccccagggcaccagcgcgatcccggcttcttcggcgagcagctcggctggccggcaggccgcagggttcaccggacccacgaggcccgacacgcgggccagcgcggaggacacggcccccagcgagcccggcgtccggcaaggctcgggcagcagcgctacctcgaagcggggaccgcctgccaggccggggtcgcggttcaggcgggcggcggccaggcgggcggccaggtccgggcgagcccgagagaagatggggtcgcaagcccaggggcccaggacccccaccgtgaacacggcggagagggcggggggctgcagcagaagcaggagcagcaggagcgggagccggggcagggcccgggggaggcggggcagggacggagcccaccacgcgggaccgcagagcccggggtccggaagcccacccgctcggcgggcgcaggcggtcattgccggcttctgcgaacacagacggagcaggctgagcgactgagaccccggcctcccctagggttctccccgtaaccccgagtttctccaagcccgagtaacccatgggatgattctgctgctaccgccccctccggaggctgggaagactaactggggccaaggacaccgccccgaagcccccttctgccgccccggcttcccgctcccacccggcctgcccctccccccgtcggaggcgtcaggggtcagcagggactcgcctgcgccctcagaccgaccctatcccagcggaggggcctctgacatttacagggaagtccgggggctcgggcccacggcccccggtgaggggtcacagggccggtcccccttttgacgcccgcccacaggtcttccttgccagcccaggccagggcgggggcgtgggtacagccggccagagcccttaatctccccaagctgattagggtccttaattaggtagggaggggcgggctagtggaggatgagagcccctactgcgcctttctggggtgggatctgtcctggcttccaggtagtcagccagatcctttcccctccatgccttccagccccccacatcaccctcatcaccaccacccctgcacaaaagcagccgcagcttcccctttcagccgtcggccacactgccctgctcagccagaaagtaacaagtgcctgcccgtggacagctgtgggtaatccgtcctggagaagaaacactgatcccagtccctttccttacaatcttctgtttccagttctgccagctaagttcaagctccatcctttggctggcaaagtctatatcccagagaccaaacccacaccaagctgacacctgcctttcttctttcacttctcttctctctctcgccacacttgattccctgacctctgcttctccatgcctagaaaaccaccctcaggaagtaatgaaaagagctttggcctccgacagacctgggttccaagtccctcttgctgatttttggaccttgggcaattgcttaatctgagggttgttgtgaaaatgaatataattgcccggatggcaagaatagctaacaattttagagaagagtataatggaagatgccctataagatatacaaatttattataaagcaatagcaattatgtatttatgtaaatatataatatataaaacatagcaattatatatctacataaatatataatatataaaacatagcaattatatatttatataattatatgatatataaaacagcaattatataaatatatactataaagctatagcaattatatattatatatttatataaatccacattatgtagtgacagcaattatatatttatataaatatatattataaagctatggcaataaagacttcatagttttggcacaaggataaacaaatggaccaatgaaatagaatatacagtactgaaacaaacacagcaaatgtgtgaagacgtggacatttcttaccaactgggaaagaataaacttcaacaaatggagctgattagccatctggggggaaaatagaattcaatccctatctcacaccatacacaaaatctattccaggtcaaagacctatatgtgaaaaataaaacttaaaaacttttaaatgaatcattttcagacttggtggcaaagattggatcaggtaagaatcatcagtggattctaaagctgggggaaatgttggatgaggagcagaacttttgcagggtctgaaagtatctccctccagattgccatgagttggaagggagtggggaataaaataaaaagcagtcattgtacagtggagaaatggggcaatactttaagcaagtgatcaaaattaaccatgaggggcagagagacattctttgcctccagatgtgataccctgagaaggacataatactacacctatgcagtgctgcacaatacgtctcggcaatgttccagcattatttcaaatctaatcacaaggaaacataagataaacactaaatgagaaacgttctatttaaaaaggtggggaggactgcattcttcaaaaatgtcaatgtcatagaaggcaaatagaggttgaggaactgtttcagattaaagaaacctaaaaagacatgacaattatatgcaacacctgcccttagtttggattctgtatcattggatttttttaaagtgctataaggttatagggcttgaggccgggcaccgtggctcacgcctataatcccagcactttgggaggccgaggcaggcggatcacttgaggtcaggagtttgagaccagcctggccaacatggtgaagtcccgtctctactaaaaatacaaaaattagccgcgggtggtg

SEQ ID NO: 1244098 - DNA, 4001 bp, Homo sapiens
ttcagaatgttagttaagatgatgctggtgtgaataactcgttttttctagagcccttataaataaaatcccccagttagtgtttgcattatcagctagagggttaacatgtggtagaatgaggacttatgcaaggtataaatgcgcatagcattttactactatgagaacaagtgcagtcagaagaaaaccaactggactctaaattacacacaccttaatgacaagactccccaccacttgtgaatgtaaaacatttaatttaaaaatgttgatactacaatatataaaatagctattataaatgcacatagtgtattctatagctgccaggtttactttttttttttttaaaggaaactgtaagttacactgtggttaagacttgtatcttcacccttgaaaaagcccacattctatcacagtgatgtatggtcagacttaacagccccaattgttaaacacttggatcaagtcataaccagttttattgcaaaaggaccctgtacacatttatcaactctagtaccttaatagctacccaacaagtcattaacatacagaaacatgcatcatgagaagcaagaagtatcacccatcccttctgcatattagcaacttgtcactcctgagcaacagtgctcacatcactgaggtctgtgaacagtcacttttcgcattcatcctgagtgaaagatggaatgacttaagtacaaatgcaacatattataaacaatttcttacaaaaaaagtcacaaattaaaccaaagtattttacagaatttactacaaaacgccataaaaactgccttcacttaagctctctctccccgtatccggcgagccaactggatgtctttgggcatgatggtgactctcttagcgtggatggcacacaggttggtatcttcgaacagacccaccaggtacgcttcgctagcctcctgttgaggacgagagccgcactattaatcccactcggggagcggaaaccgcccagccctcccccggctccaggcctttgtcttacctgcagcgcaccgatggctgcgctctgaaacctcaggtcggttttgaaatcctgcgcgatctccctcaccaacctctggaagggcagcttccggatgagcagctcggtcgacttctgataacgacgaatctctcgaagcgccacggtcccgggcctgcagcgagcaggggaggagtgagcggacgctgccgcacaaagccggccaccgccgggccattgttcccccgcccgacctacctgtagcgatgaggcttcttcaccccgccggtagagggagcgcttttcctggcggctttcgtggccagctgtttgcggggggctttcccaccggtggacttacgagcagtctgcttggttcgggccattttctttcacctaagaaagacgccccgaagataaggccgccgcgctcacccgggccgccccccagggctgcggggggaggaacagatcctggccccaccgccgggcctcccgcctccccgcgccccacctcgcggcagcagatggccgagggccgccaacctcctccccctcccctaatgactcaggctgcgaggagcggcagcctcccccgggagggggagcgcggggaggagtcacttcccttcctcgacgggcggaggcccgactgcccggaacccggcgtcgggacctctgaatcaccgccgggaaaaggcggggacacagttccggaacaaagccccaaggggaaacctcccggccccatacccgacccgacgccagcggcccgagcagcccccgccgctcggctcccaacggccgcggcgcgcggcgccaacggttggcagaacctgaagccgcgggtaaacctacgaacgcctacccaacgccgaagttttaggccacttctccgaccgccgcgccgcttccgctgcccgaggaagagccgcagtcgacgagcgaaaaaccagcaccgcccaacgaacgaccaaaccgctctgcgctccaagcccccgcgtcgcctccgtttttataggcacgcttcacgctgcgtctctgcgtcatagaacccttatttgcatacaccaacgactttttctattggtgggcgctttcgccgacgcgctgacatcccccgacacaaaggccgtgcttcggcactgttccatgattggtgcatatctacgccgctgattggctgttaaagtggcctaatgattggatggatgcaaagaggaatggacgaatcagagtttagcactaagcggcccttctgattggataaaatggagctatgtttggatccttcccttggttccaaagctctgcaatagaaagtcaatgcaaatgaattgcattggtctctatcagaatgagcaggagtctaaactcacaggcatcaagcgaatgctatgcacccagagaggctactttaacaaaatttttgtaaatattttccgatgtaaaataaaatgtgttccctggattatttacctttcataatattttgatagttaagtgcgtagtgtgagaattagaattcagtaaatcatgttatattatcaagtatttcatatatcatgcacatacatttttaacaaaaagcaggtctcttggtggggtgggaaggggtaaataataaatacaaataaacatgttaataaattattttagaggaactgttttgtatgtttttaaggtgtcacaaaatattttttgatttccatatgcttaaacaagaggtaacttactaagcaacatgttacttgaattatgtacttcaagtgaatgaaatgactacagctagaaagtaaatagtcctactatagtatttgcatgtccataaagaataaacaaaagataactaaactagatatgtgcccttttgtttaatagcatatcctggcaggtattacttctgaagaaacatgacaaatgtgtaaatatgctaatccctacctttgcctaagtaaatgtcttgggtagattgtaatagtcagttcttcagttgcctcaagtatataaaataccatagcaggcttaaggttaagactagccaagcaaagcccagaaaattgaaatagagccttgggcattctactctatagttctgatgctggtccagcaaatattctaaactattaaaagaaaaagtagcagatacaggtatgcataggtttcaactaaattaatttttttttttgagacggagtctgactctgtcgcccaggctggtgtgcagtggcacgatctcagctcactgcaagctccgcctcctgggttcacaccattctcctgactcagcctccgagtagctgggactacaggcgcctgccaccacgcccggctaatttttttgtatttttagtagagacggggtttcaccgtgttagccaagatggtcttgatctcctgaccttgtgatccacccgccttggcctcccaaagtgctgggattacaggcatgggccaccgcccctggccggtaattttttttttttttgaagtggggtcttgcccagtcacccatgctagagtgcagtggtgcagtgaccacggctcactgcagttttgacctcctggactcaagcaatccttctgccccagcctcccaaagtgctaggattacaggcatgagccaccatgcctgaccttcagagaattacagtacgtaagtacaaatacctcaatattgacttgtcacaccagtggtcaagtatcaaacaatgagaaaaaaatgcacactttgaaaaactagctcagcttcatctcaatctctggtatcaaattcctgttattatttcagccttcttaatttttttttttttttttttgagacggactcttgctctgctgccaggctggagtgcagtggcgcgatctcagctccatgcaacctccacttcctgggttcaagcgattcccctgcctcagcctcccaagtagctgggattgtaggcatgcgccaccatgcccggctaattttttgtattttagtagagacagg

SEQ ID NO: 1244099 - DNA, 4001 bp, Homo sapiens
taaacaagacccccacccctacaggacaaaactagaataagggcttgcctggatcaggaaggcagtacacacctcctccagcaaatataacatcactttgacgtcttcctgggtgatctttttgactggcggaggtaggttaggacacagtgctgcaggaggcggcaggtggggagaaaaggcccagccaggtcaggaaaaaggagcagatgctaccagcaaacagctgtttcccgtcctatcgtcagttctccaacaagggtcatcgggagagaagactgggctcccctcctgccccccacatcctccccttacccctcggcactcaacactcccttccctgctcccagggccaagtggacagggtttttaggtttttgggttttttttggttttttttttttttggtttttttttttttttagacaaagccttgctcttgtcctccaggctggagtgcgatggcgagatctcagctcactgcaacgtctgcctcccagattcaagcaattctcctgcctcaacctcccgagtagctggggttatacacgcccgccaccacgcccagcttatttttgtatttttagtagagacggggtttcaccatgttggccaggctggtctcgaactcctgacctagtgatccgcccgcctcggcctgccaaagtgctggctgggattacaggcgtcagccaccgcgcccggcttttttttttttttttttttttttacccctggaggagcctgaggtaagggggtcacagtcctccaggctcagaaactgggctctccggacacctgggtccctggcgcctagaatggagacagccaggggaagtacagcctcagactggctcatcaccccctacccaggaggcagtgcaatggagtctcctgggtcatacaaacagacgcagccactcaccctgcacctgttgcgtgtgcagaggacaggaggaagacttcaccagattaggagacactcgagcctctaggcccaatccagagatctcccccgacccgcaggaggataggagagacaaggggcaggaaaagagcgcgactttgcccccatacccgcaaccaaaaagtgggcaaaacttccccctccgcccgcccacccacccctccatcgcacgcaagcccggtcggccagcgcagactcagagcgcgcgggacagcgccctcccgcagccccccgcccctctcctggcactgcggtagacccaggagaggggcgctgaaggggtgcagatctgccgcagcaagaggcgcgtggaggtgggtgggcgagcgtgcaggccccagaacctgactcacgggcacaaaccaggggacaagagcagaggaggagatggagaaggggcgaccagacagacaccgcagtgacatcgcgggggtggtggacgggtgacactgagtgctagagggggcggggtgcctggacccgatggggccacttcctccctggagttgccccagtccccacccggtccaggaccccgggggcccgatttaccttcctccagctcccgaataaaggcggcgcgctcagggccggacaccccgggtcgccggccaacgtaggcggctggcgtcttccagatgcccgctgcctttccagtcccccggccagtggcccgggaaccaaacggcccttggaatacgaagcgggtccacggcgcgtccgaattgtcgggcatagaccggacatccccttggatggccgagaatgcggacgggcgccgggctcctgccttggctccagcctccgaggccgggcgagctccggtgcgggcttccgagaggaactgggatccagaggtggctcgggatcctactctctgtccagtgccccgtgcctgcggctgcgcagagggctccggagcgggactggctgagggcgaaggtgcacaggtgagtgctgctgggtccccgggtccgagccggctccccgcgcagcaccggcccaacctcttcgggcgcatctcgagtctgccgtccgctgctgcggcgggacctttataacctgcgccagccgccgggccggaccacgcgtaggggtgggggctgccgagaagcaactagtggcaagcgggactcagagccgcgcgggaggggagctagtggtgacggaacagagcacagtaagaaaagcagggcaagaagggcgagtgcaagttccggatggctccgagttgggatgggagcgaaagattttttctgccctctccatctccggagaatggttctgcccaaagccgcggctgccccagcactcgcgggtccctggctgggggcagcccctccccagctgccgcgccggggtttcgggtgccttccctggtgtagaagctgccaacccaacgttgtgcatacggtctggggtggccagtgcattagggcagcgctgcgtctttcccggttgactgggagagacattccaaactccagtgcgcttccaacgtgctgcaaccctgcctggcgctgcaaccctgcctggcgctgcaaccctgcctggcgctgcaaccctgcctggcgctgcaaccctgaccctcgcgctcacaccccagtgctcgcgccactcgacgtcttccatttgattggattaactgttcttcacctccaaccctagttcgctttgccctcctcttgccatgctggcgaacccctgttctccttgggagacgcctcttaaaagtctccctgtagccgggcgcagtggctcacgcctgtaatcccagcactttgggaggccggggcaggcgaatcacctgaggtcaggagttccagacaagcctggccacctggtgaaaccctgtctctactaaaaatacaaaaattagccaagcatggtggcgtgtgcctgtagtcccagctactcaagaggctgaggcaggagaattgcttgaacctggaaggtagaggttgcagtgaaccgaaattgtgccaatgcactccagctggggctacagagcgagcctacccctcaaaataaataaataaatagaatactttttttttaagtatcctactggaaatgttgggtagacaattagatgtataaatctgaatgtaggggagagaccgggctggagatttaaatgtaggagtcattgttctttgatgaccatttaaagctatgagactggtgagatccccaagagactgagagaagacaggtaagagcgcccaggactaaccccctaggattcagagggcagaaagaagaagaggaggcatcaaaggaagactgggatgagtggggcagtgaagtagaggaaaaccaggaaagttgggtcctagaaagtaaagaaaatgtttcatgtagagagtggccacctgtgttgggtggtgctgttgggccaggcaaagactgaggacagagactcagcttggcaaactggggtcatgggcaaccttggtgagctggggtcatggcctcggcaagagcggtcttgcggggccaggcacagtggctcacacctgtaatcctagcactctgggaagccaaggcaggtggatcacctgaggtcaggagtttgagaccaacccagccaacatagtgaaaccccatctctactaaaatacaaaaattagctcggtgtggtggaacaagcctgtaagcccagctacttggaaggctgaggcaggggaattgcttgaacccaggaggcagaagtttcagtgagccgagattgcaccactgcactccagcctgggcaacagagcaagacttgtctcaaaaaaaaaaaaaaaaaaaaaaagagcggtcttggtagagggggtgagagagaccaaagaggagtgaggaaataacgagaggtaacaaaatgaaaacagaaagaaggctaggcgctgtggctcacacctataatcccagcactttgggaggcttaggagggtgaattgcttgagcccaggaatttgaggccaacctgggcaacatggcaaaaccctttcgctacaaaaaaatacaagaattggccgggcgcagtgac

SEQ ID NO: 1244100 - DNA, 4001 bp, Homo sapiens
ccttcctttctttcctttctttcttttcttttttctttttctttcttttttttttttttttgacagtgcctccttctgttgcccaggctggagtgcagtggcccaattatggctcaaactcaaactcctgggctcaagcaatcctctcgcccaccataccccgctaattaaaaaaactttttggagagatgtctcactcactatgttgcctaggctcgtctcgaactccttgcttcaagggatcctcctgctttggcctcccaaagtgctgggattacaggcgtgagcaccgcgcccgaccgctgcaacctttcttgctttccttccccttccgcgtctctgggtaaagtccccgctacagaatgcctagcagagcatcgtaggagtcccgcatggcccgatccaagcatgcacctgtgcagttctctctgtgccccagggccttgcactgggaactccccaaccaagagtgtttccgattcaaccacgcaaaagctaaggctggtgcccgacagccgggcttccaggcccagctgtcctccgcaagacgctttgccaccccggatgggcaggacgcgaccgcacaggaacagagaccagtcacacgaatggagactcgtctttattgccttttttctgggggctgacgctgggtgggcagagggcagaggcctgggccaggacagggcccgaagaacgactcagatcccggactgtcctccgggcgcgacggaggcggcggccggggcggaacagcggcgcccgaggcaggggcgcggcgctggctctgcgcctgcgcggcggcccatggtcaggatgcccgcggcgtggttgccgctggcctgcaggaggcgctgcagccgaccctggaggcccgggggcccggacctccgcttgcccagcgtgaggatgccggccgcgtgattgcccgcgccgtgcagcagctcgtagaggcggcaagagcaagtcttttgacgacagcagtcgggcaggggctgtgcagccgccccggacgacaacagcgcgggcggcagcagcagcagcagcagcagtagcgtcacggcggcccaggagacctagggagacggagacagggcgctgggggggtcttcccacggcgcccgccaccagctcccacgcccaggacctgcccctctggctccgcgccccctccaagcctgcactcctttctggctgtcacttagttctccttgctttgcgcccttgctggtatcggcctactttccctgctcctccttcaagacccagcagagcatctcccccaggaagccttttgagaccccctgggcagagtgaatcccccttttctctggagacttaggccactgtgccaccactagggcacttgccactccacctgaaaacaggagtgtctgtctgcagcagaagttgtaaacttgggaaaaacccgggccctactgagtccccccaacttcctctccacagcagggaaacacatggaaatcaggaactagcaagactccagaatgctctctcatctgcctgcccccttgcaggagtgactgaactccgttgctttgaaccagtttcctgccctttcagagggcacagctcccttacctgtaaactgggtatactagaaataatttctactctgcaaggctgttgggaggatgacaagagatgacaggtgcaaacggagcacctgacacatagagctcagcaaacacaggctcttagcaaaacagcacccaacccaatgtgagccaaggcaggtgctcctgcctcagagcacacccaggaaaagaccaagagtggagacacctttggcctttcttccagccctctgagcaagcactctttttgcttctctgggatggtgagtcacccctccatccctggatctttacctttgtggaaggaaggttcatggtgtctggcgctcagggtggggtagccgggaaaggagatgtctgtggtggttcaaaaagccaggaaccttgaggctgtcaattgtgacccactcccaggggtctggggtttatagtgctctgaggtggcggggaattgacaggcacttgcgtccacacccaggccagacaaaggcaagtctaagattagcctgctgcaggggggccgtctccaggctgggcccaaggaatggccgctgcggcgttcagaggccagggttggatcactgtgcccctgatcacccccttgtctgtctatctgctccctggagatggggcggtctccgggcactaatgaggccaccttgcacccaggaatctgggagcacaaaagaggcgctggcctgggacaatatggagggaggcagctgctaattaggggcgggagagaggcagacgcgagaccccacattatgtgtgtggggggtggagcagccagcagcagtcctctccctcccctgcttcttgtcgctgctcctggggactgtcaggctccaggaccttcttccttcatggaaaggctccttagctgccccctccccctagctttttttctcccttctgccctttccactagcctctgagatggaaaaccttgaaaactcagcctagacagtgggaggtaagaagccaaaaccaagcccaatttctctttctttcttttctgtgtgtgtgtgtgtgactaaattttggtcttgttgctcaggctggagtgcagtggtatggtcatcttggctcactgcaacctccgccttgggttcaagcgattctcctgcctcaacctcctgaatagctcctgaatagaattacaggcacacgccaccacaaccagctaatttttgtatttttaatagagacagggtttcaccatgttagccagggtggtctcaaactcctgacctcaagtgatccacccacctcagtctccaaaagtgttgggattacaggcgtgggccactgcaccaggcccccccgctttttttttcttccttccttctttccttcttccttccttcctgcatttctttctttctttctctctctcactctctccctctttctttctttcttcttcttcttcttttttttttttttgagacggagtttcactcttgttgcccaggctggagtgcaatggcgcaatctcagctcactgcaacctccacctccagggttcaagcaattctcctgcctctgccttctgagtagctgggattacaggcatgcgccaccatgcctggctaattttgtatttttagtagagacagggtttctccatgttggtcaggctggtctggaactcctgacctcaggtgatccgcctgcctcagccacccaaagtgctgggattacaggcatgagccaccatgcctggccttctctctttcttcattttcttttctttttcttttctttcttttttttttttttttttgagacagtctcactctgtcgcccaggctggagtgcagtggcgcgatctcggctcactgcaagctccgcctcccgggttcacgccattctcctgcctcagcctcctggcagctgggactacaggtgcccgccaccacgcccagctaattttttgtatttttagtagagacggggtttcactgtgttagccaggatgttctcgatctcctgacctcgtgatctgcccgcctcggcctcccaaagtgctgggattacaggcgtgagctaccacgcccagccctctttattttctttcttgagaaggtttcactctgtcacccaggctggagtgcagtgggacaatcatagctcactgcagcatcaaatgccacggctcaagcaatgctctcacctcagccacccaagtagctgggaccacacagatgcatgccacaatccctggctaatatttaaatttgtttgtagagactgggactcccaggctggtctcaaatccctggctcaagccatcctcccccttcagcttcccaaactgctaggattacaggtgtgagctactgtgcctgaccaaactcagtttctaccagaggctgatagaaagcttctacctcccca

SEQ ID NO: 1244101 - DNA, 4001 bp, Homo sapiens
acattcccaggccccatttctaaacacacaattaagatgccacccctacggaaggcaaagcaaacctttgtctctgcagctacttggggtgggtggggcatgtgaaactgctgcccccctccaaattacatgatccagccaaagtaggaggatatattggaaaagaaggggaggctggcacagaactaacatttcctccatccttgcccccaagtaacccacacttgagatctgtctctctggtctctggcatgcccacattcccaggacagagtggagatactgggggcccatttctctaactcagagagacccctactgctttgtcaagaaagcccagatccaagttcaagtgaagagagggcaaagagaggagtcaagaaaagaggaaggagacaaaccaagatctccccaagctttgtgtttagggagggagaggaaggagggaagactggaatgaagaagcaggcagcccccaacatggctcatccaccatccagcccagccagcctagcccagcccagcccagcccagcatctcaacagccagcataggctcagggtgcctaggactggggagactgaagaccatgcctgcctgcctacatcctctgaaactaagaggaagccaaaggcaggacccagacccagactgcaatcctgcaaggcaatctggctaggggtccctctgaccaagactcctggatctcaccctcccccccacctccttttgttcccataatctggctccatcctcccctcccagttggacactgaaaccaatcaccaccacctccccaagctccaaatctaatcccagatcccaaaagcatggtggtcactgactgagtgatgggtcccttttgcaccctcctaaaagcaactgcagctgttacctttcctctttagggacacacctcatttcagaaggggtatcagccaggggtatcaagtggtcatctcctctcccaaaggaagcacccaacctccccacttcaacagcccccaccaagctcccagattaattacttacacccagccagttctcatcttccccagggccccagggaagggtggggtggagaagctgactccccccaagttaataaggcactggtagtgcccccgcttccatgagatacagatccaggatgaaaaatggggggcatccacccaagacaagaaggggttgggggggagctccatttcatctcctagctctcgcatcctggctccaaggtgtcagacaggagaagagggtggcaacaaacgcagtaacgcctcacaggagacggggtgagaataatgggagagagaagtaaggtggactccgcagtccccctcctcatgcacggaagtcaaggacataaaatcaaggatgcgttcgtagctatggggagaagcgctctgggtggacagcacccctcacctcagagtaccaagaaaggggtgtccagcgaagaggggtctgcacagaatccgggtgcagggctcaaatggctctgcaacgcaacatgcgccgccagggaaggggcaaatcagacaaccccggccggtctccgagccatttgggggcgcagggcgcgagaaggcgggcccctcccttacctgtagggaaggcgcccctgtctgggaggggcagggaggggcgcgcgcagcaaccccgatgtcccgctcacgggctgccgatgctcccggggggcgccggctggctcccagggccgggaggaaggaaggggggcgcggagcgcggcgcgcgcgctgggagcccgcggacagagacagcaggaggagggggcgccgcctcgcgtcccggggtccggggaagatgggatctgggccggggcggcgcgctcacccgctgcggctcgagctccggcttcgcgggcggcggcggcagcagcggcggcggcagcggcggcagcacctcctcgacggctcctccatctttgcggcggctcctccggctccgctcgccgccgccaccaacaacaacattcggagacgtcactcccgtcacgtgacccgacccggagctaaaaatagacccagaccccccccccagccccccccgccttccccttgcccgcagccaccaccaacccctcccctgcctctcggccctccccgccgggcggggccagcgacgccatcgtgacagctccttaaagggccagtgcccagcacagggttcggccgagacggggtggaagggaagggatcggaacccagcgagcaggagtggaaggatcgctgcaggggccgagtatggatgctggggctcaacctttggattgtaaaagtttcctccttgcgctccccggactttcttttcaaaacgtggatggtgcaatcgtcgcttgcctaagctgctcccctaacacgccctcccgcggtcggggaggggacctggggatagattcccaggggctgggagggccaccgcagcctctgcagcggggcctggctgcgggtggatggttcggacaagtctcgaactcgccagctctgaccgcacacactgcatccgtgccagggaaagaaaagcctgggaaaggccagggtatggctgtaacactccaaggccttcaaaagggcagaccagcagaccaggagccggaaagacttccctgactttggtgccatccacgctacatctcctcttggtacacagtatgaacatgtttaattagacctagacaatttgtcaatgacccagcaattccactaacaaaaatgtattccaaataaataaacgttgttatgttaaaaaatgaacatgagattgtttgtaatgatgtgaaaagttgaaaacaacctaaatatccatcgatagggaattggcaagcaaagcaggagacattcattcagtaaaatattatccagacattaaaagttttataggggaccgggcatggtggctcacgcctgtaatccccgcactttgggaggcggaggcaggcggataacctgaggtcaagagtttgagaccagcctggccattatggtaaaaccccgtctctactaaaaatacaaaaaaattagccgggcgtggtggcaggcgcctgtaatcccacctactcaggaggctgaggcagtagaatcccttgaacctgagaggcggaggttgcagtgagccaagatcgtgccattgcactccagcctgggcaacaagagtgaaactctgcctcaaaaaaaaaagttttaaaggggccaggtgcattggctcttgcctgtcatcaatcctagcactttggaggccgaggcgggaggattgcttgagcccagttcaagaccagcctgggtaacatggcgagacactgtctgtattttaaaaaagaggccgggcgtgggccgggcatggtggctcacgcccgtaatcccagcactttgggaggtcgaggctggtggatcacgaggtcaggatgtcgagaccaccctggctaacacagtgaaacccgtctctactaaaaatacaaaaaattagccgggcgtggtggtgggcgcctgtagtcccagctacttgggaggctgaggcaggagaatggagtgaacccgggaggcggaggttgcagtgagcagagatcgcgccactgcactccagcttggggaacaaagcgagactccgtctcaaaaaaacaaaaaacaaaaacaaaagaagaagaagaggccaggcgcggtggctcacgcctgtaatcccagcactttgggagggcgaggcgggctgatcacaaggtcaggagatcgagaccatccaggctaacacggcgaaaccctctctactaaaaatacaaaaaaaaattagccgggtgtagtggcgggcgcctgtagtcccagctactcgggaggctgaggcaggagaatggcgtgaaccctggaggcagaggttgcagtgagccgagatcacgccactgcactccagcctgggcaacagtgtgagactccgtctcaaaaaaaataaaaaaatagccgggcgcagtggctcatgcctgtaatcccagc

SEQ ID NO: 1244102 - DNA, 4001 bp, Homo sapiens
ttagggaattcttaaaaaaaaaaaaaaaaaaagagggacctatttgcaagtcacactcttcatccatcgatgtttatagaatgacaaggttctgagcacctactatgtgtcatagtgtgctaggtctttgggctccaaaggtaaaacaaacatgttcctgaacctcaaagagctcacaaactagtgagagagaaagaaacacaacaaataattaaaataaggtgaatcaagtgctgaaagaataaagtacaaactctgtccagaaacagtaattagggaggccttgtggaggtgactgtaaagcagaatctggaatgatttgaaggatgaggagaaatttgccagatagggcatcaaaaaacactgcaagcaaagtggacagagtatgcaaaaacctggaggtgtgaaacactagtaggtgcctgaagaacagcaagttttaaatggctgcacacaggaacaaaagggggagtaacaggagagaatggaagttttgttgcaaaagtatccaattacacaaatacagcaaaagtccccgactactgccttaatctcactctgcttcctaatgacatacactattattctgtagtcaattctttcagaccttttactttgcatatataaacacacatattttaaaatccctcctccagcttcatactgatctcattctgtatgaattgtcctgcaacttgcttcaaccatttaccaatacgtattgaagacttttccaaagcagattttaaagtttatgaacaattttttttcctcctaaagaaaagatcattctggcattggaggaatgactggcttggagaggagctagacaggaggcaggagatcagtcagaggggatcagcgaacagtccaggcataagtcgccttgcctgaggtctaaggcactcgctatgggaatagacaggaggggatgaactgagaaatatatatgagacacattctgaaatacctgagttggtcaggatctgggatgaaggagggaagaaccagtgtttgtgtctggtgtgacttggtggatgatgcatgtgtgttggaaggtgggatggactggggacgggaatgcgtgtttggagctaatgaatttcatctttaggaactgtctagtttgagatgcctgtgcaagcaggcaacttgcaccacttccctctttcctacgtagggccagaaggccatggtgtcaacagttcagagaattcattaatttaaggcctgatgtgtgtaagattactcagaaagacggcagaggggaggagctagtgtgtaggaacagaaaacataggggctttgtggcagagttttgtatactgtatttttacgagcttcagtattttcattagcaaacaagccctaatactacgcaagttctaagattcccacgtggtccgtgtaccatgtacgcaataaacagtagtaatgcattttgtcaaccaagtgttctgggtgcacagagagggagtgaaggagggtgcgggcggatggaaagttggtatcagagaggaaacccgaggcattatcagagcaggagtcgtcaagttgggttttgaatgactcgagcgtgccaagcactgcagggtcttccaaatggagaactaagaatgtgccaaggttggagggggcacgccatcctgaaactaaatcatcaggcgcgagagtgggaagatcagggaaaggcaggcagaggccaccagctgggttcccggaggggtggggccggggccggggccagcagggcgcgccgcctacctccggggccacgccactgccctcgctgtagttctcggagatgagctgatcgaagagcaggtggatctcggtgcgggcggagctgctgtcatccgggcgcagggcgcagagcctggcagacaagaggcgaaacccattgcctcgctcagggattgcttcccgcggtgcctcccgcggctgcacggaaggccacgaaccgacaacttgcacagcagccatcttttctacgggcggggggggtgggtggggtgatcccagggaaatacttccgggacatcctcccgttccgcgcgctctagttccgaaagtaccttttttagaccggactggggctcagaggggtttccatgactacgggactcctccgaccggtaccctgcagatgcttgtcagaaattggcttggaggccgggctcggtggctgacgcctgtaatcccagcactttgggaggccgaggcgggcggatcacgaggtcagaagatcgagaccatcctagctaacacggtgaaaccccgtctctactaaaaatacaaaaaaaaaaaaaaaaaaaaaattagccgggagtggtggcgggcgcctgttgtcccagctactcgggaggctgaggcaggagaatggcgtgaacccgggaggcagggcttgcaatgagccaagatcgcgccactgcactccagcctgggcgacagagcgagactccgtctcagaaaaaaaaaaaaagaaagaaattggcttggagatttttcgccggccactccttcttgagccctgactgaaaagtgagttctcaatttgtgcttccagaaagtttgtcctcccagagtttgttcctggacagggctgaaggtactctgttccgtactagagtttcagattcgggctggagttggagagggtatgctgtggatggcagtagcagaaaccgctagttctaaggcacccttctactcttctaaaatctttccccaggcacaaaaccacccggaataaaggctacgttccctagcattccttgcagttggctgtggctctgtgattgcaatctggtcagtggaatataaggcagctttccctacttaagtgacagctggctgtactcttggttcctttttctccctttttcccagtgtgaatcctctcatggatcatgaggcacctcgccccactagaagagtaattttggagtttaactgaatcatgtaaaatataatctgcctaagagtgaccgggttgaaatgagacaccccaagattttctgaaaccttgaagtcaagaagctggagaataaaatggccatttaaaaatctgtgatcacttttcagtcatccaggaagtgaaggcttgactttcacagttgggcagattgggaaaaccatctctagggcctttgagttatgcaaatataaagcaaatcctcacccttggcccttagggaaaaccttgaagtcacctgaatgtatgttttatcctgagaacaaaacatttctgttcagcagtgaaaattgggggtatgctttagcagaggtagttttctgaagactttgggcttggggagaaatgttaatttttttgtttggatttagattccgttgtgctggtatattatttcttattcctagtctgtgtacatatgtgcgttatatatgtgcatgtgtgtgtgtgtattcgtgtaaagaaatgtattcaagcatttgttcagagaagatcaggagctgaaacctagtcgttggatattttaatctgggttccctgatagcagagcctcagatgaggttgataggtgagggatttatccagaaatgaacagggaaggaaggagaattaataccaatatgtgctattgagttggccattgcaaggggtgactgattgttcagtcctcaggagtttctgagaagccttgtgaagctctcaaaacccttcttctgaggaacagagaggaaaagcatttatctgtcagcttttgaagtctattgtcaaaagttgaccacaaggcattaattcactggtgttcctgtgttgagcatgcatctgtgcttggttcctggaggagtcctatgttgcatagtcaaagaagccctgaggcaaaagtgaggaaactaggtgcatatctgaggcaaggctctcaccagttatacctgtgctaagctagtagatgcctgtgataaactagttgctgtagcaatggctagagtaagaatgtaagaccaagagtatgtgaagtagtactaaagagctg

SEQ ID NO: 1244103 - DNA, 4001 bp, Homo sapiens
gaggtcaggagttcgagaccagcctagccaacatggtgaaaccccatctctactaaaaatacaaaaaaaacattagccagccaggcgcagtggctcacgcctgtaatcccagcactttgggaggccgagacgggcggatcacgaggtcaggagattgggaccatactggctaacatggtgaaaccccgtctccactaaaaatacaaaaaaaaaaaaaaattagccatgtgtggtggtgggtgcctgtagtcccagctactcaggaggctgaggcaggagaatggtgtgaacccgggaggcggagcctgctgagatcgcatcactgcactccagcttgggcgacagagcgacagagcgagactccgtctcaaaaaataaataaataaaataaaaatttgccaggggtggtggtgcatgcctatagtcccagctacttgagaggctgaggcaggagagtctcttcaacctgggaggtgaaggttgcagggagccgagatcatgccactgtactccagcctgggtaacagagcaagactcaaaaaaaaaaaaaaaaaaaaaaaaaaaagagatagcagttgcaaaggtaggttaaagaattaatacattcaggcattcatttattcagcatttagtgactactagtaccagatatttcaccaggcactggggagataagtaaggccaaagcgggcagattgcttgagccaaggagttcaagaccaatctgggcaacaaagtgagactgccccctaaccctcaattaggaaaaaaaaaatcacttggagagtttgttaaaacacagatttctgggactcatacccacagtatctgattcactagattaagggtggggtctgagaatttgcatttcctgttttttgttttgttttgttttgtttttattgagacagagtcttgctctcttgcctgggctgctggagtgcagtgtcacaatcttggctcaggtcaacctctacctcctaggttcaagtggttctcgtacctcagcctcccaagtagctgggattataggtgcccgccaccacacccagctaatttttgtatttttagtagagatggggtttcaccatcttggccaggctggtctggaattcctggtctcaagtgatccgcccgctttggcctcccaaagtgctgggattagaggcgtgaaccaccgtgcccagtcgagaatttgcatttctaacaagatgctgatgctgctggtcatgggatcacgctttgaggaccactgttctagctggagagacagaagtgtttcttagtgattaacagagggaaacaaatgtgaagatagatgtagacacaggtggtaaacatgaggggtacctaacctggctgggaggataagggaaggtttcctagagtaaactccacaagctgagtcttcaatacaaacaggaactagccaggtagataagggggaagagcattagacacagggaacaccctatgcaaagatttggaggtgcaagaattgagggtaaagagcagggtacaggtgtgggagcagaagctggggagacacacaggtgtcccatcttagagatccctgtaggccctgctgaggagcctgagaccttgaggactgtgcagagccatcaaagtgtccaagggcctgccctgatgtttcccaagggtttgctgaactcacctagacccttgcctgggagtgagagccaggtagcatttctttttcagtcccctgctcttggctccatttctgtccatcccagcctcacctttggtcttgtctggatattccagccatgggtacaggaacattgacctggagacatcagagatatcagttgatttttcataggccatcttcttctcctggtggggccagagggaacctgcaggggggaatacaaggcttttaggggagtgggggcacagctggaggagacctgtcctctgtggtacgagaggtacaggggaggtgtctggacttctggaggtagaagcttccaagtgctaagcgaccaggttactttggtaaatagaacactcaggtttcacttctgagccccagctgtggtatctactggcctggacttgagctagtcactttattttctgagcttcagtttgctcactggacgagtaggaaagtcattcctgtctggcttaactagagggcctgtggtgaggcataaactggagaagaaaatcaaaccatctggtgaactgtcaagctcaagtaagcccatgttaggatcaagacctgttcttaggattattcactgggaaaatggcagggatgggaaagtccctttatttatttatttgtttgtttgtttgtttgggagggagtctcattctgtcgcccaggctggagtgcagtggcatgatcttggctcactgcagtctccgcctcccaggttcaagcgattctcctgcgtcagcctcccaagtagctgggacaacaggtgcatgccaccatgccaggctaatttttgtatttttagaagagacggggtttcaccatgttggccaggctgttctcaaacttctgacctcaggtaatctgcccaccttggcctcccaaaatgctgggattacagatgtgagccactgcgcctggccccagaaagtcccttttatacataccctctccccgtctttggcagcaaaagactgaactcttatctgtgtggtaaggagctgcctttttcttttattttctttcaactttttattttattttactttatgttccaggatacatgtgcagaacgtgcaggtttgttacatagataaatggtaaatgtgtgtcatggtggtttgctgtacctctcaacccttcacctaggtattaagcccagcatgcattcgctatttgacctgatgaaggagctgccttttatacctcttgcttttgcatatgctgttccctctacctgtcagtcttttacttgtaaacctgttaaactggcactcagatctttcaaaaagtccactcaaatgttttctcatctctgaagtctttattctccctcagggttcctaccccctgcccatccacccactcagtgatagaattccctctctccacagtgtgaccacagttttttgtacactttgctttactttaagtctttttcatatgtataatctgctcacaggtctgtcttccttactggactatgaggaatttgattatggactgtatattgtgtcattgttaagtttcctgagtatggtatgcatgttgtggttatttataatgtccttgttattagtagatacatgctgacacttttaaggatgacatgatatcacatttgcaacttactctcaagtggttcagaaacaaaatgtgtatactgaccacacactgcccccacacacagataaagcaaattggtaaaatgtcaatatttgactctagatgaagggtatgtggtgtattcttgcaaatttccataagtttggaattttgcaaattaagggtggaaaaaaaaaagcatggattttggcattagacctgatgggtttaaacttaattgtaaagctttatcacctgctttatttttctttctttcttttttctttttttttttttttttgagactgagtctcactctgtcgcccaggctggagtgcagtggcgtgatctcggctcactgcaagctctgcctcccaggttcacgccattctcctgcctcagcctccagaatagctgggactacaggcacccgccaccacgcctggcaaatttttttttttttttcatagagacggggtttcaccgtgttagccaggatggtctcgatctcctgacctcgtgatctgcctgcctcagcctcccaaagtgctgggattacaggtgtgagccaccgcgcccggcccacctgctttatttttctttgagctgtggggcttttggcaaatcatttccctctcttgctaagggttttcctgactataaacagggctaataactgtacctaaccctatagggttataaggat

SEQ ID NO: 1244104 - DNA, 4001 bp, Homo sapiens
aactagtctatttcctaataagctaaacagatctcaacactatcatctttatttcaaaataattattaaagagaaaagtactactccatttttcagaaaataaaagcaggagtgattgacctgcctaattctttctaacggaaagggtatactttacgagtcccacaaaccaggtacacacaaaatccatatacataatcaccgggactaaacgtacagtaggtgatagacaccaaaacacaaataaaattaagacatccaagtaaagttacgcaagaaaatttgaataggcaaactataattatccctggtgaagatactgatcaagaatagctgcaagtaacatttggctcttagttaagtaccactatgtttgagtatgttggagcaactgaaaagattggtacattcaacatatttttcctttctaaatctagccctgcccatagacccactgactgagtgatacatttggaaaacaaagatggccccatcaaattactcagtttcagccttactcttaccagttgattaaaataaagaaggaaaaaaaggaaatcatttttaactgcagtctcaccttacacatctcaccagcactgtagttcattagtgatccattacttcatccaaatcctgaggcaaatagaaaagatgtttccatacaacaccagtaacagacattatcagtagcaaacattttatcagcctgaagtgaaagggcatctacatttaaaatggaaaaagttacaaaaatggtacagtgtgcagctttgcaaatgagtctggtttttgaccttaaaacatttcctttcagtaaggtaaaagaatagattatacaatgctcttaaaactcaaaaacataataaaatcatctttttcaacacagactgaccttactttcaaaaacataaagaaatgaaggagaggaaatttcattaatatgagtttaagagagagcaaaattaagaacaaactaggcaagacagacaactcctccctccttcccccgctccaggaatccactgtctctgaagttacactttttattatattaatgatttgcctgagaagtgttaagttgtgagggagaaggaatgacaatttttgaactgcaaacaaaacctgaggatcccgatccaagaacaatcagaggaccctggcttccagccctgtctgaagatttctcagcaaaggcgagggtgcagaaggctccaataatttaggggagaggaatcgaagttccctaggtaagactgcagtctgtgagcccttgaaaagggtactggagtactctcaaggaatctccaggaaaagagagcctatctttatttttgttgatgtgcttgtgggccaaagagcatttccgaggagggggcggggaaaggggggaagaaagtgaatctcgggccgagagccctccgcgggggagggagggggcgcacgcctgacccacttttccccacgcccccgctccagcccccaccccacccggtggaagtccgaggcctgagggggggcatcgagcggggcgtgggaggcccgcacgctccccacccccagccgcgacccggaggaggggaacgtgccgggaggctcgagtccccctcccagagtgctctgggccggagaaacctcccgcaggctcccgggccaggcgtgcaaggccccctctcctgccagggcccaggacgctgcgggccccagcggaggggaaggggactaagtaggggaagaagctgtaaacagccccagcgtccgggcctcgcctcgaagagccgcgcttcccaggcccagccgcgggccgcccaggcccccagcctgccccggggccgccgcgcccggggtccgggacaccggaggggagtcgggtcccctccccggagagctccgggagctcgcggagcggccccaggagcagagaagggggaagtcaggacttacctgtcattactttctacgccatcttggatccacttgtcaacgtccccacaaagcattatgggtaagaaagagcctttaaagtgactccccccggcccccgactcccgcctcccgccgccggcgccgccccctccggccgcgcctcccgcccggaaagttgccccgggtggactgccgaccccggcgcccgcagctggccccttcccctcccccgggctgacggcattgaaaattcacccgcatttttaaaacgtggctttggggttttctccctttctcctgccccggcctccctgcccccacgcccggtcctctcgcctcgccgcgttcctgcccgggcagacgccccgcgtctgcattgaatcaacccgaggtttccttgccgcccgcggcgcggcgcggagctgctcgcggatttatttgtgcgcgtggatgtgagcgtttctgctcctgcggccgcgcttccaggaagcccgcgagcggccggggtcgccttcagaggccgcgcagaccagctccgcacccgccgcccggagaggtgcctctgccctgggaaaccgccccggggccgttgggctccgggaactgggaggacgccgtgtccccgagtccaccagcgtcgaagcacgatttaaaaaaaaaaattgagccaaatgcaactttttaccccttgtttactctgtgtcccgcggtctcctcctccgggcgggtaacgtgatccgcgaccctctaggtggggacccctcccctaggaatgtggctccaggctccgcggagccaccctgggagcgtccgggctgcggactgtgactccggggcaggtaatccggggcgccggctgcgggctccgggcggggcggggcgcggaggcagccagggctcgggggagggtcccgggcggaaagcagggtgcgccagtccgggtccacctggcgggtcgggggagaaccgcgggcgccgctgcagctcgggaggctggaggtggggacgcccggcgtctccgggctgcgacccgctgcgctggaaagtgtggggcgccttggcgcgggctgaggtctctgacccgggcgagtacccccagcccgccggccacactgctgccgggcatcctctccccgcgacaccacgcccgctttcggctgcgcggggcgagcagcgtactgaccccggcgtccagccgcccaggtccccccagcaacggaggccccttggtcagcctcctcccgcgctctccgcagagcctctggtccctgctttgctgtctttggaggcctgctccagttgcttttttttttttccaagcaagtttttacaacaaggagatacccaaaagaaaattctccaagacaggaatgcttgcgaattgtattcggtacaaaatgctgttgaacggctctacctttagaagaccgcagaagcactggcattaaaaccctctttcggtgcacggggagggcctggggccttggatctacccgaggattttacgctcctccagaccctatcaacagcctcactaggaacgtgaacggtggcagacaggagccctgcccctggggagccaaaaactccaccaggcaattgtcccggtctgatgagaaggtgtagacacattaagggattggccccgggtcactcgtgaaggagggaacgaggtagtgagtcattcccagccaagaacgcagcgtgctggggagcaacctcccctgagtcacctgcttctcacctcggaataagtggagaaactggagcctggagccaggttcttagacggcccagcaaggtagccaccaagggcatgggctaggctggggggaggcagcgcccctcctgctggaaaagggaatgcttggcccgtctgaagaaggctccaatgtctctttccagggtaccccaggtgcttcttttccaattcctcttttgcacttatttagccactggtatgcactggcttaatggtggttttgtttgcatggcacctttaggtatgtggtctgagtttatgcaaaagtaatgacaaaagccgcagtgacttttgcacccacctaatataagta

SEQ ID NO: 1244105 - DNA, 4001 bp, Homo sapiens
ggaaggggcggggcgcagagataccaaggccggacaggcgcacagagacaggaagccagatggacggaaagagggagaaaatgagggagacacagagacagacacgcgcgggtgttattaacctcgcctcggagcagaaccggccactccccaagcccaccatccaccgcagggcccgcccactctgccccggccggagcctcctggcgtcccccctccctccctccgctgccccacccccgcgctgtacccgggggctccacccggcttcgctccctcaagtagcccacggcgaactccaatatctccgctttctccagcttcgggttccggaggttctacagacgggaggggagggcgcagagacagaaaggggtggggagaaagggggaaagtggcagggggaagaagggagggacggatgcgggagctggtggtgcccccgatcgcatttgcgcactgcccacagaacgcgcgaccaaatgcggagtggagatgaccaaggaaagtcctggcccaccctgagacgaaactgtccaatcctaggggttggaaccaatgcccaacgcgtgaggaggagatttgaaaccgcaacccagggaatgaaattaaccacccgacataacagaggctggctcatcagaggctggctgtgggggagggggaaccggacacttagagacccaaagggtgaaactgaccgaccccgggagcgaaatttacagaaccaggcgtgaaacttacagacccgaggggtggcgaagaagatcgcgttctgagagcgagtgggggtctgggatggaattccaaaggcgggactcgggtgaggatgccttggggccagggttgccaaccaagcttgtgtccccaccccagtgggaagccctgggacgcggaaacgggaagcttggggacctagggctagcggagggactgacctggtcccgggtccgctccagcagcagcagcctcagctcttccaggctgcggttgatgcggtcccggcgccgcttctccacaagcggcttgagcatctgcgaccagcgagaaaaggagagcgggccgaccagaccgagactcagtgcggccgccccggcgtcggatcccgccgctgggagagcccggcttccaccccggccacaagaccccagattgcctagggccggccccattcgatccctctccgctccccctcccaatgcccctagatcagtttctgtagctcgcctccccggatcttcgcattctcctctctcagtctcgtcctccctcctcccctctctgtgtctctcctcctcttttctctctacgtctccgtctggtgcagtttctctttgtctcagtggagaactttggggactctctgcgcgcacgcacgtgcgccgcacggtgccgggctcagacctggcggccctgagtatagaaagggagatacctagcgcgaccgcgccgcctcttttccctcaaaaccctccaggccttcaccttctccacggttctcctaaaatcttccaccagtctggggcctctggaaccaacgccccgggaccttctgtacaagaccgccttgggccagccccgcccggctcacagccagagtggagcaagtgcctatcctcttctcttttcgttcccaccctcctcccttggctctgccctctaattgcttattttactccaacaccggccccctccccaggccacaaggtgccgacacccattaccgaggcccctagtcctatgttcccgccgcccactcaggtctggctctgacccctgtccccttcttcatattttgcagcttcctctccagcttctggctcctggagttctggagcaccgctccccttccacccctgcgtccccagcctctctccagaccgacggcgtcaggggcccagtcccctagccaaaccagggacctctgctccctcccctcccgcctctcaccttggggccgtccctattctcagctcgatcccgggtgaccattgctcctccggaccctgtgtggaccggttccctgctcgcctggagccttatattccgcggcccaagggtaggagggataggacccgaccccgcccccttcgacatccagattctgcccctctaggacccggcacgaggctcccggaaagaggaggagtgaaggggggaggggaaggagagaaactggcctgggagtgcgggaagtgaggggtgaatgggggcactggctggtttacagaccgtaaggctgtataaggaggcgggacccagctgaaaggaggaggctattggggcagagctcgcttggggatgaaattcagagttcctccagaattgcagctttctgggaggcttactgtaccctcactaaccctgaaatagaagttagcacctctcagcccccaggctgaattttatacatcatctccgaagttcgcttcctagtcgagacagggagcaacccgagtgcgctgggtgaatctgtccgactcaaccgaagctctgccgggaggttggagaggcgctctcttctatctaagccagttacattcaagtccgcgaacatctgcgcgcccactctgcggacagggcacttgtctaggctcgggcgagtcatagtgagatacgcaggagagacccagcttatccctgcaggatctaatggaaaagaccatgtgacaccaagtagctattacagaagcccagtgaagtaggtgctccgggaaaaggtctccttaaggatggctggactgaggaggatcttcaaggcagagggagcaagtctttgaaacataggtatgagtggagaggtctttccacttacagtacaagtatttgattcaaaactagtcataggagattcaggagtgtggctgataggacacctcacgcaagtgtgcccgcattgcttgcttctggaggcccctggtgactgtagggtagcagggagcaggcagtttactaaggggaaagcaaggggtacaaaaaagggatcaacacccacctcaaaccaagagcatgaccctccgcagaacgatgcctgaccactcgagggcttcaggacaaagtgtctgagaagataaatcagaaactgaagggaacagccaggttgccagggataaagacacggaaagacagggttgcagaccgagacggaagacagctgtgaaatcagagaccaatggggtttccttcaagccctcccaacggccctccgcaccttggttttgtcacgaagcctttcttgccatcatagcccgagccgggagaggcacagaccttgaggagggggctcccatttgggatcagggcccccagcacatcccacctctccgtccttcagccaaatgggaacgcaaatgtgtgtccccatcagcccccgccgcccccctccttgggaacctgggctcgggctgaatttttctcacctgcacgcgaggctgggggcccccggctgttcgcacccgggtgtggggccgcccctggccatatggggcggctttatggcccggtggccggatccggacgagaggaaggatgacttggcgctccacccacggcaaccattcgggaccacttccctggcctacaccgttgcctgtccgggtccgcctcaacctcttacaatctcagataggatccccgcagaatctttaagccgcgcattggtggttcagtggtagaattctcgcctgccacgcgggaggcccgggttcgattcccggccaatgcacgagtacagttttcttttctcccctccaaaaaaaggataatatatttggtagcatttctaagaaacatcttcacttaaatatttctaccaaatattaatcttaaccttttgactatagcagagtttgcagccccaggcctaaacgattccgcacgccctcgcactcccctcctcccagcatgggggtcctgcagcctccacacccccctccctccgtccccggcccgcacctccgcaggcgtgaccctgagaaaggacacagtgctcggatctcggc

SEQ ID NO: 1244106 - DNA, 4001 bp, Homo sapiens
gctgctggcaccgcggggcatcctcctgggtcttcacactgccttccctccgtgtgtctcaggctctaaatttccctctcctcataaggatgccaatcactggattagggttcaccatattctagtacaacttcatcttattttgattacatctgcaaagatcctatttccaaataaggtctcattcacaggtcccaggggttaagacttgaacatatctttttggaaagatacacttcaacccaaaagaaagaagctgtgagtttcttttgttctctgtcttttttttttttcccttttgtcatcctggttgttctgtttttgtgagaggctatggaggaaattcaaaatcaatgctgctgccaccatcttgctccaccgagaaccttgtggttgtgttctaggtacccgtttccacagaacactgctcaaaactttaaagaatgaagccaaggcaaaaagtaatgctctagaggtaaaagggagtccttacctctgagaggtacgagacctttggtggagctcctttaaggtctaaatgaactaatctcatctgaaatggagtggaacctgacatttcaatatttcctgtgaactcctatggcgaagtctccttggggacttcttcctagtggagaaaatcaagagttatcaacaggggcagaagcttctccctttgcctttctccttatactttcagtttcagttctgatactggccagttttgatagattaacttggaggaaactcattttgctaacatgaaaatgaactggaagtctacctccatgttaagatatagagacctctgctatgtgtgatttgttgctaaaacaaaacagcactagtttgtttataagatggttatgatctataataacacaaataactgccaaacaaccttgttttaaagaccttgttaaactagatgtactatgctagtgaaaacagtcgggcagaagcctctaaacattttcttatcaggccgcacaatatgatgcttctgtaggaaatttatccaaattttaggtaatattaaaactaatttgtatttctagagctcagatcagcttgattataaagaggaagaaactgcaaaactgactccaggttggagaaaactgtctaggatttaaggtaagctgataattttgaaaaagcccccaagtgcatcagagctgaccgtagtattatactgaataaaggcggcatccaagggataacgaagcagctggggaagggtaaaatttatgtattttttatttatttttcctatctactatgaaagcacaaaggattgggtgagaaaaggaaaggaaagctttgcatgtgagacagactcagttcagtaatccagcccctggttccgtgcaggggttcggaggctgctgaccctaagggctctgtaacacagcactttcagtttgtacatacgaccagttacacacaatttacacccacaggctctgtgcgagcctctctcagcagccccgcatcgccgctgcgggacagccacgctgggaggcgtcgctcgggagcccggccgtccctcttcaggtactggcgcgggggaaacgcttccagccaggagccgcccggcctagcgcgcagagccagagccgcacccgcacctcacctgcgccgccgcggtcccgcgaggtccgggggcgcagccaggcccggccgccccgccctcgcggccgccgcctccgctctgagccccgccccgctcggccgccgattgctcgggcctggccgccagcccaggggccgatggccgagcgcgtcgcactcgcgtccctgcgccgtgcctgcctcgcgctccctgttacggcgttcgtccccgggcctggcgcccgcgtccggcccggctccgcggcggcctggtccgatggctcctcagcggagggccgcaaccaaggcgcccgagggcaacggagcggccgagcgccggaaccggagcaggtagcggtgaggaggggaagggcgcgcgctgcggcggcggacagggccatggagtgggcgggactggggctgatggggcggggcctggcccgacccgggtgggggggtgggggggggcaggtgggcgtggtctgccgcggggggcggggtctaccgcagcccatgctgggagcagggcaggtgcgggcgggagccgcggtagccgacggcagaggcccacctatcccagaggggcaggagaaagagaagggggctttgctcccagcctgatgagctgctgctgctgctccgggaacctgccgtttggctgtcgctgtcccgtggaataacccacccagcagcctggaaagtccgcctgagccaggagcgtgcctccgccttcacttttaaaccacgaaacctgctttccccgtggaattctagaggatcgggtgccatggaggaatggcttagttttaggattttaaaatgttacgggtgatcattggtttgcaggtattagtgaaggagcctctaacgtgcagaatacagcttctcgcttgcttgatattaatattttgctcttttggggagtgcccaattcccctctattgacgatttgcacattgaagtcgtcagtttagaaatatcaggaggacacctcaggtttggatagactgcaataactcttaaacctcatagtttgttcttgagatttttatccctttttcatctcagctgcttttggagtctactagataggatcttaaatgcctcatgctagttcacagctataatttttttttttttttttgagacagaggctcgctctgttgcccaggctggagtgcagtggcgcaatctcggctcattgcaacctctgcctcccgggttcaagagattctcctgcctcagcctcccaaatagctgggattacaggcgcccgccaccatgcccggctaatttttgtatttttagtagagatggggtttcaccatgttggccaggctggtctcgaactctcaacctcaagcaatccgcccgcctcagcctcccaaagtgctgggattacaggcgtgagccactgcacctggccacagctataattttttaaaagccagtcaaatttagttgtggggggttgtataccaacgttggtgacactaaggttaataagttctggggatccactaccatcagactagcttgcaactataattttataaatgaatgacctagtgatgatttataagtattctaccttctcccaaaaccaaatctctccaaaagaatatttcaagtataaacatacatgtatctatttccttcaatagtaatatgagaagttatttaattaatacattttaaaaatttccagtaaacttgtacattttctgaaataccgagtaccagtttttgtcagcactgaatggttaatatagaaatatagacttttgaggctgagcctggtggtgcttgcctgtaattgcagcaccttgggaggctgaggcggttagattacttgaggtcaggagttcgagaccagcctgaccaacgtggtgaaaccccgtctctattactaaaaatacaaaaaaatagctgggggtggtggtgcacgcctgtaatcctagctacttaggaggctggggcaggagaattgcttgagcccaggaggcagaggttgcagtgagccaagatcgtgccattgcactccagcctgggcaacaagagtgaaactctgtctcaaaaaaaaaaataataaataaaaataaaaaaataaaagaaatattgtcctaatatgccttaaatgagtctctattcaagttttggaaatacatgtgtccaaagcccctctcttatcattgttgggacaggcccaatacctgctccttggaacagacgagaagcttattttacaggaggggagggagtgcggccctgatggaataacctgagctgtagggggctcacctccgccccaccctggaaacaaccttcctccagtggcccccgtccttagtgttcacccctgtgtggaggcccccatcactaccagc

SEQ ID NO: 1244107 - DNA, 4001 bp, Homo sapiens
cctcgggcacccgctcctccgcgcctggggggcgctcagggttcagctcttcctggacagcagcagcacctgtacagttgctagtttgaggctggtgttgatattctgacaagaatggctcggccatggctagtagagtcctcgaagtttaagaaattttggctagtaagtccttaaggaaaaaaatgggtttttcttaaaaaaaagaaaaagaaaaaaaaaacagtccaacagagtcctcttcagtttgtaattcctgcagtgacgcctttagctagtccttctatcagcaaactccaactgcaatctggggagctcaagtcagtaaagggttaagcgcccacagtgcggccagctagcgggtccaagggggtgcagcggcaggaacagtacgtaatgggcggaggtgggcctcaaacctccaagcggagcaccccaataaaggagttggtgagcaaggtgatgagggtaagtccagtgcgtgaaacccagccccgaaggggttaaaactaccgatgacgctgcctccgaggggccagatccacaaagggttaaatcccctgccgcagagcccacaaggggttaaagtcccggcgccacctcctcccacttccacgggtgtcgcttccacccaagctcccagttccctaggcccggccgtagcctcagcagaggacagacaaactcatctcccctttggctcgatgctctgctctgctcagttctcctccgcctcctcctcttttcctccctccctcctcccccttcccacagctcctcttccgcgtcctcccccgactttccctcccaacctgcctctccacctgccaacttccaactgctgtctcccagtcctctgcgccccttttatatagaagctttttcgccccgcccgtgcgcatgcgtaacggagttccctttgcggggcgccgggagtcgtagttcttatctttcgggcccgccgccctcgcgcgccgtgcgacgtagccaatcccaggacgcgtagggggcgtctccctggccgccaccttccatcgcttagacctcgctaaagaaacgcgagcggccattggtgaaaaatcacacgactcgctgaggaaggacggccaatcgcagagaagatggggcgggttctggaccgtaccattctgtttcaggaatacgagaagattcgatggcctatgagagtcctcacagaatatttttatgaaaaggtgcgttataaaggctattatcgtattttgttctcagcggaggggttccgaaggttatgaacctttattaactaacgcaagaatggtttattcctaaaaagtagtccctaaaatgtaaaagaattaaatcctataaagagagacgtcggcccacggctgctaactcgcgagtcttaagattatagaaatggcttcaaggcgggtggtgagtgcctgagactgacacttgcggaaggatatcgcgagcacattttgtaaagaccgaagagcgcatgaagaagtaaacaaatgaagaataaaaagtgccgccttaaagggacagtgtgactgcgtttagcgccgcaggctcgcactaggcctcggaagacgaagaggcgggttcgagtcccggtgacgcgactcccggactgacctcggtacccttagctgaaggtggcggagtcccagccccagcctggtctcagaaagccgcccccgccccaggggcaaatgcaaactggtgattcgcgaccaaggctcttccctgggccgagatcggaaagccggggccgggggcgggcgggggagtggagggggaagcgggggaaggccacgcccccacgcctcagcttctgtcgaagaaaatggcctcctggggccgatttggtcttttcacttccgaccgagatcatttcctgagccgggacagaggaggtccgggacagccatgaggctgtttgttgggaagagttcggaatgattaatgagttgaaatcatcagccctggctatccgagagggaagcaggtctcacccgcagaggcccttcctcatcagtgggcgctgggcaagactgggagggaagcatggaggaggccttgctccgaaacttgctgcaggggattctggcgcagggctgggggggccgattcccccgggggcgtagtttctcagagagaaattctctagacccaagcccccagccctccataaacagggactgagaggacccagagaaccctccataccagtcactgaggcctaaaatcttggcgccctttccacttctccttcgccacacacccagtgaccctttcttcttattgcttccttaatagcatccctgacattccagcacgtttgcactgtgtaccttttacgcacagagccatgtgacctcaccacagcctggcaagttagacacgataggaatgagtgtctccattttacagataaggcatctctaagacactggaaaataagtgacttgtccaaggtcacatgacaaccatggggcagttctggctagagcgctggtctttgtgaccccccccgtgccatttttctttctgtcacaaacacaaaacccattttttcttaaaatcggggaatactctggatttcgttctttttattcccaacaacttcaaccttattcagcccctatatcacttggcaaacaggagggtacaaagaggggtgggatgccattcttgccttcaagttgctcctggactgtggagaggccatcagaccacagccagcctaaatggcaagtgagggaaatcctggtgggagctgatgagccgagtgcatgggagctgggaattatggacaagtgtcaggagcaagtgacttcctggctggctctgaaggatgaagagctttcaggcaaagtggcacgaagaggggcattttaggaagcccaagcatcatgtgccaggaaagggctagtctgggacttcggtggctctgggcagtgtgagatatcgggggtgggggccagtggtgatgggcatggccaatgtagatgcctctaaggggagccgcaagcacgcgggcctctgggcacagctatatgttctgaaaatgaacaccttcatttgttttctctgggcttccaagaattcgggtccacctgaaaagttcgccactccgtgtggcttcatcccttaggaggcttcctgagagcaagaactgcccctcagagcactcctggaggaaaaagggattttgcagataacttggttatcacagagagttatcacagagacctccaaattgttaccccatcttcagactccagaggattctggggtacccccagtcagggcatttggaaggcactgctgagcctagcctcagtgtcctggactgggctccactgtatggtctcgtgttctattgggggagaggtggactgacgaataggttgtggaattctagaattctgtcaaggggccaggcaaccttactgttagctgggttctaaccctttgccaggcatttaacatgccccatcactggtaaaccccaggactgccttatgaaaaagagatcaactctatttcacaaaagaggccacccaaggccagagcagttaagaatcttccccaagggggccgggcgcggtggctcacgcctgtaatcctagcactttgggaggccgaggtgggcggatcacgaggtcaggagatcgagaccatcctggctaacatggtgaaaccccatctctactaaaaatacaaaaaattagccgggcgtggtggcccccgcctgtagtcccagctacttccgggaggctgaggcaggagaatcgcttgaatctgggaggcggaggttgcaatgagccgagatcgcgccactgcactccagcctgacaacaaagcgagactcggtctcaaaaaaaaaaaaaaaaaaaaaatatcttacccaagttccacagctactgtgcaagtggtggagctggcttcagctccaggcctgcatcccccaccaaggtggccctgctgttgtctgtcctgcttgc

SEQ ID NO: 1244108 - DNA, 4001 bp, Homo sapiens
ctcgtggtgcttgggtgggcaggagggcagggacttaccttggcctcctccagggccactggtgactctgcattacaggcggtctggttcggagtggccatcatcttctgttccaaatctttcagcagacgcctggaactagtgacacctgctttgaacaacaacagaaacctaaatcctgaaggaacgtcaggaatactctggctgcccagaattgtttgcccaggcagtggcagccattttgtaccccagcccttcatacccttattctcaaatgcaggccccgaaggctgcctccaccgctggttttcacacctccagccagcaaggggccaaatgggattcaggggccgtcttctctgtcctgctcctcgggtccctcaccaggactcatgtcctgtactgtcctcctggaagtcaccgaggcccaggttggcagccaggaagccaggtgtaagttttgtttccccaaccaccaaaggggcaaaggaggactgcctggggaggctgggagtgcagcggggctgctgctgccacgggagaacatggagcaagctcacgagtccttccccactgtctccagtggccccaatcttgatgcagccctgcacccccaaccttctccccaagctgggctccaaaggccagaagcacagctgggacctgggccagcctagtgctgaggacttttcctctaaggtcctggcctgcctccctccttcctctcagaaagggaaacaggagaaaaggggaaagaggtctttgcactacatgcagctgggagggaaacccaactaggataaggatggatttcttggaagaagggagacagtcatggaaagaggttttgcaaaggtggaactgacctattcgctgtcaagggctatgcacaccactacatctgtgtgcctttctgtgcgactgcctgtcggtgcaattcccaacgcctgagccctacctcttgctgcagttgcagcagctctggtcaagccgctcaggccactaagatgggggggaagagagagcctggacgcgcggtgcctgctggggattgtagttcttctggcctgaaaagcgatccaagggcctgtaacgtcaacagccacacccgagactccaaaacccatctacccttgcgcgggggcagaccgcgcgcgcatcactgccttctttgattggtcaagccttctgccaatattctcgcttttttggcaacgattagctgtgaggaggcacaactggacccgccttctccgaactcaattaaagagttcattgatggcgttaatctttacggggcagaaaatagatccggctaaggtgggcggggcagcaggcgcggagggatccttggcctttgaggaaggcgacgagaagctcggcggccatcgccgccattttgggctgggaggaggcagcggagggactcgctgcgcagtgagagcaccccgtggggggtggtccgggcgcggggagaggccgggccgagtgggctacctgaagtggcggcgccgggagacggcgggaagtgggaccgggggccagggagggtgaaggttggagtctcctcggccgagcccggtcctcaaaccgtcccggcagccccgcagcctcgcctctcacagagtgcggggttcttcggtaattaccgcgtgtttcccgagaccccagaaggggagaggctggtgaaacggcttccctctgcggtctttccacaggggcgcggatcctgaggccgagctctgccagcttccctccccacccccattcggcctgggtatggcggcgaggccccgcacagagggactcccacttcgactggagaggtgggggcgacgccagattccagaggctggcgccgcgggggagggcggaggtcgcaggtctggccacaagtcggcgtggcagtcagctggaggctccgagagcggagatcccagtgcacccaccttacctcgcttacaccaaagcgccatctcgccgcccgggttgcgaaaaaccacgaccctcttaaactactgtagcaaccactaattccccctgggagcagctagagaggggcacttggaaaccttcacgagctcggtgcctgaaggtctctgaggctcttgccctcaagatctctcccattcagccccgattctccggacaacctgacctagcatgtcgccagcctcttggtgaaacgcctaaagtgtgctgccccacttctcttgaaagtttacaccgaagggatgaggttttgccctttacagggttggggcacaaagtcggagtcgctgcggctccgaaatagaaacggagttgcccatttcgtatgcttcatcaacatctgcttgcattttgaaatcctagtcttaacttttacacaacttttagagaaatggctgccctcctagagggaaaaacgaactacagtaattccaattccaatgtaatctttgtaagactacaaaatctttccagtttaaagatttttcttttcccacagactaaacaaagtcagagtattttgtgttctactggtgcattgttactaggtaacctcaattttttgaaattccaagtaattgaaggatcacttttgtagatcctaaatgctaccaaaaaagaaaccagtttttatctacttcatatgtatagcgtttaagagatgaggagacctgctttgaaagaataaactcttaaccttacattatagctgtagcagcttcttaaagattgaagtttgatgtgaagttcttttattgaattgcaggttaaaccatcttacttcctactgcttgaaatctaaatccagagagatttgtggctcaaggatatcttcaaataaaagttttattgctaaaatgtcagttaaaattatgcctaggtaggtgctgaagtaggagaggctttgacgtagcagagtgactggcagtgaattttgtgggtaccttgtgatgagtcttattatcagttacaaatggtcaaaacatgcctaagccttcagccttactaaaagtttaacagaacttggcctggcgcggtggctcacacctgtaatcccagccctttgggaggtggaggcgggtggatcacctgaggtcaggagtttgagaccaacctggccaacatggtgaagccccttctctactaaaaatacaaaattagccgggtgtggagttgcgtgcctgtaatcccagctactcgggaggctgaggcaggagaatcgcttgaacccaggaggcagagtttgccatgagcctctcaccgttgcactccagcctgggtgacagagtaagactctgtctcaaaaaaaaaaaaaagttttccagaactgaagttctgctcctcctattaataatttttcttcagttggagtgacaactccatagcattaacttttttccctctgctccccagatgttttacaactggattacaaaataggatcatcattgactagggtcctcaatccaaaactggaaccacttactcctaactgaagcttcagtacacttgatgcctactgtggtttgattttttacctacatatgacatgttcgctctacactgatcaagagatgtgagtttaaaaaagctaactaacttggtaggacttaaatagtcataggaacagaaaaggcttttaaagacgatctttgtgggtcttctgtcaagaatttaatggaggatcctagacacttgggattcatcctccattatgaagtaatctagtgaaatttttggatgctactgagtggcaaatactgtaccagcagcagaaatttgttactcatttgtaaatgaaacttactatccttaaggttgacccacaagcttttccattctttgctaagaaaaattgggaataggccgggcacagtggctcacgcctgtaatcccagcactttgggaggccaaggcgggcagatcacgaggtcaagagattgagaccgtcctggcagacatggtgaaaccccatctctactaaaaatacaaaaattagctgagtgtgg

SEQ ID NO: 1244109 - DNA, 4001 bp, Homo sapiens
ctgccatcttagtctttgagaaccccgaagcaaatacaaacataaccaggtatctgcaagctgtacagagaaaaccccttaatcctccaagatgtcaaaaaatcctagcatgtagcccatgcagttctccacataagagcctaacacggtcagctacgtcgtggagacccaacgggcaccaagcgagcccagcttagtgcacggctgctcctccgcatcagggcacaggccccgctaactcactgtgtgtccccttggcggatcaggtcgcagatctgcaaaatggactcccaatctgtctccaacaggagctggctggtcgccttgtctgagagagaaaatgccatgaaagggaggggttatcctgctggacgccccgtgcagcaccccagcttggcagcagctgggggggactctctccttcccctttagacatttggaccaaatgaaaaagcatgacagaatcctcctgagcgtgctgatgggcagggaagtgccatcctccccagggaagcagcaaacagcgtaagagcacaccaggtgctggtccaagccctcccacaacccgcgagcgaggtaaagacactcagcagagaggcgagggcactgccgtgagtcacacagctcaccagagacagaggctgattcactcttaaacatcaggctcggctgcttctcaacaaagaaccctatcacccgtcccttggagtccccgttcgcccagatgctcccggtttcaatgggaccttagcttgggcaagggctagagaggcctgcagtgtagactccaggccccttgctccaagccaagtgctttggaaataagggcagaacggggctccaaggaggactcgccagcatacctgtcatcataccacatcactgctgtctccaacaactggcccctctgggggggcagctccagctctgcccacatcgcctttcccggatacagaaacgatctaacaagccaagccacgtccactttctatactgattcagtagttaacctctggattcatccctgaagcactgaactacctgtgtggctgagatactcagtctgcttgctggttcccttggcaaggaaggtgtctcacttgaagtctccttgaaaaccctacttgacaaaaaggcaagcttgggcagcccattcgaccacccaagctcctacccccaaacattagacgcattttccacgtgctgctgggcacgtgcacatcaacattcgtttccctcccaaaacgcgtcaattccaggaggctcagataggatcagctttcacctccaaaaacgtgagaaaacgccttcctaaaccattaggcacttcccgaagccagtgtgggaacaaaaggtgggtctgggacccgcagcccccaagagagctcgaaggtcccagagagaacactgccggctccacccttcgaggcccagtgttttgggtcagaagcccaagtgcgagcctaacatccgactgagtcacccactttcatgactcaggccttgtggcccactcggccgggtgctcgtcggtcaagaggaaatcggccgaatgcccgggcccgcggaggagcgaggtcgccgagcgcccctggcgccctgcgcggaccctcgcagagccccatttgccaacgcccgacggacgccgaccccacggccgcgccgagggtccaggatcggcggctccgaacccgggaggacagcgggccggggagaggcgggcagggcggccggtccgcgcccctcgggccctcggggccgcgctgactcagcgccgggcggaggctgcgggctgaccaaggccgagccgtcgggtggggacgcgttacctaggagacgctcgaaggtgccgctgcctcgccccatggcgacctccagcccaaacccgacgccgcgggcgctcccctgctacgagctggcgcgccccccgacttccgcttccgccttttccctccagtgcgcgcacgcgcacgtcaccgcgccggccctagagccgcgaggaggcggggtcttccgctctcccgctaacgctgcgcgctaattggacgcgcccttggaacaatgagccctaagaaccaatgagaagtccgaaggtgagaactatccaatgagagtggccggtgggcgggccttgagccgcggcgccgagctacgggtgccgggtggagcgaagcacggaatgtgtctcctgctgggggccacgggcgtcgggaagacgctgctggtgaaacggctgcaggatatccttccgcgcggggacgggaccggggcgcggggggcacccggagtggggcggggactcaccctttagctgctcgggtccttgaccgcttcgcacaggtgagctcccgggatgggaaaggcgacctgggggagccgcccccgacacggcccacggtaggtgtccgcccccgcgggtggagttgcggggggtcagttctgcgcttggcgaagagctccgggctcctctaagtgcacgccgaggcgcagcgggtcaggtcgtgacttaaggccagccttcgggagcgggggacggcccgagctgaggataattggcgcgggatgagggggcctgccgccctccacgggcacttcctctcccctcgcaacggcttcctgtggctggtcgcccccacagcgagtccagctactgatgggcgtcggtccctgctcgccgttcctgcgttagggagaatgggtctgcggggttcaggccaccgtgtaaggtgtgggcacggtgctcttcaggagttcacaacgggacagcggttgtattgttctttttgcatcgtggtttttcctataggtgggcaccaatcttactgacatcgtggcacagagaaagatcaccatccgggagcttggggggtgcatgggccccatctggtccagttactatggaaactgccgttctctcctggtgggttgtaatcctatatgggcttcctttagggaagtgtgtctacatttctgtgacgtccagtccccaaccttgctgtgtgtagaaaggggtttgggttatttagtgactatactactcatggaaataggtcttagctagtgttgcttcctgctgggcaccctgtctggtttctggtgcttgcgctcccaggcccccggtaggagctcacagagggcttgctgagggcagggctgctgctccgcagagaacagacttggccctctgtgtcactccccggtacgtctgtgtttatgttggacttatacgtacctctggttggtctcatcttgataaggcctgtgccgcggataccagtatggagaactgatggccacatgaggacagagacgagtgacaccaggtcgtcttcataaaactcgattccctctgcttctgcttgttcccaaagctttgtttaaagctactttgggccgggcgcggtggcttactcctgtaatcccagcactttgggaagctgaggtgggcgaatcacgaggtcaggagatggagaccatcctgactaacatggtgaaaccccgtctctactaaaagtacaaaaaattagccaggcgtggtggcgggtgtctgtagtcccagttacttgggaggctgaggcaggagaatcacttgaaccctgaaccctggaggcggagtttcagtgagccgagatcgtgccactgcactcggagcgagacttcgtctcaaaaaataaattaattaattaaaaaatgcagttttgctctcccagtgccaggtctgtgaggcccaggggaggaagtttggcagcggggcattgctgctgtctttttctttttccccagtttgtgatggacgcctctgaccccacccagctctctgcatcctgtgtgcagctcttaggtctcctttctgcagaacaacttgcagaagcatcggtgctgatactcttcaataaaatgtacgcgtccctgagctgagagggagcacagcgggggcgggggctccctcgggttacagccggaagcatggctcggtagggaggtggtgcagctgggggtcc

SEQ ID NO: 1244110 - DNA, 4001 bp, Homo sapiens
gcccaggtggctgcgcatgtggcgcgtcatggtcccacgctgcgtgaacttcttcccgcagatggtgcatgggtagggccgggtcagccagtgcgtcttctcgtgctgccgcagcgtggccgggtccttgtagctcttgtcgcacgacgcgcagcggtagggccgcagcagctctcccaggccacccggagccccggcgaccttgtccccgccgcctccaaaagggggccctaggccggcggccccagcggccacttcggccgcctcggccctgccgtacagcgcttcctcctcctccacgtgagcctccacgtgcgcgttcagctgctcagagctggggaagcccttgccgcacggaatgcacacgtacaggttgtcaccgaagctctcgggctcgccataggccaggtgcgggcatgggtagccctcgaggtggccgccaggcgggctggggtcctcgctgctaccggtctcctcgctgctgctcttgtagtcgtcgccgtcgccgcccgcgccgggcccgtccaggctgccagggtagcgcggcggcggcgccaggccgagcgggggccccccgggcgagacggccgcgtccccaccacgctcttcgcagcgctcgctgggggagccgcgctcccggcccagctcgtcgccatagctacccaggcccggctcgtgcttcatccagcgatagaggagactaggcccgtcggggcggccggggggctcgggtcccgggctgccgctgccgccgcgaaatgggtcggaaggcggtgcggcctcctccagcttctggaagggcagcggcggcagcgacggcagggcgagaggcggctccttgtaggcggcggggccggcgctgggagggctgtccgggcgcgggggcagctcgcgctcagccagcggccgctctggcgccgcggagcccggcgggctcttcttggacaggtccaggccacaaagaggggagcagcggcgctccgaggcacagagtgcggcggccgggccgggtcccgacgcgtacagctcggcgcagtgcgtgttgaccgcggcctctgggcccgagggcggctccgcggcaggcggcggcggaggcccgactggggacgggtagcaggcctggatgaccggcgtggcggcccgcaggccccggcccggccgaccatagggcgcgtagccgccgccgccgccgccgccgccccgcaggtggcagtacttgccgtggcgcttgaggcgtttcttgcacagcgccacgaggtcggggatctgcaggtagctggcggcggccagcacggcgcccaggctcggctcagcccccggggccacggccgcggccgcagccgcctctgcgccgtcagccaggcggccggtgtagatgaagtccagcaccaggcggaacacggccgggctcaccatgtcatggtccaggttgagcaggttgtcatgcaccaccagggacttgaggtaggcgctgctggccgccagcacgttcttgtgcgcgcggaagagggcgttctgcaccacgatgatcacgtcgcacaagaagcccttggtgcgctggttgttgagctgcagcagcagctgcctggagtggccgggcgcctccatcgtgtccagcatcgtctgcccagcacactctcctgcggggacacacaccggccgggtgagagccgtgcggcgccctggccgcctggccccagcccggcacttctcccctccacttccccttccctcagctgagcgggggcatcagccctgcggcctgggcaccggcgaaggaccggctgccctctggagtgggagcccaggccggcccgcccggaccaggagaaggagcaggaggtgagcggccgccggtggaggggaggccagggcggcctgcacgccccagggcacctggctgggtgctggggcttccgagaagaaaactgttcaggcgcagtgacccttttggagacagttacccgatttaagtaaaatgtccgcttcaggaaaagtcattcagggcggagaactttacccaagtagggagaaagggagccgaggaaccagcgcctcccgcctcgggagaagttgccccagttgggggaagtgatacggaggaggggagcgcggtgcccgccctggcgccgccctggccgggggctgtcaaccctcggtcggggcccgggcggcggccgcgcggggagcggaggcagcggctgccgtggcgggcagagcgcgaaggccgggcccggcgcggggagggcgttatatcggggcaggaggctgaggcaggaagcaggtgggggggaggggggagccacgcagctcccaggggagggagggggcagcgccccgggcgggcacggcgcacagccggctgcggccctgacccgggcctgcgccccacccgcgtcccggcctcggcctgggccctacacgcgcgggcccggcgcctccctccgcggctcccccggccccttctcccccggaactccgccgccccaaacttggggaaaagttttccaactgcagacagggcgggaggagtgcgccggccccaggccctcggctcgcagctcttcctcgcggcccccaaatccggcggcagagcccggagccgagccctgagctcccctgcccgctgctcgcccgcccgaccccgttcccctcctggcccgcggggccccgcggcccgttacctgcggtcccggcgggccgggctcccctccccgcggcggtggcagctcttagccgatgccccacccgccgctgccaggccccgagctgtgccagggcagcgcccctgccagccccgcccgccagctccccttcccttcccttcccctcgcctctccagcccatgtgcgggcagagccggccccgggccgctgaccccgccgtgaacccggcgcggagccgcggcccggtggtcctgagtccgaaagggacgacacccggagccctgaacgccagccgccagccgcgatggggcacccgcgccagaagatgcacccgaggcggccgacgcacgaggaccgggctgtcccgggtcccccgtccctcccggtccccggctcgaggacccacctggggggcatgtcgaaagccccgggcccggctgacggcggatccaggggggacgtggctgcgctgccctccgcccgccgggcccccggtcggtctgtcctgctggtccgtcctccccgcgtcctggtcgcgtctcagccccgccgcgctttccgcacactcttatctggagcggcccgggccggcgggcgctgctgcggctatggcgccacctcgcgggcgcgcagggctctgcgcggcaggccgctgccttcctcccgcgcacctgagctggaggcgcacagatgctgagcccgcggggaggggcccaccctacccgcaggttcgccctcccacctgtacccacctgggaccccgaccccggacacgcgagtcccagaaaccctggggctttgagctgagcgctcccatgtacgtatttctaggcacacagccccagttcggaaaagtcctgcccgcgagcacgggactcgggtggtgggggagaggttatcctgcgcaggagtagccgagctctcctggaactccccgtagacattactgtacggcactgtccacttggacgcactccccaacacacccaccctcactcaggcgcatggattcggtgtgcgcggcataaactgatttgtccccagccctatccaggcactgatactaacaggcgctcatgtttccagaagcacacccgccccttcccgcagccctagcgctctgggatactccaggggcagccacgtagggccctccgggaacctgggcagaggtgttacccacacagcccgccctgaactttcgggtctcctaaaggaacccacgacgagtcatcagggcgactggaagtggctggacagcgcctccggggggtccaaagaagtaaccatggggccctagaatccccctgtacgccgttttgaagaatcccgcgt

SEQ ID NO: 1244111 - DNA, 4001 bp, Homo sapiens
agtacttgccgtggcgcttgaggcgtttcttgcacagcgccacgaggtcggggatctgcaggtagctggcggcggccagcacggcgcccaggctcggctcagcccccggggccacggccgcggccgcagccgcctctgcgccgtcagccaggcggccggtgtagatgaagtccagcaccaggcggaacacggccgggctcaccatgtcatggtccaggttgagcaggttgtcatgcaccaccagggacttgaggtaggcgctgctggccgccagcacgttcttgtgcgcgcggaagagggcgttctgcaccacgatgatcacgtcgcacaagaagcccttggtgcgctggttgttgagctgcagcagcagctgcctggagtggccgggcgcctccatcgtgtccagcatcgtctgcccagcacactctcctgcggggacacacaccggccgggtgagagccgtgcggcgccctggccgcctggccccagcccggcacttctcccctccacttccccttccctcagctgagcgggggcatcagccctgcggcctgggcaccggcgaaggaccggctgccctctggagtgggagcccaggccggcccgcccggaccaggagaaggagcaggaggtgagcggccgccggtggaggggaggccagggcggcctgcacgccccagggcacctggctgggtgctggggcttccgagaagaaaactgttcaggcgcagtgacccttttggagacagttacccgatttaagtaaaatgtccgcttcaggaaaagtcattcagggcggagaactttacccaagtagggagaaagggagccgaggaaccagcgcctcccgcctcgggagaagttgccccagttgggggaagtgatacggaggaggggagcgcggtgcccgccctggcgccgccctggccgggggctgtcaaccctcggtcggggcccgggcggcggccgcgcggggagcggaggcagcggctgccgtggcgggcagagcgcgaaggccgggcccggcgcggggagggcgttatatcggggcaggaggctgaggcaggaagcaggtgggggggaggggggagccacgcagctcccaggggagggagggggcagcgccccgggcgggcacggcgcacagccggctgcggccctgacccgggcctgcgccccacccgcgtcccggcctcggcctgggccctacacgcgcgggcccggcgcctccctccgcggctcccccggccccttctcccccggaactccgccgccccaaacttggggaaaagttttccaactgcagacagggcgggaggagtgcgccggccccaggccctcggctcgcagctcttcctcgcggcccccaaatccggcggcagagcccggagccgagccctgagctcccctgcccgctgctcgcccgcccgaccccgttcccctcctggcccgcggggccccgcggcccgttacctgcggtcccggcgggccgggctcccctccccgcggcggtggcagctcttagccgatgccccacccgccgctgccaggccccgagctgtgccagggcagcgcccctgccagccccgcccgccagctccccttcccttcccttcccctcgcctctccagcccatgtgcgggcagagccggccccgggccgctgaccccgccgtgaacccggcgcggagccgcggcccggtggtcctgagtccgaaagggacgacacccggagccctgaacgccagccgccagccgcgatggggcacccgcgccagaagatgcacccgaggcggccgacgcacgaggaccgggctgtcccgggtcccccgtccctcccggtccccggctcgaggacccacctggggggcatgtcgaaagccccgggcccggctgacggcggatccaggggggacgtggctgcgctgccctccgcccgccgggcccccggtcggtctgtcctgctggtccgtcctccccgcgtcctggtcgcgtctcagccccgccgcgctttccgcacactcttatctggagcggcccgggccggcgggcgctgctgcggctatggcgccacctcgcgggcgcgcagggctctgcgcggcaggccgctgccttcctcccgcgcacctgagctggaggcgcacagatgctgagcccgcggggaggggcccaccctacccgcaggttcgccctcccacctgtacccacctgggaccccgaccccggacacgcgagtcccagaaaccctggggctttgagctgagcgctcccatgtacgtatttctaggcacacagccccagttcggaaaagtcctgcccgcgagcacgggactcgggtggtgggggagaggttatcctgcgcaggagtagccgagctctcctggaactccccgtagacattactgtacggcactgtccacttggacgcactccccaacacacccaccctcactcaggcgcatggattcggtgtgcgcggcataaactgatttgtccccagccctatccaggcactgatactaacaggcgctcatgtttccagaagcacacccgccccttcccgcagccctagcgctctgggatactccaggggcagccacgtagggccctccgggaacctgggcagaggtgttacccacacagcccgccctgaactttcgggtctcctaaaggaacccacgacgagtcatcagggcgactggaagtggctggacagcgcctccggggggtccaaagaagtaaccatggggccctagaatccccctgtacgccgttttgaagaatcccgcgtggacttcttctccaacccacccgcccgaaggaaacaacaggggcgcctgcggctgggaccccgcaaggtcccgcgccccacgtgaaggtcaggtttgtgtgggtgacgtctcttctgggagaaaggggaccccgcactgtcgcgccgctgctcgcagtactactccggaagtggccccgtgcagccccgccgcgcaccaagcctcctgcgaacgccggatctccgcggcccacgctccgcctccgccccgcacctcctgacccccgcccacacacggcgtggagcggggggggggggggtccccgagaactccgccgcttccgattggctgcgcctccctccaccgcggagcgcgaggggctggggcgctgcgttaccatggcaaccggtgaggtgcgcccagatcctgtccctccgaggccttggagagcttagcaaccgcgctcgccgccccccgcgctgtcctctggcccccatggccccgccagaggtaccggctgagtcaccgggcgaggggcagcgggcgcggctaccagcggcccccgagcgacaccaaggtctcgggcgccccccggaggctccctttgctgcgcaggcgacttcacggcttcggtgcctggcggaggcttcggtccaaacgagtccgcctgattcccgccgctgcctgagtccgccccatgttctggatccatcttacccactccctctcccatgtctccccatagcatcctcactttagaagcagtgaggtcccaaagaggaaaacggaggcctccggagctgccggtctctagggaaggcggaccccgacatctcgcccgagggacgtgctgcggcctgaggtggaagttacggagtgttgaggggaggtggagaggctcctcataagtgctcctagagctgggctttgacggatgaataggagttcttctaccgagcaggaaggcatttgtgaataacagaatccctggaacaaaggctagcggcaagaaaactggagctctagtaggccaaatccagactatgcagggcctctctgaccccatctcttttatcttttctctttttgatagagtcagatcccccacccccgacttccaaagagcccctccgccccatgtatcttgtgcagtggagtctgtgcattgctaacctgccccaggggtctgctgtgcccacagtctttattcttcagcgttcccccacatccg

SEQ ID NO: 1244112 - DNA, 4001 bp, Homo sapiens
atctgggttctgatcctcacacccaagctacccaagtcaggtcacttacacagagtccaaggcttcagcctctgaaggcctctccccccgggcagcccaggcccccgtccgcctacaggacccagtgctctccagaaggctggtctgatctccagcctatccaggttctattccaagcctactcagctgggaaacagaacagcaccatctcaagtggcccatcatagggctgtagccagggaaagacagagggacacagtattttggggaaaaggcctgagcaggtaggaatctaggccactccagagcctttggtactctgctgagctggccccactggcctggcaaaggaccccagctgccgagcccacagtgcaatcctccaacaaggagtttcttccccaggcaggtaaacatgggagcctcccttcctccctgcctccccactcctctccctgcagccctacactgaggggctagcccacttgccaccttccctgccacccacagaacgaaaaccccatcctaaaaaagccaagctccagaacgacccaggagccgtagggaatggagagaagtgcggtctggtttctatcaagagcctttcagccggggttggactctccagaggccctgggcatttgctgcacatttgacccttccagggtggggaaaggggtgagggagcaaggtctggcccctggagctgtgaccagctggctgtgggagctggcttcctccatcccactctaacctccagcagcaagagagagccctggagagcaggaggtgggggggccaggaaagaggaagatcccagatggcagcaggtcctgtgtcccctgaaaatgggggacatggggagtcagggccgagcatctctgtggccacggtggcctgattcaaaaagccaggagagaaggggtgggcagagaagcagtcttgctggggccaggtggtataaggaggtggctattgggccacttgtggactcacaggagagttatgagcatggactaggctggagggtccttaggcccctcaccagctgactgagggccatcctgcgggtccccatccctgagccagagaacagagcacacaggctaacagcctttcccttgcagggcctcggggaaggcccctggagaggtccccagctgggaggctgtgctcagtaggcctggggacagggccccccaccaggctgcctcgctgcccgccactctttgcgtgttcccaggaagacctgggccttccctgcccacgggcatcgaccagggcccagcgaggccgctgccgcgcacaccagctgtttctccgacccgggcggacgccagccaggctttgtttgcattgagtcaacagggactgtgcgtccgggacccgcgggcaatgaggggcagggaggggagcggacggtggatgggtgggtgggggcggcgggaggctggagatgcgaagctggggacgccgcggggcgggacagggggcggacagctgtgtcgccggctcggggagtaggcacacgtcagcctaaggtggcagcagcggcttcggggagaggggtgttcccaggagaggaggctgagggtgggggactagggccaggggatggagcttccaggtacaggccgcggggtcccgttccggcgctggccttggcgttacgctcggggcccgcccgtccccccatctcccgacgagccaagttcgcgtacccccggccctgcccagcccccagcccggcaggtggatggggacgccggggcccccgtggcgcacctgcgtcttggtggtgagctggatcaccgccttccggaagttcagcttggagtcggtcgaccccatgtctctggagcccgctccggcccggcccccgcccagactccaacccggctccggcttcagctccggctccagctccgcggcccccgcggctctcgcaggagacaagcggcgcgccccgcccccggccctcgtcggccccgccccgacaggccccgcccccgcgtggctccgcctcctgcacctgcagcgcccgccgccgaagacccgcggagtcggcggttccaacccagcgccgccgcacgccgggtgccttctcaggtcccacccggagcctcgacgctcttccttctgcgtcggagcattgtacccgcctccgctgctaccacgcagtccccagggcccaaaaccctcctcgcagctcgtcccccgccccggtcctcacccttcatctccgctccggctcctggcccacgtctcagctggccctctccatcccactttcctccttctcagtctgtctttcccattcatgttttctgagcatccactctcttggttctccctttttctgacctgtcaaacccacgtgttcagacagtcccgcaggcccttggttatgagggagggaggcgctgactcagtttccatactccaggaaagcagctcctcgccttgctgagcgcgagagtccctcgcggtcccgacccctctctagccaccagattcccagagaatcctttgagattcatccatttcaacaaatgtgctgagggtctggtatttgccaactctgtgtcatggacggacacagcggacataagtagtacagcctgctctttatggcgagcagctagggagagggataaggaaagaagcggccagggtacagccaaataagcctgtaatagaggcagattaatcatcaaaacaaggccgggtgcggtggctaacgcctgtaatcccaacactttgggaggccgaggcaggcggatcacgaggtcaggagttcgagaccagcctggccaacatggtgaaaccccgtctctactaaaaatacaaaaattagctgggcttagtggcgcacgcctgtaatcccagctactctggaggctgaagtagcagaattgcttaaacctgggaggcaaaggttgcagtgagccgagatcacgccactgcactccagcctgggcgacagagcaagactccatctcggggggggggggggaatcaaaacaagacgacaatgacgatatctctaatagctacctctgaggtattattttatccccattttacacttggggaaaatgaggcttaaagcaattacttgcccaaagccacacaggtagtaaggagctcatccaaatgaggctgcgctttttccacaacatcattttgcaagctatgtctggaagcttctggaaatcttggatgcttttttattttttattttttgagatggagtttcgctctgtcgcccacccaggctggagtgcagtggcacaatctcagctcactgcaaactccacctcctgggttcaagcaattctcttgcctcagccgcccgagtagctgggtctacaggggcccgccaccacccccagctaatttttttttgtttttagtagagatagagtttcaccatgttgtccaggctggtcttgaactcctgacctcaaatgatccgcctgcctcagcctcccaaagtgctgggattacaggtgtgagccaccatgcccagccctattatttatttatttattcattcattcattcatgcatgcatgcatgcattttgcagacgaggtttcactctgttgcccatgctggagtgcagtggtgcaatcatagctcattgcagcctcgaatgctgggactcaagcaatcctcctgcctcagcctgctgagtagttaggactacaggtgcacaccaccatgcccagctaattttttttttcattttttgtatagacaggatcttgctacattgcccaagctaatccccaactcctggcctcaagggatcctcccacctcagcctcccgaagtgctgggattacagatgtaagccaccatgcctggcccctagatgcttcaaaaggatgtgacattcacttaaagaggaattctacaggtgaaaaatgaggggcacgccatctgggagcaaaagtgtggcagggtggagcgggtgtggagggaaagaggagtgc

SEQ ID NO: 1244113 - DNA, 4001 bp, Homo sapiens
cacttgagttttctgacctctgcttcattctctttggagggtaccaggagacatgacagagaaggcctcctactcggcaccccattcctttcttcacttacctataggcaccagtggagattcccgagtcttcctcaggagcttctcagacacacagtcttcgtcgtcaggtggtacccaccagcgtctgttagcagacataatcctggacctggatgtaagcagctgagactcctatgctgcagccccgtcctagagagaggcactccacaatcagaactctgattcctcagtctggagaggaaaggaaggttacctgctaagaccctctctcaccatgccccaacacagcctctacttgaaaagatgtccctcccaggtatcccatctcaggtggctgggccattagtgccatttctccgtctccatttcctaccatctgcctcttccccagctcattctgtcttcactgctttctcagcttccccttcccccatctgcatccctatgggtgtgatccttgggccaagaaaaacagctggaaaagtccacagatggtggtgggagaaacagtccttgagtgctggggcccccgctggcctttggtctgtgatggtttctcctgtgggagctacagagcaggatctggccccagggagccagaaatgtcctagaccagatagtgtaacagcattagttaccaaattgccagagattataatgattggacattgatttgcatgtaatttagcatatattttgcacatgagtactaaggaacacattctggttcctgagctgctcctgtttttccaggtccatctctttccaggcaggttcttcacaattaccaactggctaccttcatccctgggctggaaacaagggttctgccaatgggatgccttctttttgagacggagtctcgctctgtcgcccaggccggactgcggactgcagtggcgcaatctcggctcactgcaagctccgcttcccgggttcacgccattctcctgcctcagcctcccgagtagctgggactacaggcgcccgccaccgcgcccggctaattttttgtatttttagtagagacggggtttcaccttgttagccaggatggtctcgatctcctgacctcatgatccacctgcctcggcctcccaaagtgctgggattacaggcgtgagccaccgcgcccggcccttttttgtttttttgagacggagtttcgctctgtagcccaggctggagtgcagtggtgccatctcggctcactgcaacctccgcctcccaggtcctggttgaagcaattctgcctcagcctcccaagtagctgggattacaggtgtgtaccatgcccagctaattttttgtatttttttagtagagacggggtcttaccctgatagccaggctggtcttgaactcctgacctcttgatccgcccacctcggcttcccaaagtgcagggattacaggtatgagccaccgtgccctgtccaatgggataccttctaagcctaaccatacggcaaactctcttttctttttcttctttttttttttttttaggcagggtctcactttgtcactcaggctggagtgcagtgtcaatccctgcaagcttgaccctccagactcaagcagtccttccacctcagcctctcaagtagctgggactacaggtgcatgctaccacgctcagctaatttttgtattttttgtagagacagttttgccatgtcgcccagccaatcttgaactcctggtctcaggcgatctgcccacctcagcctcccaaagttctgggattacaggcatgaaccactgtgcctgcccttgagtcagcttctatcctagttagccctcctctcctggaggagcaaggactggtggccccccaggtcgttggcatgctggtgcttaccctaagagatggctagaacgaggagaacgggcggccaggccagggctcagcgtctgctgttttgaaccgaccaaaagctgagatggagctgccactatggggtcagggaagcagtgacttgggctttatgaaaactttgaagtcagggatggagaggggaggggaaaggacaggggatcggtcttaacccccagtctgctgagtcccaagccaaagctccaggcactggaaagtaaggaaagaccaaatggaggggagcccctaactagattcagtcttttaattcccatggaattaagtggctggatcagagacaggcttgatgaggagaacggagatggagatacaggaacaaggatgagtagaaagcctgggtcccccaagttacactccctcggatactcttatgaacaatgtgggatgtaaataaaataccctagttgtgagagacagactctctaggctgtcttttggtttgggatttttttttttttccgagatggagtcttgctctgtcacctaggctggagtgcagtggcacgatctcggctcactgtaacctccgctcccaggttcaagtgattctcctgcctcagcctcccgagtagctgggattacaggcatgtgccaccatacccagctaatttttttatttttagtagaggcggggtttcaccatgttggccgggctggtctcgaaatcctgaccttgtgatccacccggctcagcctcccaaagtgctgggattacaagcatgagccaccacacccagctagtttttggggttttttgttttgttttgtttttgagatggggtctccctctgtcacccaggctgtgtgatcttggctcactgcagcctcatactcccaggctcaagcaaccctcccatctcagcctcctaaatagctgggaccacgggcacataccaccacacttggctcatttttgtatttttggtagagacagttttaccatgttaccctggctggtctcagaactggcctcccaaagtactgggattaaaggtggaagctacagggcccagcttccagaactctttatactacctatggggtgatgctcactcaggttgcagggatgacagtgatcaggattagggctcttctgtactcagtatatttctttctttttttttttttttttgagacggagtttcactcttgttgcccaggctggagtgcaatggcatgatctcagctcactgcaatctctgcctcccgggttcaagtgattgtcctgcttcagcctcccgagtagctgggattacaggcgcctgccaccatgcccagctaatttttgtgtttttagtagagatggggtttcatcatgttggccaggctggtctccaactcctgacctcaggtgatccgcccacctcggcctcccaaagtgctgggattacaggcataagccactgtgcccagccctgtactcagcatatttcaaaactctcagctattctatatggtaagtagcagtttgttcacaaaggaatggagcttcagagaggcttaatgacttacctgaggatacacagctagtacatggcagttttgtcatctgaacccaggtcaggctggctcaagtgtttgcactcctaactgcaatactaacctccagggggctggttaaacggaagccctttccagatgaatactgaagcttaggaatgctagtatatcctggcacccttgtttaggagaagaaaaagtatgtgctaagcaaatggaaaaagatagggtgtgctagggagatcccactctatcccaggcctttgtttcttccctagattactcagccctgtgtgtttatcctaaaggggctctgcagcactggaaatttgtttggcagatgatgtccttttttctccccagcattcactgctctaggcagagacccagggtcacagcaactccccagggccttcacatgtccccagtgtccatgggaactctcctcccagcctttcacacacaccctcctttgctgcctctccaggttccagcagtggcctgaattctcaggagatggatggtatattcccttact

SEQ ID NO: 1244114 - DNA, 4001 bp, Homo sapiens
catgagacactgtccccacaggcctgggacaggagcctaaacagggaagatggctcagtataggggcttcaccaagcatgtgatgtggagcccagaacaggagaacttaattcacagtccttttttttttttttttttttttttgagacagagtctcactctgtcacccgggctggagtgcagtggcggatctcagcccactgtagcctccgcctcccaggttcaagcaattctcctgccgaagcctccagagtagctgggactaaaggcacctgccgccacgcccagctaatttttgtatttttagtagatatggggtttcaccatgttggccaggatggtctctctctccagacctcatgatctgcccgccttggcctcccaaagtgttgagattacaggcgtgaaccaccgcgcccagccaagcacagtccttttaattgttgggacttaaagacctacaaactgcataatcggttttgccctcattctgcgaccccacaaagctactcacctagcatgattgcacccactgcacaggcctgcgctgccactcgggtgtgaatcaggtgtatggacatcttggtggaaccacgagacctcagccggtaaatcctgtatgctgctaccaccaagcagcctcctaagcctgtgggcagagaacacagcccctgggccacagccacaatgcacagcactcccctgatgagagataccttaccaggcaggctgggcatctggataaacagctggttttatgcagcatctggtggcggggggtgggcgttgcgggggacctagggggatcattagaatattgagttgttgccggggcatggtggctcacgcctgtaatcccagcacttttgggagactgaggcaggtggatcacctgaagttgggagtttgagaccagcctgaccaaaatggagaaacccagtctctactaaaagtacaaaattagccgggcgtggtggtgcatgcctataatcccaactactcaggaggctgatgcaggagaaccacttgaacccaggaggcaggggttgtggtgaaccgagactgtgccattgcactccagcctgggcaacgagtgaaactccatctcaaaaatatatatatatatattgagttgttgcccttcaatggcattttcaaagtggctgcctccctcccgtgacacccctcccccatatacaaatagctgatcaccaccagtgatgcccctcccccagatacaaatagctgatcaccacgacacagcccctccccaccaatttgctccgccctgggcccttgagccacactgctggctcccacctcctggtacagctgttttcctactctaccagggccataaggaaggaagccctgggggaccccaaggtgttcttctgacccttcccactttggtgttggtgctccaggttcctcatatcccatgtactcagttggctgccacctccacccatccagacgtcctgatttcattgtaagggtttgccccttggcacctttgctgttgtttcccttgttccgtgagtaggaccacttgagttttctgacctctgcttcattctctttggagggtaccaggagacatgacagagaaggcctcctactcggcaccccattcctttcttcacttacctataggcaccagtggagattcccgagtcttcctcaggagcttctcagacacacagtcttcgtcgtcaggtggtacccaccagcgtctgttagcagacataatcctggacctggatgtaagcagctgagactcctatgctgcagccccgtcctagagagaggcactccacaatcagaactctgattcctcagtctggagaggaaaggaaggttacctgctaagaccctctctcaccatgccccaacacagcctctacttgaaaagatgtccctcccaggtatcccatctcaggtggctgggccattagtgccatttctccgtctccatttcctaccatctgcctcttccccagctcattctgtcttcactgctttctcagcttccccttcccccatctgcatccctatgggtgtgatccttgggccaagaaaaacagctggaaaagtccacagatggtggtgggagaaacagtccttgagtgctggggcccccgctggcctttggtctgtgatggtttctcctgtgggagctacagagcaggatctggccccagggagccagaaatgtcctagaccagatagtgtaacagcattagttaccaaattgccagagattataatgattggacattgatttgcatgtaatttagcatatattttgcacatgagtactaaggaacacattctggttcctgagctgctcctgtttttccaggtccatctctttccaggcaggttcttcacaattaccaactggctaccttcatccctgggctggaaacaagggttctgccaatgggatgccttctttttgagacggagtctcgctctgtcgcccaggccggactgcggactgcagtggcgcaatctcggctcactgcaagctccgcttcccgggttcacgccattctcctgcctcagcctcccgagtagctgggactacaggcgcccgccaccgcgcccggctaattttttgtatttttagtagagacggggtttcaccttgttagccaggatggtctcgatctcctgacctcatgatccacctgcctcggcctcccaaagtgctgggattacaggcgtgagccaccgcgcccggcccttttttgtttttttgagacggagtttcgctctgtagcccaggctggagtgcagtggtgccatctcggctcactgcaacctccgcctcccaggtcctggttgaagcaattctgcctcagcctcccaagtagctgggattacaggtgtgtaccatgcccagctaattttttgtatttttttagtagagacggggtcttaccctgatagccaggctggtcttgaactcctgacctcttgatccgcccacctcggcttcccaaagtgcagggattacaggtatgagccaccgtgccctgtccaatgggataccttctaagcctaaccatacggcaaactctcttttctttttcttctttttttttttttttaggcagggtctcactttgtcactcaggctggagtgcagtgtcaatccctgcaagcttgaccctccagactcaagcagtccttccacctcagcctctcaagtagctgggactacaggtgcatgctaccacgctcagctaatttttgtattttttgtagagacagttttgccatgtcgcccagccaatcttgaactcctggtctcaggcgatctgcccacctcagcctcccaaagttctgggattacaggcatgaaccactgtgcctgcccttgagtcagcttctatcctagttagccctcctctcctggaggagcaaggactggtggccccccaggtcgttggcatgctggtgcttaccctaagagatggctagaacgaggagaacgggcggccaggccagggctcagcgtctgctgttttgaaccgaccaaaagctgagatggagctgccactatggggtcagggaagcagtgacttgggctttatgaaaactttgaagtcagggatggagaggggaggggaaaggacaggggatcggtcttaacccccagtctgctgagtcccaagccaaagctccaggcactggaaagtaaggaaagaccaaatggaggggagcccctaactagattcagtcttttaattcccatggaattaagtggctggatcagagacaggcttgatgaggagaacggagatggagatacaggaacaaggatgagtagaaagcctgggtcccccaagttacactccctcggatactcttatgaacaatgtgggatgtaaataaaataccctagttgtgagagacagactctctaggctgtcttttggtttgggatttttttttttttccgagatggagtcttgctctgtcacctaggc

SEQ ID NO: 1244115 - DNA, 4001 bp, Homo sapiens
caatttacaaagagtatgcatttacaaaacctttcaaaagcagagctattggaaaaggtgagttattctatacatttatgttggaagtatgcagctatttgctacctggaagtactgctcgcccattaggtctttaacaagcattccggatcttgccaattctagtattcagtcgtgggtggaatctgggattaaggaatttgcttctgagtttcatcttcagagaaacacagcctccactgccatccattctaaccctctaccatctcatctgaaaatctgacttaaaacacccacagatgcaaaagcctgcaggcagccccttcctcccaaatgctcttccttaaaggatagttagggaggggtccctggctatcatctgcagattgcaaactcttgcaatgcaacaggttgtcctctcctagaaaagaaggtgcaagtactcccaagctatttgtagccaaataacctttcagaactttacactgtgagccgcacggttcgcatttgctactgtgataccgaaggcatgaaatcgcatcaacccaaatccgtggcatcacttagccgggtttggggcctcatcacacgtacccctcctctactgctaaggccaaggttgtcttgggaaggtttgggacttaccaagaaagggctcaagccagaggaggctcctgcgcggttacacgtgagcctgctccgctctcccctcccaccagaaaaagtgcaccgggaaagtgtcaacgctggaggcgtgcacggcttcccgccgagagaccactccccccaccggccccagcccccaccccgctttctcagctacccttcaccagaagaaaacgagtcttctctcacacctcgtgagttccaaatactaaccagtaacagaagctgtaacacaaccccaaaacccaggctacgcagtgaaaccccctccctcaagccgacccccgccccctgccccgcacagaaccaggccccagggtttctcctccccagcccgggaggctctgccctccgcaggcgggctcgctctgcgtgcgggtgtgcctcgttctagggaacgatcctgacctgtcaagttacacctcccacccgcgccgcaggagcgggacccagggaggccgggtgcccgaagctcttttaaatgtagctcaggaggggtccctcccctttcatggaggaggaggaaggggaggaagggtgctgggtgagctcctcaatttcatcagcgcggggccggggcgccgcgggacagggcgggagcggggttgggggatgctccagcgggcgtgcccggccgcggagggggacccccggagcgtcgtcccttcccggagcggggccgcggcagcgctcaccgtcttcgtggtgaagggggagcttcagcgggttctccagcagggacctgagcacgccgtagggaggcgggataaaggtgggattcagggggagcggtcgggacattttctccatcgcgatgcactcaaattttttccccttaaaaaaagaaataagaaagaaacaaccgccccctaaaatgttgctgagcttttcctccgtcctttgccaaaagtactcgctctcaaggcggtggagaaaagggaagaaaaaaattacttatatctttataaatacatctgcataaaaatatatattaaaaaaaaactttcgggtttccagtgcagacggtcccaggagagcgcgccaagtgcccgcgggctccccggcgacgtgcaggatgctctcacctgcctcgaacccctcgttttgcaaaatgttcaaaattgaaaaaaagaaagaaaaaaaaatgtcgacggctgcagaagggcagaagacaccgcgccgaccccagcccctagtgccagcaccggaggcggtgcgccgtcccaccccacccccctccccgcgccggcggccgctgctccccagcgctccgcggccccgcagcgccgggctcagcgcatccggccgcccatgtgccgcggccctgacaagagtgacgtcagggcccgcacctcgcgcccataggcgtgcgggggcggggccacgcgcggcaccgcccgcctggcccgctcgccccgccgccgcgtgtttagcgtcgccgctcgcgccgattttcggggaccttgcagcactggctggttgcaggggagcaggtgccagattccctgggccatcaacttaggcttagatttttttttttttttttggtctgggtgggaagaggaatgagaaatttatatccatagttttcaagctgggaataacctgaggagttttaaaaaaatcgcgatacccaggccgcatcccagatcaattagatcagaacctctgcggtgctatcagggcgtccataatttttaaagctccccaggtggttccaaagagtagccaagtttgagatgattggtttagatcggatggaaggtaacgacccttctcaatatttctcctggccccggccaagcttagcgtcttctttcttgcccagtttccaccaccaccaaaaaataactacttcctataagtccgaatgggatgcaaaaagcagagcgggaagcggaggactgagctgctgggcactgtttcccacgctgcagagaggtgttaacggtggggggagagggggggtagacatttgcctgaaacggaaagaggcgggagagacacagacacactgaacgggattttaggaatatttactctgggtgaatacaggtgattgcgcttgggtcaagttattaggtttgcacggtgattaaaataattttgtaaagtatcccctaagggggcttcggctttccttgctgttacagcagctgcagcgtctccctctgccagtttgacctcgtggcacccacggtccccgagatctgcgtgcgaccccctgtgtgataactcccttcccgcctggggtggtgcgggcgctggcgtgcagccgcgacgccccctgcagagctccgcggggggccaggcaggttcttcccctccctccttacctctccttactaagaccctagtcttcgatctggggaaggggctgcaagaacgaatgggcacaaatgaaagaaaaccgtttttcagtgggacgtaaaggcctttgtgaccccaggctgagtcgctggggaaggatgtggtggtgtcttgatggggtttacttccccaggagagggttgtaagagaggaggcgcctgaaaccccagagatcaggagcggcggcgcagcggggttcagagttccctggcagggtgattccggcaagtgcctttctgccctgagctgtaggttcttcataaaaggacacgtaatctagtgacctctacttcctcactctaaaattatggcaaaagggtaaggcaacattctaagtgagatgttgttgcagtgtttcaggtttcagacgaattccagaaacagcaaacttttagttaatgccacatgcatttattgagcaccacggtatgtatgccagcgactatgcgggggctagtgaaaaaagatgaataaaacataattttaaccttcaagaactcatcgtttagggtttggcatataagcaaataatataaaataggcttaaaagaacaaaaatggatagatggaggtgacaggggcacttacattattaggaaagggattctagagaaggtgcctgagctgggcgtggaggtaatagtctctcgtgaacggtctgaatccatcaattatattatattgtttttttaaaaaataaaaaagggacctcatctccgctatccttttggagacagaggctatttccctgtcttgagttccttacatccctgtaagtccataaactggcaggactgagagcatcctctcagcctggttagaaatctgttagattgcagattccaggtgcatgaaagatgcgttacctaagctttgtgtaacagtccactgacattactcagcacgcccaaagtgctccacctgctcatgattctccgcatgtcctcacttccccatgtttccag

SEQ ID NO: 1244116 - DNA, 4001 bp, Homo sapiens
aaaccccagattacacattatcattccgacgactgaagtctaaccggcagaaagttggcctcgtaacacaaaatgaaaaaccaaggctcaatctcttcctgttctctgaagaaatcatctcattggaaagaaaacagaaagggagcgaccagtttcctaggtctgtgctacttaagtaccccatcctcccagtaatcaccaatttatttttttaatcttacctagtctttttgaccttgtaaacctgaaagtattgagttgtaaaggaatgtcatttcccatgctttcctcctaaggctcaattgctgagtgaggcgtgctttttgttcccaagttctctaacccctgtgagatatggctatttcacgtgtcttcttagccccacaaaatggctccctttgtgccacttggccaggaccccgagggtagccacacatgaatgcaggtcataatcgatgtaaaatacatgctcaaaaaagtgatttaagcttcttccaagccttgaagaggatcccagacataactgtaacccaccttaaagaacagtgtgcaattagctgagacaatgtggacaccttccacagaatccaaacccttccaccaagtaagttaagcaaggacttggaaaagggttcctgtccaaacactgtacccagtgccccaagcccaaaaagcagtgggaagaagggcaagaaaaatcccccgcttcccaggtagcgctaccacgttagagacaatggatgtctccggccccgcccaagaacaagaaacctcctcctgcaagggaaccagggccagggatgaactcactgggcaaacgtcaaaggaggaagcgaaggtaggatgcaaaggccacggtccgaaggtttaagcgcagaaaacccactcgggttggctcgttccccgcgcccgcccccgccccccgccttagaaatgagcgcagggatggggagaaggggtctttcctttgttaggaaggggagacacttggaagaggggaggcacttcgaagaggggaagaacgattgggtcctcaatggggggtgaagggtcgcgatgaccagccccgctcgaccacacatgcacctgtcaggtaggtccgaataaggagtgggggcacggcgagggtaaggagcccgccggacctgatcgatccggtctccggatccaatggctgcgcgcgagagcgagaccaaccgcatgccacgggggagagacaggagcgcgtggcccatcaatgggacaataggacctgaccatgcatggggccctaaaggatccccgggcacctggggggccaagcccaccaccctggggatgcaccagccgggatgcacacaggagaaagcgaagccctccccgaaggttccgattaacgaaaaccggccgtgctccgaggggcgaccagccccggcctcctcagcccctgactccgtggaaggaatgaatggagagcagcagggacccgggtggggccggcgcgcagggctcgccaggcggcacaaaggcggcgccgacggcagaaccccgccacccgccccggcgcgagcacagcgcacggggctcgttacccgcaacgaccggcgcgaggccccgccggcagcggccctcccagcccctcagccccgcgcggctcgggcgcgacccggtcgcctcaccgggagctattcctgctgttggggtcgactcccttgaaggtggtggttgtggtcatggcgccgaggagcgaggtaggctggcgccggagcagaacgctcaaagggtcggacccgaggggcgctgggaaactccacacccaacagccgaccaccgctgcaggagccgccgctgccgcctgtccggccgatcgacgcctttatagggttttcaacccccgccccctaacccgccggcattggccgattcaaatgaattctttcattcctattggctctctggagtgccaagcaccatgcggcattacgatgggctgtggcggccacggctcagcctaagcccgcccccttcctggactgggaaggccttgggactctctcccctcccccaccccaaaatctcggcgatgattggacggaaggcgaatctacctcgcgctgggtggaagtcgtgctggctgtcactgtaaaacgttacctgacagagggggaagctctttcttggggagttacaacctcggcaagcagaagggagatttgtcactgttactgttctctcatttgctttactgatggtgggatagtaagggcatcctccttaaaggatgaaaagtactgcaacaagttgacatttatctgttgaatacctactgtgtgtcccatttagaaacctaatagtctcaaagcagccgcacaatgagtcagcaacagagagcgcaccaagatgatcccttttaaaaggactggaaattccttacattttaatgttactgtttagttgtaatgggtggtgcatgtactggaccaaaattacagtcgctcctatttgggggcctattctaaggctggttaatgcctggcaccaggaatggactcattccctgctaccaagactatggaagcagctcaggcctctgcagctgtttataacccttaagtcatgactcttccacctgtctgggtaaatctatccatgcgacaaatgcagacacacttggaggattcaggaatgatggtttacaagatcataataggaaagccttgggcaaaagagggcaggcccttctcatgtcttgcatatttcctcaaggcagatgtctttgcttgtctcaatatttccataataattgaaccacattcctctttgcaaagccacctttcaggtagttggaagtttgtattctgggcagtctaggttaaccaccctccccccccgggctttcatgaaaagccagtgagaagttctgttctagaaagcacggatgatgcatttatgtgcttaccacaacagcacgaagcgcaccacttgtttgtgttagaatcttcccttctttttttcctttcttttttttttttgtttttgaagtggagtttcgctcttgtcacccaggctagagtgcaatggcgctcaatgcaacctccacctcccaggttcaagcgattctcctgcctcagcctccgtaatagctggaactacaggcgtgcgccaccacccctgactaatttttgtatttttagtagagacggcgtttcaccatattggccaggctggtctcaaactcctgacctcaggtgatccatgctccttggcctcccaaagtgctgggattacaggtgtaagccaccgcatctagccaaaatcttagctttttttttttttttttgagacagagtcttgctctgtcgcccaggctggagtgcagtggtggcgcgatctctgctcacttgcagcctccacctcccgggttcaagcgattctcctgcctcagcctcccgagtagctaggactacaggtgcgtgccatcatgcccggctaattttttgtagtttattagtagagatggagtttcaccatgttagccagcatggtctcaatctcctgacctcgtgatccacccaccttggcttcccaaagtgctgggattacaggtgtgaaccaccgcacgcccagccaatcttcccattctttctttttttgttgttgttgttttcgtttttttgagacagagtctcgctctgtcgcccaggctggagtgcggtggcataatctcggttcactgcaagctccgcctcccgggttcacgccattctcctgcctcagcctcccaagtagctgggactacaggcgcccaccaccatgcctggctaatttttgtatttttagtagagatggggtttcaccgtgttagccaggatggtctagatctcctgacctcgtgatccgcccacctcggcctaccaaagtgctgggattacagcatgagccaccgcacctggccaatcttcccattctttttttttttttttttttttttttttgagatagagtctcgctctgtcgcccag

SEQ ID NO: 1244117 - DNA, 4001 bp, Homo sapiens
atatttaagactgaacaaaaatgtgtccatgtactgtaaatagcaatttttaaaaaattgctccttttctttcttctctcttaaaatcctgaagtttctgtatatctttgcagatcattccctaccagactaaatttataacgagtttatggggccaggagaacattactggacaaaattaagtttatgagaattaggtgagaatatagaaaaagggaaggtagagagacaataaaatgacaatgctactacagtccctagagcataatattggagggaaattgatgacgaaaggtgaattaaacattcatttcacaggatcagaactcatttgtctcacatttcaaatgtacacatgaaaaactaagtgtgaggattcatttgacctaattactgaaattctttacaaaacactaatatcaactcaaccccaaagaataaaaccccagattacacattatcattccgacgactgaagtctaaccggcagaaagttggcctcgtaacacaaaatgaaaaaccaaggctcaatctcttcctgttctctgaagaaatcatctcattggaaagaaaacagaaagggagcgaccagtttcctaggtctgtgctacttaagtaccccatcctcccagtaatcaccaatttatttttttaatcttacctagtctttttgaccttgtaaacctgaaagtattgagttgtaaaggaatgtcatttcccatgctttcctcctaaggctcaattgctgagtgaggcgtgctttttgttcccaagttctctaacccctgtgagatatggctatttcacgtgtcttcttagccccacaaaatggctccctttgtgccacttggccaggaccccgagggtagccacacatgaatgcaggtcataatcgatgtaaaatacatgctcaaaaaagtgatttaagcttcttccaagccttgaagaggatcccagacataactgtaacccaccttaaagaacagtgtgcaattagctgagacaatgtggacaccttccacagaatccaaacccttccaccaagtaagttaagcaaggacttggaaaagggttcctgtccaaacactgtacccagtgccccaagcccaaaaagcagtgggaagaagggcaagaaaaatcccccgcttcccaggtagcgctaccacgttagagacaatggatgtctccggccccgcccaagaacaagaaacctcctcctgcaagggaaccagggccagggatgaactcactgggcaaacgtcaaaggaggaagcgaaggtaggatgcaaaggccacggtccgaaggtttaagcgcagaaaacccactcgggttggctcgttccccgcgcccgcccccgccccccgccttagaaatgagcgcagggatggggagaaggggtctttcctttgttaggaaggggagacacttggaagaggggaggcacttcgaagaggggaagaacgattgggtcctcaatggggggtgaagggtcgcgatgaccagccccgctcgaccacacatgcacctgtcaggtaggtccgaataaggagtgggggcacggcgagggtaaggagcccgccggacctgatcgatccggtctccggatccaatggctgcgcgcgagagcgagaccaaccgcatgccacgggggagagacaggagcgcgtggcccatcaatgggacaataggacctgaccatgcatggggccctaaaggatccccgggcacctggggggccaagcccaccaccctggggatgcaccagccgggatgcacacaggagaaagcgaagccctccccgaaggttccgattaacgaaaaccggccgtgctccgaggggcgaccagccccggcctcctcagcccctgactccgtggaaggaatgaatggagagcagcagggacccgggtggggccggcgcgcagggctcgccaggcggcacaaaggcggcgccgacggcagaaccccgccacccgccccggcgcgagcacagcgcacggggctcgttacccgcaacgaccggcgcgaggccccgccggcagcggccctcccagcccctcagccccgcgcggctcgggcgcgacccggtcgcctcaccgggagctattcctgctgttggggtcgactcccttgaaggtggtggttgtggtcatggcgccgaggagcgaggtaggctggcgccggagcagaacgctcaaagggtcggacccgaggggcgctgggaaactccacacccaacagccgaccaccgctgcaggagccgccgctgccgcctgtccggccgatcgacgcctttatagggttttcaacccccgccccctaacccgccggcattggccgattcaaatgaattctttcattcctattggctctctggagtgccaagcaccatgcggcattacgatgggctgtggcggccacggctcagcctaagcccgcccccttcctggactgggaaggccttgggactctctcccctcccccaccccaaaatctcggcgatgattggacggaaggcgaatctacctcgcgctgggtggaagtcgtgctggctgtcactgtaaaacgttacctgacagagggggaagctctttcttggggagttacaacctcggcaagcagaagggagatttgtcactgttactgttctctcatttgctttactgatggtgggatagtaagggcatcctccttaaaggatgaaaagtactgcaacaagttgacatttatctgttgaatacctactgtgtgtcccatttagaaacctaatagtctcaaagcagccgcacaatgagtcagcaacagagagcgcaccaagatgatcccttttaaaaggactggaaattccttacattttaatgttactgtttagttgtaatgggtggtgcatgtactggaccaaaattacagtcgctcctatttgggggcctattctaaggctggttaatgcctggcaccaggaatggactcattccctgctaccaagactatggaagcagctcaggcctctgcagctgtttataacccttaagtcatgactcttccacctgtctgggtaaatctatccatgcgacaaatgcagacacacttggaggattcaggaatgatggtttacaagatcataataggaaagccttgggcaaaagagggcaggcccttctcatgtcttgcatatttcctcaaggcagatgtctttgcttgtctcaatatttccataataattgaaccacattcctctttgcaaagccacctttcaggtagttggaagtttgtattctgggcagtctaggttaaccaccctccccccccgggctttcatgaaaagccagtgagaagttctgttctagaaagcacggatgatgcatttatgtgcttaccacaacagcacgaagcgcaccacttgtttgtgttagaatcttcccttctttttttcctttcttttttttttttgtttttgaagtggagtttcgctcttgtcacccaggctagagtgcaatggcgctcaatgcaacctccacctcccaggttcaagcgattctcctgcctcagcctccgtaatagctggaactacaggcgtgcgccaccacccctgactaatttttgtatttttagtagagacggcgtttcaccatattggccaggctggtctcaaactcctgacctcaggtgatccatgctccttggcctcccaaagtgctgggattacaggtgtaagccaccgcatctagccaaaatcttagctttttttttttttttttgagacagagtcttgctctgtcgcccaggctggagtgcagtggtggcgcgatctctgctcacttgcagcctccacctcccgggttcaagcgattctcctgcctcagcctcccgagtagctaggactacaggtgcgtgccatcatgcccggctaattttttgtagtttattagtagagatggagtttcaccatgttagccagcatggtctcaatctcctgacctcgtgatccacccaccttggc

SEQ ID NO: 1244118 - DNA, 4001 bp, Homo sapiens
ccactgcactctagcctgggcaaaagagtgagactccgtctcaaaataataatgataataataataataataataaaattaaggtcaggagcggtggctcatgcctgtaatcctagcactttgagaagccaaggcaggcagatcacaaggtcaagagatcaagaccatcctggccaacatggtgaaactgtctgtactacaaatgtacaaaaattagctgggcgtggtggcacatgcctgtagtcccgactattcaggaggctgaggcagaggcagaagaatcgcttgaacccgggaggcagaggttgcagtgagccagagatcatgccactgcactccagcctggcaacacagtgagactgtctcaaaaaaataaattaattaaaaaaaataaggcagggcgcagtggctcacgcctgtaatcccagcactttgggaggccgaggcgggcggatcacctgaggtcaggagttcgagaccagctggaccaacatagagaaaacccgtctctactaaaaatataaaattagccaggcgttttggcacatgcctgtaatctcggctagtcgggaggctgaggcaggagaatcgcttgaacctggaaagcagaggttgcggtgagcagagattgtgccactgcactccagctcgggcaaaaagagcaaaactgcgtctcaaaaaaaaaaaaaaaatcaagaaaaagacactagtacccgaacaccagcttaagagcaagtcaaaactctaaccagtcccactttttaaaggtctctgttcctcctgcaatagcaggtagtaaccaactcggatgacgtcagtgttgtagagaccatttgtaatagtgagatatccccaaacaaaggatgtagatcataaggcagaaagtatctcaatgttttaggatcctactattctttcagaatcatacacgacaactaaatcaggattatatatttaagactgaacaaaaatgtgtccatgtactgtaaatagcaatttttaaaaaattgctccttttctttcttctctcttaaaatcctgaagtttctgtatatctttgcagatcattccctaccagactaaatttataacgagtttatggggccaggagaacattactggacaaaattaagtttatgagaattaggtgagaatatagaaaaagggaaggtagagagacaataaaatgacaatgctactacagtccctagagcataatattggagggaaattgatgacgaaaggtgaattaaacattcatttcacaggatcagaactcatttgtctcacatttcaaatgtacacatgaaaaactaagtgtgaggattcatttgacctaattactgaaattctttacaaaacactaatatcaactcaaccccaaagaataaaaccccagattacacattatcattccgacgactgaagtctaaccggcagaaagttggcctcgtaacacaaaatgaaaaaccaaggctcaatctcttcctgttctctgaagaaatcatctcattggaaagaaaacagaaagggagcgaccagtttcctaggtctgtgctacttaagtaccccatcctcccagtaatcaccaatttatttttttaatcttacctagtctttttgaccttgtaaacctgaaagtattgagttgtaaaggaatgtcatttcccatgctttcctcctaaggctcaattgctgagtgaggcgtgctttttgttcccaagttctctaacccctgtgagatatggctatttcacgtgtcttcttagccccacaaaatggctccctttgtgccacttggccaggaccccgagggtagccacacatgaatgcaggtcataatcgatgtaaaatacatgctcaaaaaagtgatttaagcttcttccaagccttgaagaggatcccagacataactgtaacccaccttaaagaacagtgtgcaattagctgagacaatgtggacaccttccacagaatccaaacccttccaccaagtaagttaagcaaggacttggaaaagggttcctgtccaaacactgtacccagtgccccaagcccaaaaagcagtgggaagaagggcaagaaaaatcccccgcttcccaggtagcgctaccacgttagagacaatggatgtctccggccccgcccaagaacaagaaacctcctcctgcaagggaaccagggccagggatgaactcactgggcaaacgtcaaaggaggaagcgaaggtaggatgcaaaggccacggtccgaaggtttaagcgcagaaaacccactcgggttggctcgttccccgcgcccgcccccgccccccgccttagaaatgagcgcagggatggggagaaggggtctttcctttgttaggaaggggagacacttggaagaggggaggcacttcgaagaggggaagaacgattgggtcctcaatggggggtgaagggtcgcgatgaccagccccgctcgaccacacatgcacctgtcaggtaggtccgaataaggagtgggggcacggcgagggtaaggagcccgccggacctgatcgatccggtctccggatccaatggctgcgcgcgagagcgagaccaaccgcatgccacgggggagagacaggagcgcgtggcccatcaatgggacaataggacctgaccatgcatggggccctaaaggatccccgggcacctggggggccaagcccaccaccctggggatgcaccagccgggatgcacacaggagaaagcgaagccctccccgaaggttccgattaacgaaaaccggccgtgctccgaggggcgaccagccccggcctcctcagcccctgactccgtggaaggaatgaatggagagcagcagggacccgggtggggccggcgcgcagggctcgccaggcggcacaaaggcggcgccgacggcagaaccccgccacccgccccggcgcgagcacagcgcacggggctcgttacccgcaacgaccggcgcgaggccccgccggcagcggccctcccagcccctcagccccgcgcggctcgggcgcgacccggtcgcctcaccgggagctattcctgctgttggggtcgactcccttgaaggtggtggttgtggtcatggcgccgaggagcgaggtaggctggcgccggagcagaacgctcaaagggtcggacccgaggggcgctgggaaactccacacccaacagccgaccaccgctgcaggagccgccgctgccgcctgtccggccgatcgacgcctttatagggttttcaacccccgccccctaacccgccggcattggccgattcaaatgaattctttcattcctattggctctctggagtgccaagcaccatgcggcattacgatgggctgtggcggccacggctcagcctaagcccgcccccttcctggactgggaaggccttgggactctctcccctcccccaccccaaaatctcggcgatgattggacggaaggcgaatctacctcgcgctgggtggaagtcgtgctggctgtcactgtaaaacgttacctgacagagggggaagctctttcttggggagttacaacctcggcaagcagaagggagatttgtcactgttactgttctctcatttgctttactgatggtgggatagtaagggcatcctccttaaaggatgaaaagtactgcaacaagttgacatttatctgttgaatacctactgtgtgtcccatttagaaacctaatagtctcaaagcagccgcacaatgagtcagcaacagagagcgcaccaagatgatcccttttaaaaggactggaaattccttacattttaatgttactgtttagttgtaatgggtggtgcatgtactggaccaaaattacagtcgctcctatttgggggcctattctaaggctggttaatgcctggcaccaggaatggactcattccctgctaccaagactatggaagcagctcaggcctctgcagctgtttataacccttaagtcatgactcttccacctg

SEQ ID NO: 1244119 - DNA, 4001 bp, Homo sapiens
gggcgccccaggtccttccagcgccgcgctagaaagcgggcgcctgcggccgagtgggagggcctaggccctgtggcccccggtggccggcggtgggagcctggttcatccgccaggtcctgagcgacctccccggcagccctggcgccccagccgctcctaggggccactctctcgacccctcttagcctccgcgactcacaccttccgcctcgcggaactctcttgcaggagttctctcccggtaggggagaaatcacctccgggcgggagagcgacgagggaagaacctcaaacctatgaattataccaaagtgtgtttggggaaaaaaaatctacaagttcccctgattgttttggctagagggcaaaccgccaggccctcggagcacaaattcaaatgcaaggtcatatcccaccccaaaccgccgctgcggacgtgcggccaaggctcagccccgaaatcgcagcgcttcagtgtccgaagccacgcgatgggctctgtcctaaagcggagtggcccgggagcgacgtgctgtctcagggaaccgctcggctccttagataattagtaaccagctgtcaaagtctagggcggtcggggaggacccacaaacgatcccggccctggggatacactgccagccggcctgaactcccggggagaggccgggggtgggcagcgaggtctggaaacgccctcctttctcagactgagaccagatcctctgcgaactgaggtctgagacgcgttcgcccccacaccaccgcgcttggtttctttggccccgcgcgtgtccacccggaccctgcatggaacatgccctttgcaaatctaaacccgcgttggggatcccggataattccgggccttgcatgggcgcggctaacaagagtgcccaccagggaactcgcctcccagatcccggctccggatgccgcctgtccttcggcaaagaactgcaggtcatcatgcaggtcaatgtgtccgaggccgacatgcggctttccagacccgaggcagggcgcaggaaaaatgcgcggcctggggcttgcagcggcgcgaggctctgctcccgggaagtcgcagcggtttcactgcacccactcgcaccttcagtcgcgtgggcaaacctcccggcaaagggctccacagctccagttctccccggcccagccccagccccgcggggaaaagcccttgggtctcggacgctggcctgggcctggggagaagaagcccggtgggccgcagggtcgtcccgctaagggattgggaagggtccgggtgttgggagagaagcagagcgccccccgggggacttctctggtgggaaacgggcttggcgagtgtggtcgggcgcagtgtcactcaggcccggggccggggctccaggggttcgggtgggtcccctccacctcgctctgcgcctacctgagcatccggtccacctccgcccgctgctccgccgcctcctcggtgttgagcgcctgcagctccttgaggatgggaggtgtgtcatagtcgtcgccgtcctcggagccctcgtcgccggacaagcggcccttggcgtggccgttggtgagagtatggaagaccggcttggtgtcgggctcggccccgctgccaggggacaggggcagcgtctccagcttcaccccgaagttcggggatggcagcaactcctccaaggcctgaaccagcacctccttggtgaccccggagctcagcagggcgctcaggagttcttgctggagcgacgtgagcttggacaccattttccaaggacggaaaaagaagggggtgagggggtgggtgggtgcgagagaggagggtggaggggagtttcacaagcaaaccccaaatccaggaacccctccacccttcagcctccagacacctgttactccccggggtcccggaggctcctccgaaaggagtcagaaaacttctaacttgccatgatcgccaccattaggccatataagatatgcaaattagtgggaagggcccagctttcggctggatgcaaatgatggtggggagggggaaacccggagagagggagagccggaggggcagacctggagagcagaagacctgggccgggagcggggctttgccagggtccattgtactcacgctggggggctagagaccttcttttactggttctgcttatcagccaaacttcacctaacctttggacttgttaagccagtgccttgcagcctaggcgcggggcttttccaccggttctcagttccgctttagtccagagagaagacactacgcttcggggttcaggtgagagccagaggaagctggggtgctcgtggaagaaggggacgcaggaggaagcgaagagtagagaccctggatgcgtcccggccgacgcaggtggtgggccaggagagcccgcagggcggaagagaaactgaccacttaggaaggggcgccgaggccacgggggaggtgaggcagcgttaggtgtggtgagcatgccctggagggactccatttatttctacctcggttactacctccaggccccagaacctccctggcctggtctggcggtttgggtttgcagaactgcccgccagagagcgtaggcgagggtgaaggagtccgggagaactcttggaaagagactactttatgggtagagggagtagccaaagtgaagctcccccagcagctgggctgcaccggcgcccagcctggccacgccactggggagctggacccctggggctcctcactctcctgtttaaacccggatgtcaaggcgcctccgccttgggggaggatggtgaggcagaatggtgaggcactaggatggtgaggcactaggatggtgaggcactaggatggtgaggcagtgaaagcaaagcttgacctgcagctgggtggacacttgcagccgagggtccccccggcccactcatttctggtttattcgtagttccagaacatctgtggttccctgggccggggacgagctctgtagacgaggtcactgcagcagtggcagaagtcttgcactcctagtacagaaggtgtcgacagagctactgagggaaagatgttttttttcccactctggcctgggccaggtaggaagccataggccttgcagcactattggagtttcacctgcttcccccctggtgacgggcaggaggggagggcggcggaagcgcgcccaaaccggcaagctaggacctgacctgtagaagaacagggaaaggggcttctttgcttccaccacacacagacctaaagcttctggggaggagcataacgcttcccttctgggagcctcagtttcctcatctgcaaaaagaggataccactgataacctttttttgggggttgtgtatattgactgaggccacttgtgcaaccgcttggtctaataataaagttcaacactttctggtctgagaagacgggaagccagttcccagtagtaaaactgagttactctggaaacttagggtattcagaattggtgatacagtgctggggttggagggattgggggactagggtttcagaatcagcagaaaaattgcaaaggagtttctaagcacattttccttcctctcccacccttgaaagatatctaggaggaagtaaggttaggttagggatagagaggaatttcagcaggaggaggaagagtctagcagctctcatctgcctaggggcaggatctaatctcctaggtgtgcaagggctgatggtgtaatttatcaagtcaggctgttaaggagctaggatgcctcttaaatacagggtctgctacaggtgcctgggccacttgtgctgagagccagaaggaagcgggatggttgtgtgcgtgtagcctgaggaaagtttacactgatctcagtccctctttcccggagacaagcaaatcccaaattcaggaacctctccatccttcagcctccagacacccattactcctcagggtgccacagggagtca

SEQ ID NO: 1244120 - DNA, 4001 bp, Homo sapiens
tctcagaaaacaacctctgaaggctgcattagtgcaatataaatatgccaggagagggctaatggggttagatgggggcggggggctttttggtctgtcacaaggcagctggtgctattgtaaggtctgtggtgactggattaagcattgataataatatggctgcacccaaacacctcccacacaagaaaatttaaggttctgtgtcaggcctagaagggggagttaggataagagtgcgtgaggagactcctcaaagctcgaaggcactgaaccgaataaacccaagttggaagggaaaggaggatgaatccaggaggatgaggctggcccccacccccaccacatgttgacactgagctgatccccagatcaaaggcagaagcccttccctctacatttgacaggttccatgcctcccaggcctctggtcctgtagggcccccagccacccaggtctgagaaaaatgtttccccatcccccctcccacccccaggcagctctaaactggcatttcagccctagagaggatccccaggccagtgaagcccaggcctggggttggggagagcctgggatagggctggactggggcgctccagtgcctggaagccccattggtggctaggttcagttcaggaggtgacagagctgggtgaggcttccggggaggtgcatgtcgactggtctgaggcatctccagctgcctccttggggcagcctggtggggctggggggacccgaccttcctctcgctcgcgcttcttctgcttcattcgtcggttctggaaccaaatcttgacctgtgtttcattgagctccagggtggcggcaatctccaccctccgggcccggctcaggtacttgttgaaatggaactccttttccagttctgtcagctgccttgtggtgaagttggtgcggaggccactgggcgagcccaggcctggctctgacaccttcgctaggggcggggcagggagaaaggccaggtcaattctctcacctctttctccttccgcttccctcctcccggggctggctctggacctccatttgccattctgcccaagtacagttgtcaaagttcccagggaccaccaggtacccccatggtgatcaccaagtctggagcagccttccccatacttccatcccccatgcacaccaggtcctgggtctgtgctgggtgcacagatcaggaagtggggtgtgtatggaaacttactcctggggtgaccggttacatactgggtggggagacctcacctgacctgagacgtaggttgtgctcttacctgtgtctaccagagccgctgaaagagaagaacccagcccagacccaggacatgtcactgcaggggaagcagagatgctttgggccccggagaaggggtggccacatctgagccctacctgtcttgggtgggtttctcttaaccttcatccagtcgaaggtccgggccgtgggggtgttaggttctgaagggcagggtgtttccttgtcctcggagaggagatcagcataggccggtgcaaagctcgcggtctgctcgttcccataagggggatgctgcggaggatatggccccggaccggctccacctgctccgtagccatcggacaagccccctagctgggccccgtagctcgagggatgaaaatagcctccgtctccttctgattgacccagagggtagtactgagaaggcccgtagctggggctgcaggcggcaggagcataccccgagggcgcggagctggggaagggcacccccagggtcgaaggcggctgctgggcgggatagccggagttctgctgaaacgcagggctggacagccccccaccgtagcggccctcgcttgcatagctgtcaaccgcctgagccgagcttgggggaaaggaggttggggcgctgtgggcgctgtaggcgctgggtccccggttacagagtgggtactctaagaaggagttcatcctattatagtccatgcgtcaaggccgcaggagggtcggcccgtttgggggagacaccctcttgccctacaacctttcggcagtatgtcacagcgctggggctcgaatccatggcctgacccgctcgcctgggcaagcgcttccctaggaagggggtagggagtgggggtgagggggcacatgtgatctctcccaggccaatgggctaagcgggccagagtttggcagccccagcgcccatccatcaccccccaagcattagcatgacaaagacacttcaatcacccgcagcccatccatctgagagcgacatggaagcgtcaaaaacatctttcttcaaagacttttggaaagaagggaccagagggagagggggaaaaagttaggagaatattcaagactttccttccctcccaacccccaaggccttcaataggctcctgggttattagatttggacaaattcaagccagctgcccctcactcttcccacccctcagagaaaccttccccctaagtctgtggacctggaggtggggaatccagcttccatactttgcccagaactcccaaaccatgttcctttcttccaatttgtcttagggtggtgggctaggacagccgggtgaggtatgttatcttgggccaaatggatgactgtgtggtggggaggtgggggaaggtggtgcaaaaacacctaagggtgtggggcaggatctagaatctagaggaagaattcatgaagccaggggtgggaaattggcatttcagggagcaaggcaggactacagaaatgtggagaaaaggatgagaaatgccccatcttccctctctctctctttgcataaatgttctctcctcattcacacatccatttctctccctcagcctctctttatattctctctgtctcaatccatctctctgttcgtccatctttctccatatttatattcgttccctacctctcatctctctagatgtatttatcctctctctagccatccatagctgtagctggctcactcactcagacttaaataactccctatatctctctagagagccacaatgagcacagccaggtgatgtttacagcggggtgaagaggaggggaattttttattctcttcttgaagtgtttaaaactagtggagacctgcattctcctggttccctcctacctgtctctccttcaccaccctccatctccttccaaaaaaaaaaaatttccaaacctcaaatgcataaatttaataccagttaaatcttaaagattcctccagatttcagtaatttttctaggattgataaagggagtttggtcagagagtgggagaatcggggtggaggccctgaggctctgaattctaagactccagagtgaggagtggagtctcgcccctttttgttctgtgtggctgttgcggagggacacaggatgtgtcttcttcactctctcagactccaaacccagatgggactagaagagaagcccttaggtagagcccattgactctcctcctccggacaacttgagggcaagagcttggggcaatccaacacccacgctcatttgtaacctgtcagggtgtctgcctggccggaggcctggggccgaagctagggcaagtccaggagggcaagagttcagggagtgatctctgtaaacaacggagctcaggagaggaaagggaagcaggtgggacaggtttaaggaggaccctcaaaacttctcaggtttccacaccccaaaaagggcagggcgaatactccttcctctgcaagggaccccaaagttgtcccctgcagtctgtgtcttgcccctccatctttgtctcccattccctcttgttttgcttggccttaccgtagctgcctctcctgctttctgctctataccaccagcatcacactgcctttctcttctctaataattgtgggcctagcccaactctgtttttttgagggggagggttttgttttgtttttgttttttgagatagggtcttactctgtcat

SEQ ID NO: 1244121 - DNA, 4001 bp, Homo sapiens
acccccactttcgctcctcccacccaggcaaggagatctcttaaggggtagcgctgttcttcaccttggcgagaaccttcttctctttgacccggcggttctgaaaccagatggtaatctggcgctccgagaggctggtggctgccgagatcttgcgcctcttgtccttggtgatgaacttgttagccgcatactcccgctccagctcccgcaactgccccttgctgtacggaatgcgtttcttgcggccgcgacgaaaggcgcaggcgtcaggagggtgctgcccgctggagtctgcgcggcgtgaaagggagggaggaaaaggcatggtcagatacccacccatgcagacccaggccttgcaagccccaagctaagtcatctcacaggtgcacacaggtcaccctacaggcgcacgtgcaatcctgttcctccaaagcataccaggacagcaccctggcttccggcttgttctctcaccaccgctcagccttggctcctgaaggccaccctcacccatcactgctctcacacccgcgaatctgcaaacatacccacacaccacacacagtcaggcctttgcccaccatcacatacgtccagtcttcatgcatttccagactcttggccactcttttagattctacaggcaaattctggaaacacgtttctgcccccactcccaatacatgcgcatacacacacacacacacacattaacccatcccagtgcacacacatatgtcacggctgcaggaaacctaaatttttctttggaaattggaaaactcatctaatagaaagtgagaggttgtattctctacagtacatccaatacctttttacccatctcccacacccactccccacgcaccgaattgagagttatttagcttttgtgtagaattagtttggaattgtgctgggtagggacaccctgatccccactcaacagcaaagagatctaaacctctcagacatgttgaaaggctggtcccagggcctcctggagaagtgaggtggccttcaggcttcagatagcacccagctcaggcccctcacactgacctccatccaggccctccagctactcagacctccttcagagtcctaataaccaagggaggagcaccaagctcatcctcaccagctccaagtctccctcctcctcctcccagggaaatgccattgggacccacaaccccaggctcagagacaaggggacccagggtaatagaggtacctgcaaatgctgccttccaaaagggacctggtgggttctgttctccctggcaacacatctggctgttccagccaccagcgagagcccaagactggtaactgtccacaggcaacagggagtcatgtcgcggttctccaggagcacccagagtctgcaccacagacacgtccaggtaactggccataggctggtaggttcccggatatcccggatagaaggcaaactcagtggggcggctggggtactcttccccggccgtgggagtctccgcggggtacgcggccagggtggctgcctgggcacagggtttcagcgagctccgggacactcggcaggagtagtacccgcctccaaagtaaccataaggcacgggagctggggacgtcccctggggcaccccagggcatgggtggcattgctttggcggctccgccgagcctggcagatccaagggggcatagttgacagcaggcatcagcgtaggcgccgctgggtggctggtcagaggggagtgggcgaccagattccgcccccctcccgctcccagcaagccttcgatatccttggctccatccaaggtggcataattgccgggctccatggagccgagggtcggctcatgaggtgcgggggcggggaatctagggggcacccagctcgctctccccacccaggccgggggaatccaaagcgttttaaatcgctcccagctcgcaagtcgcctgcattcgctcagcacggccgtcttgacgcaagagacgcaggggcccgggcacgcgcgctgattggctgcggcctgggggagagaagctaataaaatcctaaaggcagaaactgcgaaaatactttaccccagcttattctctctctctctctctctctttctctctctctctctctctctctctctctctgtctctgtctctctctctcgctctctcgctctttctctcctctctctcttctccctctctctcttcttttccctctccactcctctctctctcattccacttaaaaacaacaagagagaaaaggaaggaggtgtcctttcgctgctttccagtttgcagagtctcatttacacgtccggggggaggggaggcgtggtgggcggaggaagaggggacgaggagccgggccccacctccttctcctcctctccctccctagctttctgtctcctgcgctttgacaggtttaacgagagaataaaaagctctctctataaagtgtccatctcctgggggggaaggggagtcgggggtggggctgggaggccgctcccggcctcagaggagaacccgggaatgcgcctgtgtaagaggaggctgggaaatgggggttaataggtatttctggcagcccctggctttgggtcctgggtactagcaccccagttcattcccggtacccttcctgtcccagatgtcctggaatgagctgctccgggccccagggaggtgccctggacgccccttacccagggactcgctactgcccagaatgctctggaggccctgattcgggtgaggctgagggaagaggcgggagacacgaacgtagacgtagaagacatgcgatctggatggaacccaggacactccacttccggacctgaaggggaaatggagcctctagagtggcctgtggaagggtctggatttccctttaagtaaagacatacggagggacggagacccacaggacttgagggagggacggggagagggagagatgagactcagggacagcaacacaaagagggaaagagagaagctgacagagcggatgggacaaaatcttgtaaaatcctgaagtgtcagtcagaaaagagaaagaagagaggcactttcccccttttttgggatctaaagaagtctgaggaagccaagcctggctgactgccagaaaccagctgcgggagttctggaccccaagaatacagacgcctgtgtggagatgccagtctccctgccctgcagtcctctccctatggtctgcaaggggcccaggaaactgtccctgatactggcatactcccacacaagctgagtacccagaaagcccaagacccctatctgcctcctgcaagctttaaacttccttacaaggaaaagggaatggaaggggaaaccccagccactggcagaattgcttgaggcccctctgttggggcctaatgtgcagtgcaattcagaagaatcaaacggtttgtttcacaaatctgtctttagaggttttccgcttcctttactacccctcccaaatcaaatccttctgtctgctttttctagaactcccagtttttctggagaagacaggaatgtttccattctacacgagggtcttgacaattatatggaatggcttaccctaaactctgggcagactcaatcatagcctctcaccaacctgaccttgaacttgagccactttgtgggaaagggcccacaggcagtagtgtacatcactcctaatgagcattgctataattgaagacaccaagcacgaaatcttcactagatcgcatttgaaaacaatatggaagaaaagggaggagatgtctcttcagtgctttccagtttctcaccagagtttcttgcttgtctaattatgaactgcagaaatatccagacttttacctaaagactaagaatttttcaccaatttttacttggtagatgatagatatgtagggcatgtccacagttttagtttccactaggcaaacacccacacatgcacatttattcat

SEQ ID NO: 1244122 - DNA, 4001 bp, Homo sapiens
gcgcgggggtcgaaaggaccgggaggaggaaacaggttagggaaactgcaggtcgatggcacagagcgtactggtgaaaaaatccagctcttcctcggaaaaagggaccgggctgtcgagagaaccctgtaggctaggggagaggcctccggatagctggagacaggagtcggccgcgaagaagttgaggtcgggaaggaaaggtgaatcctggcgccccgagaagacgtcttctggcaatggcccgggctccagcccgccggccccgcgcagcgcgcagccgggactcgacgcgcctgcgccctctaagcgaacggctaaaggccgggggtccgcgcttaaggcccccggcaccacctccggcgggtgacagcaggcttcccacgccgcccgcgaggcggaggggccgcccgggctggccgcgggttcctcggcagggtcgcagatgtcctccagggctcccgggcaggcaggctccccatccggcggctctcggtgctgcgtctgccgcttgtgcttcatgcgccggttctgaaaccagactttgacctgcctttcggtgaggtccagcaaggccgcgatctcgacgcggcgtggccggcacaggtacttattaaagtggaattccttctccagttccagcagctgcgtgttggtgtaagccgtgcgcagcctgcgcgccccgccgccaccagcctccggcagtcccaggccatctgcagggaaaacaggctcggcgtcatagcgggccgtgtactcagcccaacctcagttcggactaccccatcctccaaaaccagtatcacctctccccttcctcgccaccccacccccgcccccaccccaaagccgctcgctttactgcttttgggttttcttctctccctctctagtctacagccccggcccgggtcagggcaaagcattcagagccgcccacgggccacgcagggggcggagagcggctcccttcggcgccggaacctcagatccccctcccaagccctcccagtggacccctcaattcggaactttccaactcaaccggagcgagggtcagaaagattgttcttcacccctcttcctccctagctctgaattcttcctcttctcctagagttggggcagaaaggaccgaatcttttctgcttctagggtctatcccagcaacaacatactcattcccctacacagatacgggtgaaaacctcaatcaaatcattttcttctagcagaaaaaaaggcgtttccccaaccagcttccaaaatcagccatagggagagaaagagagagagagacagaaaaaaaaaaagacgctgttagcggccaggcctgaaccccagtgggatattctacttccccatcccaggaatggagggggtaaggaaccccaacaggctcgccaccattttttttaaacctccttccactgctttttctccccctcttctagctgcccctcaccccacccccaccacgcttaccgacctgcaggcgatccgaccccggaggccggaacggcggaggcggccggagaaggagacgtggcggattggctgggtttcttggcggatttcttctctttcatccaagggaactcgggggccgggggggcagcggggagtggcggcggcggtggcggcggcagagcaggcccatcttcggctcgcttttggctcctgggtctctgaagggtggaggcgccgggctggaggctggggaaggtttgctcgaaaggaggaggaggaggaattaatgtcgactccttgattgatgaagtttgaaatgtctccaagacagcggggaaggaagtcagacactcggcgagcgacggctggctgtttataaacccaatctccctctcaaattcaaaattcatggctttcaatggtgggggagggggctgctggggggggcgtcaggagggaggatcggaagggacccccctcctgcaccccccccgatttatgtaatggagcgattttgggagggggagatttcggtctctcttttttttaattttgggcctttataattgtatattgctgataaatacaagcgtatggggactctctctattaaacccaggactccagcgaaattacagggaattcgtggtcacgggaccggcctccgccaatcgctcgtctgggcctggtggaaaacagagagcattatttggtttaattgattcaaaaacaccagaggaccacgaccaggacaccatgagcccccattcctacaccagtgcctcacatgctctctccccaatgcctccgtttctccagaaaagctagaggaaccttttcctcatccccttcgaaggttagaaggtttcagaagcctggaaaagaagagactctaagggagaaaccttcctcttttccaagtattttaatagagtaaattaaggccttctttacgtggccagcagcatccccttcccttctccccttccccaggaaaagatgagtgaggatctccgcgttggaggaagagggagtcgaaagaggcttccactctttgaaaaaggtcagtattaaggtgaaaataagaaagagatttacaatcatcacaccactatccctgttaccctccaaaaacaacagttaaatcttgggaaatggacaggaactcccaggcagacacataggagtgagatggagcataaggggcatttttgggcctctggcctccatcgctgtatggtctgggttctcttctctgcccagtgtttgcagcactgcctctgccccttatgtacccctgctttcctcactttcaggcttccatgcttctctgtgacatcccccaaaaacaggcagagtctaagatgtgcatgtacccactcaagcctcaagcttgtatctgtatccatatccagggacatgaacaagaactgaggtagccattggtttaacttagagcactctcaaagttcagatcagcgttatgtgtgtgcatgagtgtggtggggagattttcccctaggacaaagagactttccctcccatttttgccattgtgctagttaaaaaagaaaaaagaaaaaaaaaaaaaaaagaatccctgacaaggaagaattccctgaagatggtaggggtggaaataatgaccactgagatgatattccatttctggctgctgggggaaaatgtttttaaaatttattttattttgaggagaccaagatagtctgaagtttagagtgttgtaatttactatggggagagggcacaagactctgagccccaagcaattggtgggaaactaggcctcaaagcagaaaatgaaaagtcgatctgggggaagatttttaaataagtgggtcagacggatggagaggagatgaggcgatcaatcttagccccctgacagctccctccgattgcatcaaagaatttggctctttgggaaagcagagcgaacagccaaaatttcacatcccttaaaaaggcctgggggtgggggtgggggtgcaaaagagaagggtgattctgggagagctgggaaacagatgggaaatggggacagagggaaagcgctaagttgggtggaaagtttgcctggagaactcccatggctttggcctcccctccccctcctctctctctgctgcccagccaggaggagaaggctggttagcagagaaatggcaactgagcccggagctggaactagaaactttctgtcagtgtaacatctgcgtgagtacttaaaaagaaggacagagaagtctgagtagaagcatgagggtgggggagaggaggatggagaaaggggagttggaggtgggggctgcagggaccgaggaggcatgctctggagggctcagaacagagagagctgctctgacctgggcaaagtggccagcgacagtagtgtgcaactaggctccaaagaaaacaatttttgccatttagaggtgtggatgggggtgggcatagaataatccaaatagtagctgtctggaagtcatgcagggaggcctgagagtggg

SEQ ID NO: 1244123 - DNA, 4001 bp, Homo sapiens
cagcccaggagtttattcccctggccctctgaagccttgtggattaggcccctccaacctctcatatcttctccctttgtctttcttccctcagttccctccaggtgaaatagtaaagagatgaactggacctgggagtggttgcggggaggatggctggagcctggactgctgaaggtgctgtgtacagagagacagattagcaccctactttcgtcccccaactggacccttgggctaaaaatctttacgtttttttcccccagtgggcagtaatagaaaaataatccaaaatttccaaaatagcaaagatgggtttggggcctagagggggatggagaagatgggacatatgatgggccaaggacccctccctgcagaggtgtgactctccctcctgggcaggaggcaaatgccaacacaatgtccagtctcagcgaggtcaaggggcttccgaggtcattttgtggttctaatactgagctaatcgcctagaaaacgtggcctctccatgaactctctctcctgccagcctcccgcctccaaaccctaagtgaggcctcagggaaaaagggccaacacattcaggtcggctgcagagcccactgactccctcagcctaagaaacagggctgcagaggagagaacagagacctcaaattaggagagcaaagggaaaccaaaccaaaccaaaccaacattgctcctccaggaagaaggctggggggacagagcagaagagaaatatttctgcatcagtccaccttgtctgtgaactgagcagtttcctgctccagagagtagcacatatttgtctagaatcccaagctagacacaagaagaaaaaaaagaacatatccacttatacccgctccaaagctggaacattccatccaagcactggatttgatttttccaagaggcagcagtgacaacgtctcactggtaaacaggcataggggacaccagtacccagtgtagacaagcagagtcacaggaacacaccgaccacatgtggacctcactagacacacccatgcacacatgctggggctcgctgtgcctgcctgcattttccaaaaccagaaaagcgcttctgaactgcctcacaaaacaaccgtcttctctggggtttttcatgggccctgacacctcagtcccaaccagttcaaacactctccaggtgtcgaggcccctctttctctccctctgacccaagcatcagtcatcataaaagggagcaaacctgctgaagcatccaccataaaaacccagccaagaaagttaaaaaagaaaaaggaagaggcgagagagtgtttcttctttcagttgtgaaaagagctcataaaacgatcaaaacacgccagcccgggcccgggctttgttacctttgcgcctctcgcctcctctcgcccgaactctgcagatcccattcatgacgaagggcttcttccaaactgagagaaaaaagttttcaactttatggttccaaattttttcccccttgcagatccgggagagacggctaacacttttttcccccaacagccggtccaaggagatttgctgttgaataataacaaaggagagaggatacgtatttaaagaaaagaagtgattaatggttttctgtataattctcacatttttcttagctcttgtctacacagaatggctgtgaactttaagctccatagaaatcttttttttttaaattctattcataccttccaaagagcagctttgatttggttctttagagacattccttaggggggcatatgctttttaagaactattttccccctcaactggggctgcggcatccccttgcagctaaaccaccacaccgcaatccgaccgaaataaagctcgcccctctcatcctccaggtccacgatgatttttttacgagtctcccagcagcatttaaacggacagttcagcagctcttttgcggctggggacaccggcctgtcggttccccctgccctacccagcctccaactaccggagctgcaagctggaggaatgcaaaataaataacaataaaacgcgcgggtgggattggttctttttattttctgaaaggagatgggactgaaaaaacgacttttaattgcatatgctctcccgagccccgagctttttggagatgtggtggctgcaccctggatgaccaatagaccagagaccctgaggctggagcccccagaccttagaacttccaagcagtgctgcacaaaagcaatctgagcctgacagagcttctgagggtcacctgcacccctttcccctacccccactccattctaggggtgactgggacctcagagacagaaagctatttggtccccagtcatactttcgatactttctatgagaaagaaaatgaaaattaatactggagcaaggcttcacaaaagaggccatttgtcttcttgattatctatttgcttgtcagagtttgagctatggcactggctagcttctttgtaatataaaaatactctgaaaacctgcaaacacccagaaacatctgtgcaaaaaattatactcattaaagccttaaacacctcagaggaaagcgataccttcttatgctgcgaggaaagaggccagcctcatggaatcctctctcggaactttaataaccaaagagccttctgtctaaaaggagacagcttaaccgcattttatttgcttatgacaaataaatcacgatatgaaaggctttgccgtacttaagcctcttgtgtcctacaatgaaacattttcccccattagggactggaatcagccttcccagtcctttcaatccatttttggactgaagggaaaaaattaaaagccccaaaacaaaacacacccaccctaaaaggaaaacaaaccagccaccacaatttggagtcctctgagataaaaattcccatcagactctttgaaaaaaatcttcaaccacacacaatgtggggctgaacccagtagggtgcttaaaatatacactgggtggcatttgtccatatctttacgccaatgtttcaacaaaaacacgctgtgctggtcacaagaaaccaaacatttatttctattgtcactctgtacagcacacagatattcacacatacgaagggttctagactcaagcagccccagaggtaggaaggggcctggttttggaatgtcagaaagagaaaaggagagaggactcacatgacacaaaaaaatagtaataataatattatcaataataataataaacgatgcaacataataaactatgggagagggctctgcaacatcctcctcccagactgggaggggcacattttatttcctagtttcacattcattttcagtctaggagagaggcttctgctgtacaactctggactggcagagtagtgcccagctcccagaactcaactggcccctcaccctgccaagcatggcttggcttggcctttcagaggaaggccctcccgggtctctgagtctctctttttccttggactcaattttcctgctcactcctgagttgtcaaggccacccccttccctacttgctcccctcctctgttgcccacccccaaccccacggtggaagtgggtgagcagtcattctggccctcagtgaatgggcacgaaagatgagggagagtgtgtgtgtgttaccgtgaccaaaacactgcactatctggcagtcagagggtgctttcgctgggtatcgggagtgggggacaaagaaaggaaatccaggctgtcttccagcagcggcagtagcagaggcggaggcggccgagccgggcctcatttgttagcgggtgtcgaggtaatggtcgccaccgaggcccgtcttctcctcggcagaggaaacaagacagatgggcctggacctggcgtgattaaagatgaaacgtggatccatcttcgccaaagctgaaaacgaggagctgcagcctcctcctatttctctttctgtctttttctttcttccttct

SEQ ID NO: 1244124 - DNA, 4001 bp, Homo sapiens
ccaaagctgaaaacgaggagctgcagcctcctcctatttctctttctgtctttttctttcttccttcttcttgctttttctttttcttttttttaagaaagaaagcaagagatttgaatcttgcttctgggggggcctccccgtggccctctattgtcatttctataaataaagcttcccctccccctcttctgcgtttattcgtatataaagtgtgggggagggcagatagatttttccggggcccaggccccagggccccctcctgtccccccaccccatcccctgcactcactgcccacccccaccccgaggttcgtggctcccgcgtgcgggggcactagagcgcgcgggggcctccattgggccggccagggggccctccggctgagcctgccgcaccacccgagcggatcttggtgttgggcaacttgtggtcttttttccacttcatgcgccggttctggaaccagatcttgatctggcgctcggagaggcagagcgcgtgggcgatctccaccctccggcgccgtgtcaggtagcggttgtagtgaaattccttctccagctccaagacctgctggcgcgtgtaggcggtccgagagcgcttgggctccccgccggcgtaattggggtttactggacacacacggagagagggagaaagagaaagttttattgcccccgaaagagagagtcctttcttccagggaacacagcgtttccctccctccctctcccgccacctcttcttccttctgagggagagcggggaaaaacgaaaagggaagaatgcaagacccaagaatgagaaagagacctccaagttttggagggctgtgctgtgtccttgtttgggtgtgtggtggggaaggggggcgtgtgaggactcccccaaggttttaattgctcctctctccccctcagcttggggcccccagaatgggagaatgagggggtggaagagggaggggaggtttccctaaacctttcctctgtttagttcccacccttgctgctcagattccaagcagtgcctacccctactgaaaacttttgctcacttctccagccaaggagtcagactggaagaaaggaaaaaataaatactgggagttgactcaactctctgcttaaatacggattacctcctcctccttctcctcctccacctcctccacccctccccaacttccaacttcattaagactgtatctccctggcgaaaaagtcgctggtgagaatggtgaagaggatggggaacctacttcaaaggcgcagggcccaccaggccataaaaatttatgggggatgtaattatgtggctctgaaaacaggcgaccgtaaatctccggcaatggcgagtttatagcggggacaattggcttccccagctcaacccccccccaacccatgcctccgaagtccctttggtgtaaagctccaggggtgggagggggaaggggtgcccacgcactcacccgtgctcacgtgaactttgcgcatccaggggtagacgacgggctctttgcacgcggagtgggacgggctggggtgcagggggttctgggcgcagggaggcggcggggggctgctgctgaccgcctcgcagcgctggccgggctccgggaggagggccccggcgggtggcggcgcaggagcccgaggggacagaccgggcggtggcgggggcggcgggggtggtggcggaggcggcgggggcccagggtcccggcaggccgcgtagcgctgcacggtgcacgccgcgcgccgcccgaagcccgcctccggctggaagctgctctctcgcctctggccgccggcgtagtacccgggcgagtggtcgctgggtaggtaatcgctctgtgaatattcctcgcatggagggaacttggggtcgacatagtttgagttgatcaaaaaagaactcatagccattaatttctgggaattgcccacaaaatatactaaaatttattccgacccctgactcgttttcctgtttccgaaagccctcctacttactgtcaagtgaacaaagttaggcgcccacgtgatcctccgagccaatggccgccccgcctgcgattcccggataaggaaatctgctcacccggaccccactccagccaaagaggtttatttccccttcttcccttccccctccccacccacccacccaacaccaggatttacatagggctcctgcggggcgaccccctccttgcctcgctctctccgggatcagagagagagcgagagagagagcgcgcgcaggttgcgactggagggcctgttggggcgctaggcagagcgcaaaccctagatcccttaagaagttggggctcccggtgtagccctcctgttctgcctcacctctgcccagcattctgtaccttccaaaggccccagtctcctcccctcggcgggagggagcgctagcaccctgcgtctctatggggagttaggttactggcgggttgggggctccgtctcgaaaggggaacccatacgggggccagagcacagagcttggggcttttctctgcagctggatggggaagggtaggggtgagagaggaggcgtccagagctagagggcgggtgcgcagagggacttgtcagagatgaatggaaccgcgggcggatcgataggaaattcatgcactaattcggggagacttcgccttccaaatctcatttagctgcacggttagctagactgtgtccgtcagtccgtctgtcccccttctcctatccactcctccctttaacccacacggcccaagcctggagaaacgacttggtttcccacactatagacagagcgctggggtaaaaaaacctgcaacttttgagagcaaaattgattagcaatttgctaattccataaccacccgagcaatactaaccatgggtccgagacgttctaattgtcgccgcctccgcggcgaatagaaatctcacatccctttgatactggggatacagccatagaggtgacccacacagacaataacactccttggtaatcgagtatttccaggtcatcttgttctgaactgaaacggaaaggcggcctcagcatccgtttgttaaacaaatttcctttgccttcttcgcacactgaagacaagtcattttttttcgcaatttccaataaagcctccctgagcccagaatagaaaatgggtgcgtttgggacgagaagataaatttaaaacttcaacaacaataacattaacctcttaaagagatgtgaaaagggaccaaggctcccaggggcaggcgtggggagagttcaggtagatgatttctccatctctaaccagttgaaggaggaaaagatagaggaataaagaggaaggagtcttcgtgtggccagtcaccagactgtcctcattcagaaaaatactacatatacatatatatatatttttttcttctggaaaaataagagcggagtgtttatgtcaactacatattcccctagatacgaatttgtgaccacaaaattccttacacaaattcggatctacagggtatatacagaagacagacagatcttcttggcccagaaattttccagttctcctactttccgcgccttcttcgtttggggtgtggtttgagtgctttggttttatttcgttttgttctagttttgagctctgggaacagaaaaaggcagtgcgagtctgttcttgggattacaaggttttcaattctcctcttctattagaatttcaagtagccagttcgcaaagggacgagaaccttgcctccgccgccgccgcgcaactctcggtggcgcatgaattatgagatgtaaacattagctaagcacaaaaggaggaagggtcattctgaggctgccacgaagtcagattcaggcctttctgggtgccttcgcgcccctcccctccccccaggactttttttttttttttttttttagaaaaaacaaaaccccaatcggctcctccgtgcccctccaagcc

SEQ ID NO: 1244125 - DNA, 4001 bp, Homo sapiens
accccactgcggcactaccccacctcaactgctgccccttacagaagtttccagctgaaactcaaaatacagcgatcatctttttataaataagttagaacacagatggggaggggagagttcacattaaacatgcgaatttctttttttttttttcctgggggaaagactgcaaccacagacacaaacattcagaaacactggcggatttgggacaagcagaagggagttgggagcatggaaggaaaataataataataattattattaacaataataacaagataaccagtccaggagagagggagccacaggaagacctaagaccaaacgaaatatcgtaacacaaggcgaggcaggcttgtgggaaccggtccccagcgggcggcggcagagcggggaggattggaggggccagggctgggggtggcacgggctcttgggccgctgggctcctctgggcgggctcagggctggaaggcgctgccagctgtagccaggctcatacttttcaatttgttgtccttcttccacttcatgcgccggttctggaaccagatcttgatctggcgctcggacaggcagagtgcgtgggcgatctcgatgcgccgtcgccgggtcaggtagcggttgaagtggaactccttttccagctccagggtctggtagcgggtatacgcggtccgggcccttttcccgtccggcccggtcatatctggagcagatagaggaaagccgcaaggcaacattattccggttaagggagggggcactgggtgggagggggcgggggagcaggacccaggcgtcccggcacccagctcaccacagctccaatcctctctactccagatgcccacattcaagctcgatttctgcacccctttctactgcatcccccacttctgcaggcagccagtgcgcccggctttgtctcttgctcgctcctagtgcctcacccttggctgggctcaggcggccgctcgccccgggagggaggagagcggttgcacttttgccccggaaagctccttttactgttcaccccttctttgctagcgacagtctcaaaatttcaggggtaagcaggacccttccccacattatatgaaccccatcctttatcctaaagctggttcagctgcgctaataaaaacctaagccgaagctggaaacaaattattaaaaatacccccctcttaacagagagaccctttttggctctgtctacgaagctatgaggcccctcttagatacttctcccccttagaaaaatgaatctatatttagggtaaagccaagctctccttgtccccccgatcccaccccaaaacgcagagaaggaaagccgagaagacaaaaaagagagagagaattaccatggctgatgtgaagcttcctcatccaggggaatatttgcggagtctgcccctcgggcgcggctgtggaggtggccatgggctctggctgcgcccgagctaggctggggctgcttagctggcttgccgcttcctcaggctccgaggacgcgctggcctcgtctatttcggtgaaattggcgctggagctggctgaggtcgcctggtcggagggggacgaagcagagggcttggcgccgtggctgtcgccgttggtgcagggcagggactcgggcgaggacagggagcagctcgaagccgcttgcctgaagcggggctcctgggcgggcgcggggaaggcgcgcgagctctcgcccaccgccccaaagtggctggaggaggccgaggagcggttgacgctgaggtccatcccattgtaattgtagccgtaagagccggtgtgcatggcagcgggatccctgtaagagccgctcagagagctgccactgccataatttagcaactgatagtccgggccatttggataacgccccgagaaggagtttacaaagtacgagctcatttgggtgattttggagggcttgatttgtggatcgtggtcgttataaccctgtgcttcacgatttatgatgtattaatgaattatagcgatgcactgtacttcgttttgctatgtatgcggccaaatatggggggggggttggaaggggggtggggggcgttagggaatcacgtgcttttgttgaccagtcgtaaattctcgctgatgacctcaagaggtaattcatgctctatggttacaaataatgacgatccgagaatcgttagggccgattcaatgcgagcctccgagagagggggaaaaaaggagaagggggagaaacagagagaaggttggctttggcctctgagcagagcgcgccacctcccggcgaccgacgggagcgcgggcgtgagaccgccatggcggcgggcggctgcctccctgctggctccctgcaggctccctgcagtcgccgggagagaaagaaacccggccaaggctcagccacagggttgagccttttagagcaggggttgggctttttacccactttcttgtgggtggggttagcctctctatttggttctttctccctacatcatcattgtcgttattattttaactttggatgagaagatcaaagatagagttgcttttccctttcttgggctttgcaagtctccgaattggaggcggaaatgggggaagggttggaagttgtgtgtgaaaaacaattattgcaacgggttttccccaggagcttagtccggcctgcatcctggtggaactgctgttaccggtccacagcgcccaggccgagccggcagggctgggcgggaggcttgaaaaagaaggagaagcgttcacttctcctgggccacttggaagttcgaaatccccttccggacctccttggtggtccttagcccaggcgtggggagtgacagagcaggacagggaccccagaaaccgagcacagctggggctaagcggcctagttgccgaaaagactgcagcggccaccgcgtctgctgcttagtttgagtagtaacatgtgtctgagagtttgtaaagcgggatcccttcccctcctcctcggctattgcattcggaggccccactacaggtccctcactcgcagctaggcagtttgagaatttgcctggtggcagccgccttcccggaaaaggggttccaaggacccgcatgctttgctgagcacgctgggcggccagagaccgccgcagctggtctcctattaggaggggactattttctttaaaaataagaaaggaagcgagagggcggaggaataaaggaaaacagtgaccgcagcttgccttctgggtgccggtgcaagcagagagagaatgagccattctgggttgagaggatgacactaaaagccccatcacctggcctcctgccctggggtctccaaggagcaagggaaagttgtggccttcggcctgtgcctggctggtggctttacattcccctacttgaggctgatctcctacttgaggctgatctgctacttgaggtgggaaggggcacctggagccttcagctgcagggtgagagatacccagtggccccatttttcagtctccagagccacaggccaggagcggagggccaaggctggcgaaaaaacctggccatgtggacgggccaaagaccaggggtcgctgcgaaggtgaggacagaaaagcgctgcagaggcccccagactatggctccgtctccgccagagagctttaggggcctcagtggctcccttagtgctgtgtatacacgaggaaaggctagagaatgagagggacacagcacctctccatcccccaagtctgcacggggagaagcggctgtgagcctcagcaccagggaaacgcagcgctggggcctgggcaggactgatcgctccagcctttatctcagctgtaacttcccagtcgaacagggctcgcttcggcgggccagggctctcgcctttgctgaagaattctggctcaggaaagatggagaggctgggggttgaggagagaggaaaaaatggcaggggaggattggaggtg

SEQ ID NO: 1244126 - DNA, 4001 bp, Homo sapiens
ggcatctacctggggccacagagccgcctcttccgcgccacaagtggcagcgtcgtccctctcctagcttaggactgagataataaatatatccccacttccaaaacgccccagaccctgtaactccggggcaaccagaggcccgaggctgaatgtcctgcatctggtcttaagaaagagaaaagcaatcacatgttcgtgcaaaccagactaaaaatcacaatttctcctgccctccacagccaacatcacttatctcttggctggaagcttccccagaagctcccttaccccatttttaagtccttgcctcaaggctggcacctacttccaccccacgagctactttaggaatctctgtcacctgcccaatgttctccgccctccccaccccctagaaggcctgactgagggataaaattggacacccgagggacgggactgtctgagctcagtgccagttagcttttcagtttagacgccgctaggtcccataattggattttctttttattttcttctttcatttctttctcttttatttttatttacaagcctaaaacaaaaaggcacttaacagcttcttcacaatcaccatgtctggacccaggaaagtttgaaatgttatcatatcagacacacacatggcaattttttcctccaccgaaatccacacatcccataccaatacaacgcaagtaatagaatcagtatcacgcagaaaccaacagctgtaacctaccgcattaaaaccacaaaactgtctccctgtagagcgaggctccctcctgcgggagtggcgagatacttgggcattctcgggcaggcttcctggtgaggggggagtctccctcatttttggtgtttccacccacagccctttaatttcaaaaatgtctccgaagggagatagtaaacatttctctgtaaattgtcttttctgtgtttctctagccgtttcctctccctcgccggcctcggcggagattccaggccctatagaaaccaggacgtcccttagcgccaccgcctcacatgccagtgctgccgggaacccagcgatatccgcaccaggcaagagaactgcgctggggcaatagccagaggccgagacaagggagggatggcaggagggggaggggcaagcccgcggaggccagaaccactggcttctttgggtgccactgaagcccagataccccccatcctctctttcgcaccccccttgcttgagtctctcctccaagcttaaaaaggcgacttagagctggtctcctggccctcttttgattcctcttcccgctttccctgccttggctccccctccaggaagcagccacccatatctccaccactgaatttcctgggaagcttctccctgcagcgcccagaggtggggttcagccccgtcttggaacgggggaggagggagaaaaacccaagccccacccccaccctacaaaagcgatgcaaaagaacaagaagaaaattgtagaatctcccttacctttgcagaccttgggattttttccccctccggatttaaaggaatgggtggggaggaaggaaggagtattcagtttcttcttcagcttccagataatattgtcccaacgtgagagccgttgcttccccttctctgacttgggagagagggtgtttcatttttctgacatttgcatagaaaatggagtaagttctggctttgaaaaatagtatcgggctgcagtcctgggcagattgtccatttaccctccatggtgactaaaatcccagatcagtgagcaaattaacttaggaatcaaaattatttttggttctctctttgtgtaattcccacccctccttctctccctctccctctcgcgctctctctcttttctcctcacccccctctctcgtcctctctctcttttgctctatcgagctgatactgaagtacaaaaatatcaagaggctggagccctgaaggacgacagtgctccgacctaggtgtggtgtccaaaagaatgctgcattataaccaccagggaaatgataaaaagttcatgttcacgatcgcccggccacatgaccggcgccggccaatcgctggattcaaccactcataaacttctatcacaaagttgtaaattttcataaaacaacaaggaatttattgcatttcttcatggctgctccaccagcaacccttttctcagtcgccatcttcttttcttctccttctctctttttggggaaaccccaatctgagaaggggtgagatttgggggggcaggaaatcagagtgcaaaagccataacggtacagctgggaagggggttcttttccgaacctccccactctccacaggagctctgctccctcttctagtaaaggtctaccccaaatcctctgcatagggactgttctgagacaattttggggtgaggcaggagcaggaaacggtgtctagagttgccacctgcataagggcaaaatgaaagcttcagtgtcccctctccccctctgaactggccccctcattcctagccctgtagacagcaggacccccacctgtgaggcttgcagcattgcaggcgtgggggccttagattccctagggcttagtttttgccccaggaggaaaagtggcctggatgggggccaaggcagatagtctgacaacctgattctcgcctccggaacccagaaactgggggagggtaaagccggatcctggcttctcccgcccaaatgcaggcaagtccaggtttcctatgacagctccatgcgctctccagggcgttacgtggtcattaatgggggaaactgcaggtttaaaagcattttacatacaaattcaaattcaacagattatcctaaaaccaaccctcttccctctttctatccaaagtctgtttaaatttaaacaatccagagtttataatcgaataaatgctaaaaatcaattcagcgggtctagccgcatagacaccatcctccaagttttggtcctgcaatcagcggatgtttggaagcaaaaaataaaataaaaattcagcccaggtttttcaggtcccctgaaataaccccgtatttcaagttgacctaccaatgcccgaattctggaaacgaaataacctcccccaacattttcccccctctctctctgtgcagcggagaaggttccaggctgccggcggcggcgcagagagcgggaagagaggctcggaggaagccccgggcgtggcgtggtcaggctccgagagcggccgggatgcggccacaccggcctggtaaactcgcacctcttaggatcttgctcccggactcattcccttccccaccccctattttaaagttttatttgggtcgtctgtatcaatttagaacgagataaattaagacaaagaaagtaaaataaatcgaaataaaatataggaatagctcttggcgaaaatgtttgccgtgcgagcaggaagccgtgagcgccctagttggaggctgctctgcgccgactaagaggcctctactcccaggcctggcctctacgcaacgccacccaagaagccagagtgaatttgggtgttcattttccctttccttccgctcttccttcatgtggggcctagcagcttggatttcagctccgtctttgtgcctgggctgcagcccagatccagatcccgcagcttggtttccaggcctgaatgaggacgcgggtttgtgaaactgtgaggtttttgttttgttgttttgtgagcttgtgtgactaagcatgtgggcttctgagtgcgtttacttgggggcaaatgtgaatctgtgtttataagccaatgtgtgaatgtacgttggtatcaatgtgtctgtgagtgtgaatgtgtgtttacttgtgagcgtgtgtgaacatgaatgcctatgttctgggcgtgaagctggtattacgtgaatgcctgtatgtttgttaacatatgggtatgagtgtctctttgtgactgtgacagtgtgtatgtttgatg

SEQ ID NO: 1244127 - DNA, 4001 bp, Homo sapiens
ctgatgattcttttccagtgagtggctaagcttcagccagggccaggctgtcctgcttgcctgcttgcctagacagcccagctctctaaagcaatccttgggcctccaggaatgcacaggggaaaaggagagacagcagcctgggataggatggaacatggagtatctgggtggtggggactgaagggtagaggggaacttctgcattaggaccagaacctgaggagactttaaagaggtgctgatgtcagccctcctgggaaggagacaagggaggaggggctaggggccctagtttcaagtcagataaaagccaagctgaaatgctgatgagcagaaaaaatggggctttgataaatcaactggaaaggcagttaaactatggagcaggtaatgggacctataaccactaatactgatggtatgagagctgggctgcttctggcccctgaccattgctgggttgggtgcctctgaccatgagtcttgggtcttctggactttggggctagcccctaagttcgtctgctttggaacagtgcagaaaaggatgtctgggtcagactcggcagggaccccatggaacctcagcctcttggggttctgcagcagctggctaggtgaactgcactctctaatttttgaattggctccagagagtcctagcccctcccccaagaaaagggtcacttatctggaatgacacctccaaacttggccagttctttaggggttcctaggagccctaggaagagcacctcaggaagccagctgcactcccatgaagcctctgcccctttctagttctcctgttccactcccccacccaggttcactgggatcaggaggatcatctcctttggcctcagccccctccctccacctgcctctctagctctgtgtccctggctgggtccttttctcctcccgccaggcctctagagcccacctctaattgtcctgatgggaataatgggggagcggggttggctggagaggaagggggaggggagaattgcttagcgctatggccccctcccccataccttatccgagtggggcagggggacacacccagggctgagatccttagctgggaaggggggagaagggggagaccctaatggctattctctgcaaacaccggccttcctccgcaagacaaacggcctcgtctccagcccgtgccggcgctgctgataaatatttaaagctaaaaggccgagaggaagggtgggggcgggctgggggctcgcagcgccgtggtgccggcgaagagagatccgccgggaagcagagcgagcctgagagcaccgagcaaatatgggggcggggatggcctgctgggtcgcggcccagtgggtgcagccttccagggccgacctccggctgggagcactctggacgcggaaaggggcgcccagccgggaaggaggcgccttcagggtaatgtgccccggcccctggggctcaggacagctcggtgcgcggcgttacctgagcttcgcatccaggggtagatccggaagttactctcggccgccaagtccgagtccctctgctccttggcgcccgccgccttggcggagtcgccgggacacaccccggagaggttctgctcaaagggcgcgcagtgcatgttgaaggaactcggctcgagcccatagccggccgcgtagacgccggccgcgctctggcccgccatgccccccccgccggggtacaagccctgcatcgaggcggcgaaggaagcgcccgaacccgctccatagcccgggcgctgggggttggaagcaaacgcacaagaagtttgttctgggaaggctccggtagcgaaaaccgaacttgaggctggatatttagaaaataaagtattcgcataatacaatgaactcataatttggccggatgatttgtaggcagggacgttttagtgtcggttttacgagattccttgatatattacagaattagagtccagatttacaccaaaaaggaccccctttttcctctccggaccacgtgaccccgcccacgtgacgtcccctccgccaatggccgggccgtctccccacggctcccggtaatgtggaaaaaattgtgtggcgttggatttataaaatatgatcaataatgaatgggaaagccgagccctgtggattggggctgggggctcaagggccgctgccgactcccgcgggctggaggccgcttgcaggcgagatttggggaggaagagattgagtggaagggaaaataaataacctcggggcgatccgtgtcaccctccacccatcctcttcagcccgttaccgagcgagagacaaacgcagggattgaatgcacgcaactgggtgggtgggtgcttggggcaggtctgttctttattaaaccaggccaattctgcacggcaaggccttttggggaagttggtccggttctcccaagacgaggaatgaggcgagcctggctcacgactctgtctctcttggtgccccagatatgcgggcggagatggagcaagtcttcctaggtgctcctagggcacaggatccagcccacgggccttggacgctgccgtttctggtggcaaaaaaaaaaagaaagaaagaaagaaaaagaaaaaaaaaggtttgaaagtaaaagaaaaagggggttgggagggtggggagagaaaggaagggtggaggttggcccgggcgcgctgctctcccggttcccggaggcggatgcctcagtggagcgtgactaccagagaagcagaggcagcgaaggaaggaaggcagagagccatggcctcagaacagagcgaaggtggccaagtccctgagagggagaggcagggaagagcggtctcccttctcctcctgctcccccaacaacaacagtccgagggaaaaaaagtatgctcagcaggcctgcactccacctttatgcctgccccccaccccacctcccgacacacatcttgggaggacacacagcaaaacaaagagggaggtggcgggggacacagccaccagcccagccgcaggtctccagcgtggcctgggcgccctggcctccctggccgggcagcctcggaacgcgagaggagggggtttctcttggctcccctccctcgtttttctctcctccaatcaggctcagccgcctccctcacccccagcgcccctgggccgagggactcgcaccacctgcctccagcccccgccccctcctctctgcagcctagcctcagcaggcgcaggagcccggtgacaggctccccaccggctctgcaaggcacccgggagcaaatgaggagcgctggccgggccagtctcgggttctcgcttgtaaactttattgtaactcttccgcccttttcaggcgcagacaacagaacaaagtatagaggaacaacaaaatatataattagccctccctcccccccataaagcaattcacggatacagaatacattctcttcacagtaaacctaagaacacttgtaacaattgcccacagcgcgcatgctaactaaagtaacctcttttgagaaacacttaagacaaaattgtcaaaccaaagggggtgggtggaggaggaaaagagagaagccagagagaaagccagcgagctggggggttgcagaggggagagaggattgggaggggaaatgaggacgcagcgagagagagcgagagcgagagcgagcgagcgagagagagagagagaagggagacagaaagaattacggcgtgaataggcagtttcatgttgttgggagaacttagcagaaatcggtaccttggtcattacaaagaagcacgttcaaaggaaaaaaaagacaattgcacaaggaggctttttacacggggaggggaggggcatggggggctcagccgggcctttgccgctcgccctcacagggcgagggagcctttgcttaaatccttttctttccccccggcccccaagagaagggaaggagatccacggtagctcacacacagaag

SEQ ID NO: 1244128 - DNA, 4001 bp, Homo sapiens
agggagcctttgcttaaatccttttctttccccccggcccccaagagaagggaaggagatccacggtagctcacacacagaagctattacgagatactaccactagcggggactggcgcggcgggggacgctgcggtgggaggcccggctcctggccccgctagcggggccagagctctctcgggcaggggcgcgcggcggcggcgcggccgggacccgcggacgtgcgggcggccgcggccctggcagtcccagctgaagcctacttcttgtcgcccttctgcgcgtcgccctcgtccgccgcctctggggcccgctccagcttctgtttctccagctcctcctgctcgcatttgctgctggggaacttgtctttgttgttctcttttttccacttcatcctccggttctggaaccagattttgacctgtctctctgtcagtcccagggcgtgcgatacctcgattcgccgcttacgagtcagatagggattaaataggaactccttctccagctccagggtctggtagcggctgtaggtctgtcggcctcgcctgcgtccggcggctgctgggaatgggggaaagggcgagacagaggggaggggagggtgggggagggggcagggacggagaaggttggaagattcgtgaacgagcctgggagaccattataataagggcaggggaccttctaccccgtgcgggggcggggggggcgcaagaaggccgcggtcggcggaggaggaggggcgagggggattagacacaagtgaatctaagggagccagaaaggggagccccctcccccggtaaccagcaccagagttgtgtaggaggtggttcagatctattagaagtgccataaactttaggaggaaggatgtgaaggaggggggaaaataagaataaaaaagccgggtggggacgaatggacccaccttgaaaagcccccagagcctctgccccagaagaaaagtttcttcagggtaattaaactataaagcaattgagaagtgcaaaagttgagcgcccccactcccaccaccctctcttcactaccccccataaaacagtaaaaggggaaaaaaaggaggagaagaagaagaaaagtaaggcaggatgaggggtttatagattcaggaaatgtttctaagcgacccccttcaagggaaagaaaaaagaaagaagaaagaaagataagaaagaaaggggaaaagcggcaggcgatcggaacggagccggcaagtcttccagaagctggaggaaatgcgccccggcctgccaggccttgggcccttccggccccctcctgcccttgtcggccccgaggcgagctcaccttgcgggcgcatccaggggaagagctgtgtgggcgacgggctctgctcggagccctcggcctcctcgcccaggccgctggcggcggcaagcttgcagtctgcgtactgcaccaggtctggatcctgcgcaccgaataggctctggcgttgcagcgggtcgtagccgtagaaattgccggggtccccgtggcacgccacggcgcacgggttctgctggtagggagccgtggacagcgacgacggcccgtggtagaactcctggatttgcgacgggtgctggaagctgccgccgctgctgggaccgtacaccacggtgggtcggccgcccaggtcctgggcgaagccgcagtcataataattggggcgcagggactccccggttttgtatttggagaacagtgagttgacgaaataagagctcattttattgaattttgaggcggcggcggcggcggaggctatagttgggggctgttggggagggggtggggagggggaaagggagggagagagagaaaaaaacgcggattcgccggctcctagtcaccctcgccaggaaaggagagggaaagagaggagggaaaaaaagaaaagaaagaaaaggcgaagaagatctcgaagccgacacactttttgtggtttccaggaatagaaaaggacagagaagcctccaaaagtctaagcttgcatggcagccgcggctcgctcgccctccccccaccccccaccccccaaacaaaaatataccaccacttaaagaggtcctcgctttacatttcgaagaagggatgccagttcataaacagttttcggtgatttacttccctgcaaatgagttgtttcatattttgcactgtcttttcatgatcatttgcatccattagagaccccgcatcctattggcttcttcgtactcctcccggacagaacgcagagcgagggtgagagcgagagagagcgagcgagagagagagctagagcgagagagcgccagggagtgaggagagagcggaaaaaaaaaaaggaggggaagaaaaaaacacccagggagagagagggggagagggggagagagagggggagagggagagggggtgagagagaatgaatacggattaaatctgtttaactacctacattaatgagatatctctcgcctcacaacaaatcaaataccttcgcagaccacccccaaagactgatgtgggggagtcacggaaaaaaacacgcacacacacatacacaacgcgccaggcgtaggcacgctgttaatttcgcgattttaacgaggcaattggagtctttctaaatgtcagggtcgcttcggaaaaatgtaaaagaacacggtttaattgcgccgagttttaaaaggtcctataaatgtaattggtattttaatacaagttatcaaatcatacagcttcctctcctaaacgtattttcaaacaaacgaggtagtcatatttaaagctttaatgatcaatttccttattattgataaaggtttaactatcgtgtggagggaattggctggataaccggccccccaaaaaacggctgtaaactctttaagaaactataaaacgcaataaagccggagtctgttgttgtttatgccgcagcgcataaaagctgttagcattttacgagttctttcctctacagctataaaactgcagcttcgatcgcccccgccgcccgattgcagcacggtgggggtgacgaagccgaaatgagaatgattatggggatttttttttggcacaaacggtgacttttctgagattttcacctccttccgtcctggcaagcacctgcccccaccccttctctggagcccccaaaaggtcccttctctgccctgccctctctgccctgccctggccagtcacaaaacttcctctcattaaacaaataagcaaaaattttctgtgaaacagggatctgggagatcttgaggagggaacgggagggaagaagaaactttctggttaatgagcagtggttgaagcacagagcaaagttcgagctgccactgccgattctgcaggtttgtgcactctctgcttgctgaaaagggggtctcctgaaggcccttcagcccatcagcacttttgagggcagactttgcatgaagggagagggcctgatgccatcagagggatgaagccccaatgggctacccgacacttgcacccaggccttgggacccagtagccaagcccaattattaatagctcccaaccttcccaggccgacccccacaccttctgcagtgcctaagggtgagaggggaccactgagcccatcactgcatcaaaaggaaagaaggttgggtatcaggccctggcacctggccttcgtgtccgctgtcctatgctctcagccaccctaggcagtgcctgcagagtatgtgttgggagggcatctattagtcctcagtgtccccaagaccttttgagccactgtcaccacctaaactgacttgggtgtggaattcagataaagcaaggttgctgagtctcccattttctctcctttcgccttggggagcctgtagttaaacctggctctccctgcagacctgggaaccagaggtctgaacacggaaagctggaacaagctgactgggtgccacactctgtggccactgcgttcc

SEQ ID NO: 1244129 - DNA, 4001 bp, Homo sapiens
ttccctaaatgccagctcttaggattccacctggcaggttggaggtgacaggaccctgcaaggaatggggctgctctttactctccagcaggcaaggatgctctaaagggccctggggccactccgtcaatgggaaatctagcagggcaaggagagactaaaacatccctacttcccaaaaagagtaagaaacgaggacctgatccaccagcctgcgagtcattgtttgaggctgagttccctcaccgatgagcccttctcaaccttaaaaataaataataggagaaccctctcttctcatctagtagcacctcctgaaaatcagccagacttggcgttctggccggggtgcttttgaggagtgggaggtgacgggaaactacccacaaagggtaaagttctccgcctctctgcaactctctcttccccccacccctcctctccccggggtcccttcgagatgccccgatattcggaagcgattccccgactccccaagaggcggacagcccgggctggggctcgggagccccgcagagagcagcgggggaccgcagaaaaggaagcggtagcccctgcgaggacgccgaggaggagaggggccaccggagggaaggctcccggggaggggccggcgcatccggggagggggctcagtcaccgcgtcctgggcttcccccgcccctcctgtcgccggttgcggactctgcgcggctacagcgcgagatctgctaggaacaatcctccgccaagctgttgcatcgcaaataaaatcctaatgagctccctcccccttccccttggccggcttttacggtctgcgcgtggcgcggggagctctgccagccgcacggccccgggcagcccagtgcgctccggcccttgccctcgccggctctcggcctcgctggccgctggccccggcccccgccagctcctctcccggccgtcgccggtctctggccgggctttcagctggggcctccgggagagagggggaaagagggccgagagagctgcaagtcgatccccgagcccctgttccccgcaggacttggagaagtgggggcagcgctcctctggcggcctcagtctccccttctagagcacgcagctttccccttccctccgtctttccttcctctcccctcctcctcccggcccgctctccggccaccgccgcagtttcccttcacattgtccgcagtttattgcctttcccctccccgcccccctcctggccttcggcctgggtatttcctcactttttataacttactttgatccggcctctctttgtcctcgcttccttcgcaaattttattgtccccgtagccgggtctttgattagacagcacggcctccctgcccgccgaagtttccaaactgtactcgggcgtgccctgtttgagcagctccccaggcgcgcccagcagcggctccgccttcaccgccgcctggccctgccccggggccgcttcgccgcgcggcgccggctccagccaggtgcggaggtacctgctctcggccggcgggacgccctggggctggatgtaagggtggtagacggacggcaggctcccggacgcgtgcgggctcagcggcgcccaggaggcgccgaacaccggcgctttgggctggaagctgcacgaggggaactccaggtgctccgcgtggcccggctgccgcgagctcgcgtactggccagaaggaaacttggctggaggcgcgtcctcactctcgtgacttatgatcgagtcgacataatagctgctaagcgtcccagaaatggacattctcagacattatccgggcgcttgcagggggaagggaagcgctcgcgcggcggcgcccaagcagggagaggtggcacccggaccggtgtgagggctttcggacgcgacccccccagccccccaccctcccacccccaccccctgctcaacttctcagccaacaaagtacagtggagcagcccgtctcagctctccttgcaaaatgattggtcaaagtttttccgactgcctgataaagcgtcagctccgacataaatcaatcgggcgagggggctgcgctctcgctgtcatccgtccgcaccgcactccatatcgaggatggattgttttatgctgatgcaatgtgctatcacgtcagggctccggcggccacgtaacctcagccccagctaccggccgcccggtccccccctcccgctgcaggaaggggggcagttctcaacatggggcggcgggggcggaggagaggcggagggaagcggcgggctgccttgggagggacgcaggctgtagagccctctccccaggcgggtcggggagggagggagagcaagggcggagggagggagagagccccagcccggggagaagccatagaggcccgagaggatactggaagaggaggtgctcctgtccccccacacacacctccaccccgcaggccctcatttcctcttctctttccccttgacaaaagatgtttattaaacaacaacagcagcagcaatccacaggagatgaagtaaaatgatgaggggaaaagttggggattttaggacgttgtccgctttggagggggctctccttgcactctttgtagagatttacatgactgcgagcttccctgggcccctcagtagctgagggaggaggagagaggtgaataaaacgactgagtgtccaagaatccactatctgtcctgaaattagaaactacttgaggttaaagggatccatcaggtcccggaaacgtgagcctaggaaagagtttaatacaaggaaccagagcgcctttacatttattgggcctttctctgactctggccagaaggatggatttaagatggtggtggtgacgtggggggtgggggtgagggaagccatttctccttttctccactgaataaccacccaggcccctaaatttgccctgatgagggagctaaataggagaaagggttaaggccactttcctgaggtgtgaccagagcagaggcctgggaaaggatccccagtcagcaagggaaggggtcccaagttatctccccttccatccaaagaggaaggagcctgggctgagttttcagccctcctgtactactcctctcacctgaggctcctgctctggagatttccaaacaccgatataggggccagtgtggacagcgagcccatggtcagtctcttcccctcactgccttaccccctgcagaccccttcattggagcttccaaatagccctttttatatatatctattctgtggccctgcacagggactcccccggggcccaccgactggcttcctcgctcctctcccagcccctgctcctcagcttctgccctggttgcagtcgcctctcctggcacttggggaggtgtgacccctggacagacccagttctcctctggttaggctcaggggtagattggggtggatttctcggcaactctctgactctgagtcctaataaggcaggctgccctcagtccggtccttttagcaaaagaggggccactctaacttgagtccgtatctttttggccacctacccctctgccttgtagaaggctgcggatcacctcccacacaggcacacactcccacccgcttgtctttccaaatgaagccatctcgtgtcattacacgtgaaatacgagggtgaagcgccatatttcttcacattatggcgatttcaaaatgattttttaaagatcaatgccggcgcccatctggccccctcctttcccacccctgctctccgagggtgacagcccggcagatccgtaaccaaacagcatgaaggtctgccttttccataggacccaagtggggaaacaaaaatccgatgcaaattcttccaagcagaggttggacgcttgggaaagtcgagggagctccccggactcaccagcgaaaaagctgggcactgagcgaatgaatcacagttaaggcaaagcacctgttctcaatttgccagcccta

SEQ ID NO: 1244130 - DNA, 4001 bp, Homo sapiens
tgccaagcgtcctttaaaatacagtgcctggttgctttcccttgctcagacagacatatattttccaaactacccagattctctggttcttgacacttttactaagtctctatattacttcccacctaggacaactatctggcaaaaggtcaaggtaaataaatacctgatggtaaagactgtgttaaccacaaagaactttccaaaagataaagaatgaaaacgggcttccttgggaaggagaaggcaatctattaattgttgaacaggtttctaatttagaagagactttttttttttcctttagttaaatacatgaatactttcgcagagcaggagaaagagaccagactggctatttgctggcaagggattcccaaggatgaaaattatgaaggccagaatttccctcccactctctccttcaacatccacttcccaggaaggagaaggcggagagggaagaaagacccttgacgacccttcgccttctgcatgaagtggggaggagggcgaactgggggtcaccgagggctcctccacgtctttcccagcccaggacccccggatccttcagccccagcccgggcccgccccgctcaccggtaccaggcgaggcccttgtcgtagctgcggtcgaagaagtggggctcggcgcccacggcgcgcacgtcggggtgcacgcgcaggaactccagcagcgcccgcgtgccgcccttcttcactccgatgatgatggcctgcggcagctgcttgctgccttcgtccaggagcagcgccagggtccccggcggggcctcggccacggtgcttccggccccggagccgcccggaccccctgacaggccaggggactcttcttcccaggccgcctcctcgccgtcgtcgcggggcgcgggcggccggcgcctccgccactgcggcagttgcaggaggcgctttctctgtgccgccgccggccacaccgccagctccctcgggcctccggccaggacgccgccaccaggggcccccgcctcctcgccgccgccggacagccccacgacggggccggacagggtctggcagcgctcggccaggcagtagaagacgtaaagggacgtgagcagggagcagagcatcagcaagaacttccggaagatgctgcgggacagcggctcggccgaggtggagagggcactggccgggcccggaggggccatcctagccggaggcgacgtcgggcaacgcgccggccatgctaggcctggaccccgacaggtgccagagcatccccccggcgggccagcgcgctggacggaggccacatcgccgtgcgcccctgtggccgtgcgaactgtcccgggaggcagcggccggggctccgcggggaaacggaatcccgggggccccgcgcaggatccctgcctccagtcgagggagcgggaaggggaacgcgggtccgtgcttaagaaaccatcgtcttagactcgcccaagtcctgagcttggggcagccttggcccctcggttccccgcaagagtcgccggaatcggggtcttggcagcggtgtcgaaggcgtgcgtctcagccccggccccgagagacttctcggcgcggatctccgctcagcgatcctgcatcactggctcggtccccgtgagggcacgcgcggctgccgggcctctgcgctccgtgcgctccagacagtggcgagcgacagtgacttccagccccggctttctctggtccccttgcccgcctgggcgcgttctctccgcccgagttcaggttctctcagccaaggagcgaggtccccccgagtccctctgcccgagcgggagacaggaggcccgtgcagagccgtccacccctctccgtagcgccgggttgctccaaactgctcttggaccccacctgtgagccgcgtggctgggctgggctgggctgcgcgggacctgtcagcggcccccgccactctgctcgcaggcgctcaccggctgcctcctgggccgccgctggccgccgccacacgtgggacgccgagggcagcaaacttgctggtgacgtcaaaggcccgggccggaccagcccccggacgagcgcagcggggcgcggaccagcggccaggcggggccagacgggcggggtgggatggagaaaaggtggcgcgggctccgcagcagccgcccaatggcactggagagggcgggggcggcaggggcgacgccccttccccagtgtcccccattcctccccgcggcttcgcccccttccagtggatccggtgtctgcggcggctccggggttgcctgagtgacagctaaggccggccggatctctgggggcctgacttccacccaagacgccactagcttggtgaggggccccagagctctccaccgcagctcagccctccgcagccctgaccctccctctccaggttccccgcgctctgctcccctcttggcactgttgccctatccttccccatcccactgctttccatcgcctggaacctactcctcgtccccttggaagttttgtttgcagcagttcccagtactgcgctgcacgccacgcccccgtttgtctggagcaaaccgaattcctctgcagcagcttggacttctacctactcaactgtctgctgcgggtcttggagcaaagctctttctcgtatcagtctgttttttgtttgtttgttttcttttcttttcttattttgattgttttcccttggatttgtataagatgatacagtcctccagggcctagaaaggaacaacctcttacgaaaaaaaaaaaaaccaatgcataaatcaaaggcaaaattaaaatttaaaaaaaattcaactccgattccaagtccctatgcccaatttttaatgtagtgtgtatttccttaatgttgtttgtacttttgtgtgtgtgtgtgtgtgtgtgtgtgtgtgcgcgcgcgcgcatgcacgctcgcaaagaggttaaatgtcctttcataaactgcggtttcctctttcccttgcctcccctgaccctatatcctcttcgtgcgctccccggagagcaggtcaggaagggatacaaaccgccttgctgtctaatggagggaggtggcccgtggaagctgcatgaggtggttttttgttctaatcctatttgttccttattttttggcttccttgcctccacaggttgcctcaccatgtgggcggtagcttgggagcttcttaccagcccctgcaagctgtggaggcagctttctgggacctctgcgggtgctaacaagggcccaccgcaggctcaaggtccacggtgcaggaaacttaccaggcatttctgcgtccccatgcaggaacttcgcagcctttctgtgctctatttgaccacggaagtggaagtcagcttccactttttcagcttccaaggggcacctagtggttctaactctgggcttgcatggatccatgaatttgtgccctgctagataaatactcactgctggatatggtttatggttttatgtttatgaactaccaatcccaactgattcgacaaccagtgaagagctttttagattctgatgccgtaaagcgctgggcgtttacgaggatggacaagccctgccaagctgtaatgtccttttgtgttctaaaattggatattgacaaaccagttgagatctaatgctaacttaaactttcctgtgttttcacattttttccctaagtacttcagtcagatttgcagaaggaagacaacaaaacaaagaccatttttaagttgttttgaaggcatgcagtcccgtgaatgcttataaacatgccccagtttcctggactggaaaatgatggactcgaagttcccttctagctccaacatgacatcatagcatgtgtttagtctttcactttctgagcacaggtctttcctttacgtgggtattaaagatgctcgatgtaggaaacatggttctcaccatcacttgcatgacatgtagggcagctctgcactttagaagc

SEQ ID NO: 1244131 - DNA, 4001 bp, Homo sapiens
accccaacgaaaatgtgggggtcgttacctgggcccctagtcgaagacagttatcggaggccgaaatctagacctcctgcccactcgcgccttacccgaagctcgggcaacccaacagctcaccccaaagaccagcagctgcggaaagcagtgggcagaggtagtgattgtgaccccggggccactgtccctttggaacctgacccgcaacccgactcgagaacagaatttccggaagccgcgacctcgaagcaaccctcatttctcaatcaatgggccccgaatattctttgctccggacgtgtaaaagccccgcggagacacgcgtccttgctttccctatcccagcaccgagggcagggaggcggaaacgggcggcggtgcccggaggcccggacgccttcaaagcctcgcgccgctccagccggttgcagtgcgcgcctttgcccgacagggaccagcacagctccacgctccgcgcgccgcccgcccgccaggcggaggcgccgggccacccgcccggctcaccctcccgagcccaggcggctcgcgagcgaggcgggtctgacacccttggggttccggtaaccaggcggactgtaacaaaaagttaacagactctgcggcctcgccgggacgccgcggcccccaccccctctccccatctgggaagcagaagctgctctagaagttccttgagggcggagaccgaccaaaggggctcagaacattcccagcgtctcgggctccgggaggaaaaaatttaaaacgagtcataaaatacgattcgagtcggatacccccatggttagagggtggctcgctttgctgagggcggtctcagtcgctgcccttcttctttgcggcgaggtcgcctgatgaattcaagggcaccagtgctccgcgagaactttctgtgggttgtgacgagaaccaagcggagcgcaaccctcaccgcacccggacaggatgcgctgcgcaatctgccgtagtttccctgccctaccccgggtggtccgaagctgtaaccctgccaattccctatcatacgccatgtctcccttagctcagggtctgaatcgacgatggagaccctgcccctggcagggaaactcaccggtaccaagcgaggcccttgtcgtagctgcgatcgaagaaatggggctcggcgcccacggcgcgcacgtcggggtgcacgcgcagaaactccagcagcgcccgcgtgccgcccttcttcacgccgatgatgatggcctgcggcagctgcttgctcccagacccactgaaaaagctggagatggggcttggggagtccggcacctcgggactctgctcctccgggctcgcagcgccctcggccatctccttgcctgaagccagtggggtggctggcggcgcccggaacggcagcctggggggcgtcccgtccggagctgtggccagggctggcgggtcgtgtgcggcgcgggacccagagcccaggagcagcagccccggcgcggcggcgcaggagccggcgcacgagtacaggaacatatagagccagacgcagagcatggcgaagagcagcgcgagcttcctcctcaccggcggcgggggcggcggcggctgcggtaggagccggccggggacatcgaggcaagatctgccgccactcaggcgctgccccatgcgctgcccgcgggcgcggccagggacatggctcagcacatggcgtgggtcccgccgggcagtgagcgcagagagggttccccggcacgctggacgcccgggtggctcggtttattgcccccgtgtgcccgcggccgccgctgctgctgctgctcttccccaggtggcggcggcagctgtagcggcggcggctcttgacatgttgcccggcaggagctgcaactggaacggaaagtcgggacggcggtaactgctgggcgagggtctgctcccggggcgcgacgacgcgctcggggccaggaggacgttgcactctcgcgccctggccactctagactgtgcgcaccgccgcacgccggggctgcctccttgcagtcctaagaactgagcctcgagcagccccggcacttccccgcagaggctgcagaggcgaactgcgcaggaagagagctgtggaccgaggtggagtgggcggtcccggccttccagagtgacgggctgctctacctaccaaaaaccccgaacgccatgcaaatacaggcgcttctccgagagctcagcagccaacccgctcccaggacgagggggtgtggaaaggcttctgggcggtgtagggcggtcaggggttgctattggcttcggaacaaggggcgggcccaaaggggcggagttaggggctggtgacaggagcagatggtgggaagaatgctgcagtgacctagcgctgggagaggtcctaccctactgagtggtgcgctcccacacccgcacgcatttccgcactcgttccctagaagccagccttggcggtagttgcccagatgttgggacaccagtccccatccagatgtttcgcaggaggtttcgtgatgcttacgtgttgcagagtagggaggcggttggaggagggagagcagggtaggagatgcactaggcactggaaccccccccccaacccacgccggggactcattcggagacccttctgggacaggcacgggattaggaagtttaagtagaaaggatgtttggaaatcgctgtcgtgtgtgtgtgtgtgtgtgtgtgtgtgtgtgtgtgtgtgtgtctttccttcttattctttgccaggttagcttggcctgccggttaactgagattagtgtaaagtgtccttaacaaaaatctccagccttccaaactgccgaaagtaggttggggaggggaaaagagacaggagaaattaccaggaagagagtctggtaaacaaaagtttcctggtcgaaacatgtgcgtgggagtcatgtgtaggaagttttatctggatatgagtttgttggagacgttaggtttgagaaaactttccatctccccctttttcctgaatagatataaagccaacatttgccttaatttaggagacagtgtgatttgctaacctgtgacactgattgtttcgtgttgtcattcaccaccgcttttttaaaagtcaaacatcaatttggaacaaatccatcactgaggtgcacttatttaatagtgaaagtctactcgaagtcacccccaaccacattttctttggcaaaatgacccacccacccgggactggggcggataaacgcgtcttccaagaaacagcaaccgctagctgggggaagtgcgggtgagcggtgctgcgctttgctgaattcttgcccaggcgtttggagttcggaagctcgagatcaaattcttactggtcgtgttcaggaagttttcgatgcctgcaacccagcctctgcggggccagagggcctccaactcctggctgcaagcggttccggggacagaacattccttccggctccgaccccagcgcgacccccggggctgagtgtcactcacgaagtgactcaccgggagccgccgcccgcactgtacttacttcactgtcggcgacggcgggcgcagcggaaccgacctgagccctggtccctcgaccactctgtccaggaccagccaccagcagccggcccctctcacttcctgagtaaatgttcccaagtgtccccgagtttacgcagccccaccctgggtccggtcccccctcgtcggaagcaaacgcagaaagccagattgacgttagcacccctggtttgaaaatgtgcctgagcagcggtaatggccagagaggattcagatagcacagctgccagcaccggacccgtgcgccccggctgtgctacgggagacttctttgcaactactttgagcccaagacgttttcttacaaaactgttgagggagaaataaattagacagaggatttccctcccgcttttatattctcagcaataacttctttctagctttt

SEQ ID NO: 1244132 - DNA, 4001 bp, Homo sapiens
agcggctcccgcaggacagggtgctcggcgtctctaggtcagagttaagagggttcggggaacgggggtgttgactcactggaccccaaagggcagcagcagaaccgccagactctcgcataagccttcgagcgcgaacttgctggcgcaataaacgtcattgaaaggcagcccttaggtggggagacgaggttcctgaggcgcagcggccagggggtcatccccgggcagacggtgcccctccaagctgacggcaccccactccaccccccccgcggaacctgccttcaaggctcagctccgcacacaaagaatctggagctgccgaggccactccctaccactcacccatcaatcctcccacgctcccggtcaccaacacgcgtcccgaaccgcgcctcttcatgtctggcaggaaggcctgcagcatccgcacagtccctactacattcacgtccagcacagaggccacggcgtcctcccccagcgcctccagcggccccagcaggcccaggcctgcgttacacactgcggagacaagaggcccgaccagcccgcctcagcatcaccctcagcacggcctgtcccctcgtgctccctgggcctgggaacatgttggtttcaacgcagggcggagaaggctcctaggagcccatatgcttccaggaggctcacccagcacgtccacgcggccctcagtcacgcgttcccgggcagcggccacggattttgagtcccttacgtccagctgcaacgtctccagggatcccggagggcatgccagggcccgggccgcctcccacagccggccctgtgttttcaggtccctcaacgtggcatacactggaggttttgggagaggaggaagatctgacttcccttctggcctccaagggctcctcccttctctccctccctgtccctgcctatctatacctttgaagctctgggatggatctgaagccagacgtacggccaagtgcaggccgatgcccgaggaacagccggtgatgagcaccacggtgcgggccatggtgagactgtggggagaggctggggctctgggcttgatatcacctgcttcgccccgccccgcctgcgggcccccaccccttgttgtgtctcccacgcaatctcaaggataagccttcctgcgggtccctggcccgctctccccaccctgttctgagccaaaacagacatgagcccactgcttggaacaacaaactgtcctggttgctggtcagagggaggggaggctttacaagcaggtgtgggttcccacgtgggcacagagtggccccctgggcagattcccctgggtatgcctctgtgccacaggagcgattatagtgaccgcagtttgctgcagaggctgtgaaagtaaaggcgttgggaggtgggagatgattgtatatgtgctggtttcgtccagggttcctagctcataactcacatgaccatggttacagtcttacgttgtcatgttggggtgcctcaggcctcaaaaaacagcctttcgtctctctgaccttctcctgtcctcttttcagctgcccaaggcaggactctaatctgattgtgggttgtaggatcctcattccagagtgggtccttgccccataccctggagaaaggaatgctgcacaaaggcccaaagaatctggactggccttgctgggcttagatcagaccctttttgcccaatcacattatcacagttgtccatgcttcagtcatggacagccaatggagttctccataaaaggcccaaaggacagggttcgggagcttctgagggctgaacgtgtggaggctgacagaatgtgcccagagggtgacgtaaccccaactctatggagatagaagctcctgctctggacccttccagaccgccctgtctgtatctcttcatatggctgtttatttctatcctttaaaatatgctttgaggctgggcacggtggctcatgcctgtaatcccagcactttgggaggcccaggaaaggggattgttggagcccaggagttcaagaccaggccaggtaacagagtgagacccggtctctgcaaaaaatattaaaaagcttcccaagtagccgggactacaggtgtgtgccatcactgccaccatacccagctaattttttgacttttttgtagagacggggtctcactttgtttcccaggcttttttttatttttgagacaaagtattgcttaggttggagtgcagtgtcttaatcttggctcactgcatcctgcatctgcctggttcaggcgattctcctgcatcagcctcccgagtagctgggattacaggcacccgccaccacgcccagctaatttttagtatttttagtagagacggagtttcaccatgttggccaggctggtctcaaacccctgatgtcaagcgatctgcccacctcagcctcccaaagtgctcggattataaaaaagtgccaccccacctggccctgtcatttttagaagattattttattttgagacggagtttcgcgcttcttgcccaggctggagtgctgtggcacgattctggctcactgcaacctccacctcccgggttcaagcagttctcctgtctcagcctcccaagtagttgggattacagacacgtcccaccacatccggctaatttttgtatttttagtagagatggggtttctccctgttggtgaggatggtcttgaactcccaacctaaggggatcagccagcctccacctcccaaagtgctggtattacaggcgtgagccactgtgcccatcctaaaagatcattttaactgctctggggtaatttcactgctgatgggcaggagtggaatcaagaaaactagttaggaggctactgctgtaattgaagggagagatgacagtgtgcagtctggaatagggtgatttggggatatgctttgatgagcaaaggtagagctgtcagtatttgctgctgaattggttgaaaggtgagagagactggagtcaaggactactccagggtttttaaaaccagtattgggaaaaatggagttgtcatatagtaaagtagagaagactgggggaggagccggtaggaggactggaaatgtggaattggggtttagacacattaagttcattgtatcaggtggacgtgttgtattgagtaggcagttggagatacagacctggagtctgtgggagacagtggggtttctttggtgggggggtcatcggcatctaagtgctattcgaagtcatgggactgcagaagattatattaacaatgtgaatattcacaagcttgaaaaaatgaatgtacggaagagagggggtcacactttacctcttattatcccacccccaggggtgaccttgtgagccacaccacacaggtacacacatgcacgcatatgtacacacactgtcacagaggggcaaagggggttggcgagagcgggactgagagcagatcccaggcctcagaaacccatgccacctgggccccctccctgtggccttcctggatgctgtagggatagcagatctgtctgggtcagcagggcaaggcgactggcaggagggggtggctgggaggcctcttcctccaagagcaggggcagcacatcatccaacaggcagagaagaccctcatccagaggtaggggcaggtcagggtggagtgcctgcctccttcccctagtgccccacacaaagctccaagagctccagcaggctcctgtctgtttccacttcccaggctttctgtggtcatgtccctgcccactccaaagggccatccccctcagccttccctccctctcagacccagctgaatccctgcctcggtaccgccccctcctggggcactcctgcccccttcctctgctgcatcctcacctagcctcctatctgttcacacctcccctgcaccagacctccacagaagttcagacagtggctctacaaccctactggcccctatcaatgacttctgccc

SEQ ID NO: 1244133 - DNA, 4001 bp, Homo sapiens
ctatcacagagggtttcttaacttttactaaatacagatgtataccaaaaagttttttcaatactgaaagattgtagccaatagtgaaaactccaaaggctgtaaatgtgagctttctaaaattcttttttaactaaaacttgacagctgtaaagaaaaccatctttgccttatgtttgtctaatcatacccctttaaggaagcatcaagctctaatttgcttcaatgaaagaaatgtgtagccaattcattctacataggaactatatcttgtaagccacgatgtatcgttgtatttttgctcttaaggtatataaacaacgtctaccattctacacattaaccagaaccttaaatctgatgattgtcgtagcacttctaagatttcttagatgtgccaataggtggaaggtggcagccctcttcaaggacaaatttccactgcaggcaccttttccaaaactttcccttgcctgctattgtaatgttctaagttctctctttttttttttttttttttttttgagaccgagtctcgctctgttgctcagactggagtgcagtggcactatctcggcttactgcaacctctgcctcctgggttcaagcgattctcctgcctcagtctcctaagtagctgggattacaggcgtgcaccaccatgcctggctaatttttgtatttttagtagagacgaggtttcaccctgttggttaggccggtctcaaactcctaacctcgtgatgcacccgcctcggcctcccaaagtgctgggattacaggcgtgagccaccacgcccaaccgtaatgttctaaattctcttgactacgattttgttccatcccgccttaacccgtagggtgactccactctgcttcccacgggagcaaaggagccccttttgtttcttccagacccaatgtttcaacgaaggactactgagtccacatgtttacagtggacagtgtgggtctcaggaaggtaaacggaggcttacaaccaggtaaactcctggggttcaaaccggggacgagtagaagggagcctaagaggcggaggtcccttttgctgccagtgggctcagaaggggccgaatgcttacggaccctccaggggagggccggtggccaccgtgctggtgccgctgagaacggcggcggtggcgggaccgccagtctcgggaagcacagcggccaatgggtccccggcgcctttccgacgcccatagcgtgaggacgtgcgaaaatgcgccctccagcggcggttgctccccgccgcccatgtgcccactgtgggcgagggcacgggcagtccggactcaccgtgcggctcgggccggggccccgcgggcggcggcggctgctggtgctgcagtggcgcggtggcggcggaggccgaggtgatgagcagccgctggaagcggttgggcgggcggcagggcacctccaggccggccgccagcttggccttgttggcgctggtgaggcgcttgaggtgcacgagcagctgtggctggtcgcggcggaagtgcgggttgtggaagtgatggagcggcccattgcctgccggtttgccgccccccggcccgcccagcaccaccttgcggaagccgtagaggttgagctggcggatgaagctggtgaagctggtggttttgaagagctcgggctcggccccggcccccgcagtcccgccaccgccccccggcccgggcgggctgagcagctcggcctcgaagagcggctgatcgataagcagcccctcgccgcggccgtcccagcggatggagcggtagcgcgggctgttcaccaggcgccacagcttggcggggaagttgttggggttgatgggggtggagagcagcgcctccatcgccccgccgggccggggcctcgccccccgagcctagctctcccacaccgttctcgatccctccccggccttcgcctcgccctgcccgctcctgccggcgcccatccgccgcgtaccagggaccgttggcgcacgaggccccgcggcgcctcccagcgcggccaatggggcctcgagttcccgccacgcggcgtgggcacctccccctcggcggccgcgtgccccagctcggcccgccggacgcctgcgggacccgggcaggagccccttccccaggcgttcccagacttcaggccgggaaggctgtctgccggggtgttctaagtcctgacaagagagaagcccagttatccaccgtggaataccaagaggcgtgtgtttcggcccagccaactagtggagacttggaatgcagagaaagtgtgcgttaggcagcagagttggtcgttctggggaccaaagggtctggtctgtaatctttgctaacagtggaactgcttacctctcaaacaaaaatgatgctactggaggtataatatcttgagtaaacgaactcaccttttagatagtagccctttgtatcttttaagatacactcttttaagtcagtatttgttcaagacaatttactcaaggttagatgaaaactgaggtccctaggaggagggaatcacaagaatctaagtactatcttgtgtgcctgcccaactagctggtggcattttagacattaaagagaaataaagatgggacagaattctacggtatccataagaatcgatccctagccaatcaataaataagaatgtaacaagagctgtgctgattcaaaaagagaggttcatttgaaaacggaaattggccgggcgcagtggctcatgtctgtaatcctaacacttcgggaggccgagctgggtggactgcttgaacccaggagttcgagaccagcctggccaacatggtcaaaccctgtctctactaaaaatacaaaaattagccagcgtggtagcatacctgtagtcccaactgttcaggaggctgaggcaggagaatcgcttgaacccagaaggcggaggttgcagtgagccgagatcgcaccactgcactccagcctggggaacagagggagactccatctcaaaataaataaattggaaattgctgggagaaaggggtacaatgttctactcttctcatggtcaaagaataagtgaatattaagtttttttagaaatgaaaataaaacgacccaacaaagcagcactaatatagagattttatttaaactgtattgaatttttacagcacattgcatgtttgtcacaacgcaactgcacagtttggatttttggccacatcatgtcacttacacccacaacagctctgaaaggagtatttgatgaacacatctgagccaagagcccagagtctctctccaaggccatgcagtttgttcactgatgggacagtccctcaaaacagccacgctaagtagacagatacagtctccccaaatgttaccaatcttactccccttgaaaacaggcagagtgaagtgcaatgaaagacaagttaattaaaaagccactcacaactggcagtaaattttaatgattgataaaatgcttaaaataattttatgtatcagaaacaaggaacagcttgttactttttcaatgatctcaggaattttgcagacacaaaatctccattattcagctccatttaaatgaaaaaaaaagttccgctaggctgacctaaatatgccaaaactttttaggttacatctatggcaagtacaaaagaaccacagatgcgtctctgtaggactgaaaaggtcaggacaaataatgattcttgttctaaatgcagatcctagttattttggaatgaaatgctgttttctagaaagcaacatgaaagtagcagtaagaaagatgactaccatcatttcaaaacaggataagcctaaatataatttaccatttatatgtcaacaaattaaggaaaactgtataaagtcctagtggtttcattataggccaaggagactgtatctgtcccacccacagtacatggctatatcactgtatcttttggttaagtgccactggtacatattaagatg

SEQ ID NO: 1244134 - DNA, 4001 bp, Homo sapiens
ttcccctcccccacctaccagatcatactggggtgacatgcagtgtgtatttgatgatcattagtctctgaaacaccagaaacaacctctttgggttttttttggttggtctttaccagtgagagggtctggatcctctctcttcctgaagaggaaggaatcccaacagcccctggaacgctggactggtcttaaggccaagactgtagccactggctttcctcaccacctctgtccacgtcacccccccacaccacatccaagttgccccagtccagctctctactggttctggaatcaggtctgggcactcagctctctgctgctacctgttggagctgctgctcagctagggccacactctcctccaatttctcccagggccacagaggcctgattccctttttttttttttttctttttttgagacggagtctctgttacccaggctggagtgcagtggtgctatctcaactcactgcagcctccacctcctgggttcaagcgattcttctgccttagcctcccaagtagctggaattacgggcacccgccaccacgccctgctaatttttgtatttttagtagagacagggtttcaccatgttggccaggcttgtctcaaactcctggcctcaagtgatccacccgcctcagcctcccaaagtgctgggattacaggcgtgagctaccacagtcggctttttttttttttttttttttttttttttgaaacggagtctcactctattgcccaggctggagtgcagtggcacgatctcggctcactgcaagctctgcctcccgggttcacgccattctcctgcctcagcctcccgagtagctgggactacgggcgcccaccaccacgcccggctaatttttttgtatttttagtagagacggggttttaccgtgttagccaggatggtctcgatctcctgaccttgtgattcgcccgcctcggcctcccaaagtgctgggattacaggcgtgagccaccgcgcccagcattttttttttttttttttttttttttttttgagacagagtctcactctgtggcccaggctggagtgcagtggcaggatcttggctcactgcaacctccctccacctcccaggttcaaacgattctcttgctcagcctcccgagcagctgggattacaagcacacaccaccacgcctaatttttgtgtttttagtagagatggggtttcaccatgttggccaggctggtctcgaactcctggcctcaagtgatctgcccgcagaggcctgattcttggtggaccaccaccttgagggtgcctttcctgcctcctgtgcctccagtccctctacctctgacttccatccccagaaaagacaacggacaccaaggctgctgcacatcgcgtcgtttgtttaccgggtcaggttggaagccttagagccgaggctcccgagtctcggggacggtcctgtttgggcttcagggagggccagcgccacacactggcctctgacccacagctgcccggagggggtcaggcagcaggtcatggcggtaggactcaggttggacgggagcattttccggtgcaccttctgtgacatgcggtaactgaccctttccgggtccctgacgtccagttgctgctgtccggtcaccatcagccattggccatccacctgcaccaccagttcctccggggcgaagccgtgggcatccagcttcatttggaaaccgtctctggcatggtcattgtcctcctgagccgctggactgtccctgagcagccgcaccggcattgtggccacccggttccgttcagcaaggcccacgctgggacaccgggatgccacccggctctcgttggagaaggtgttaccgactctctgcatccgagtcagcaactaactgctgtcaaagggcgcgaggctcccagcgcagagctaggcgcacggacgcccggagaggagggacctcgcgcggcctacccgagctcagctccgctcgctcggttcccttcgcttctgcaaacgcaggcggagttcgggatcagccacgcccatcttacctccaagagccagactgtcagcgccctggcgcgcccgcagctgctctcctcccagactccgaccctttctccgcccttccccaccttcgttaatggacccggggaggccgcagctgtgaaggaactggatccacgaccaggccagacccgagggagccgcaccctggcgcagccaacagcagattgatcccccagctggaagggggctgtcttgccttctaaggaccaggcctggggcaaggattgttcctagacagagccaggggagggcggccttcctgggtcatccaccctacctctccctgaccacccacaaccccacgcggacacgcgacacgaggaggtggactggtctctccggctgcattaattcttcccggggcgtcctgtgctgcaggctgtggtctgggctctggggccacaaagatgaagacgcagttggggcttcaggagagtggctcccagtgcacagagaaagacctagccctcctccgcctcaccctccacgtcagtagccttcttggtgaccatcataaccacagctatgcctctggtgctgttatttgataattttttttttttaagagacagggtatcattatgttgcccaggttaatctcgaactcctgggctcaagcgatcctcccatctcggcctcccaaagtgctgagattacaggcgtgagccacctcgcccagcctataaactttattttttatttttttgtagagattggtggggggggtctcccaatgttgcccagcctggtctcgaactcctgcagggctcaagctctcctcccgcgtgagccagccacccggcctgataaactcctttttgttgagtgatactattaaatacatacatactgaaaagcgcagaaaaaggtgcaggtgaatgtcaggaggagaacacacccaagtcaccaccacactactgcagaactgttgctacatctcatctctaccgcagctgcaattccgtgtccggagccgcgtggggcagggcctgtgcgggagttgggggagggggttaagtgggagacaggcgcgtgaaagaggcagaccccacgattctccccaagactccttgtccccaagaggacagccatcgtgactctcccggactccattaaaagagattacaagtgaagaggggtcaatgtggggccttcactcaggcctcacttggctgtcaggggccaagagacaggacagaaaagtctggaagctggaggcagtgaggggaaggcgcgggaagactacaactcccgtcatgcgccgcgcagcaacgcctgcgcactgagcgctggttgcccatgcggccctagggctgggagcgcggcgccgctctccgctgcgggggaggccatggcggaaccttcccaggccccgaccccggccccggctgcgcagccccggccccttcagtccccagcccctgccccaactccgactcctgcacccagcccggcttcagccccgattccgactcccaccccggcaccagcccctgccccagctgcagccccagccggcagcacagggactggggggcccggggtaggaagtgggggggccgggagcgggggggatccggctcgacctggcctgagccagcagcagcgcgccagtcagaggaaggcgcaagtccgggggctgccgcgcgccaagaagcttgagaagctaggggtcttctcggcttgcaaggtgggggcggggcctggggtgaaggggcggggcttggggcatcccagggctctggtgggaatggggtcaaagctctggctgcggagcggctcttgccccagaggtataggtcattgactgatccttccacctccaggccaatgaaacctgtaagtgtaatggctggaaaaaccccaagccccccactgcaccccgcatggatctgcagcagccagctgccaacctgag

SEQ ID NO: 1244135 - DNA, 4001 bp, Homo sapiens
agcgggctcaaggcatccaaccaagggctggcctggtcctgccccttgtcaccccaggagctcagggaggcagggccccacgatgacagtgcccaggagcaggcacagaggggctctgtgtgcattcagtagacacagcctctgtcccaggggagaggagggccccgcagcacagccactcacggtacacgctgacgttggaattcattgactcctgcttcccggagcaggtgaagtggcattggaggaccgtgtcatgggagatgtttgagaccaagtaatgtttccactgagcctgttcgtccagcagaatcttatctagagaggtctccagaccacccacttcaggctggttacaggtggtgctgcagttgacctcgagggaccctttgggctcaaccgccagcttctttggcctcacgtgtacctcgaataccttctcatccgatcctggaaaaccagaaacactgggcagtcgtgtcatccccccaccccctgccctccagtggagctgtccattgaggcagtctggctcctgggtcagggactgaagaggaaaggtcattggggaccccgctgctactttccccttgtcaggtgtcatggccccggctagaccaggaggccaccccccagctggctccctgcctctggctgtccttcctccagccccctagctgacaccctgcctctggctctccttcctccagcccatctgcccatcagctccagattagtcttcctcaggctgtgctccaactccatggagtgggatccgactcagtctttaaggtcagcccaaatgtcccctcccccataaagccctcccacagagggccctctgtagccctccctcccttcctttcttgcacaaacactttttgaacacctgctatgtccaaagcatcaggctctggggatacagcagtgatcacagtagaccaaacactgccctggcggagctccagtaaacagtgacaggcagagcacccagcggtcagatggcaggaaagcgccgagaaagggagcagggagtgggggtgaggccactttaaatactgtgctcaatgaaggcctcacccagatggtgactctgtgggcaaaggcatgcaggggcgtggcacgccctgcagatacttgggggcagtgatccaggggaagggggccagcagtgcaaaggctggggcaggaggattgttgagcccaggagttggaggctgcagtgagctatgatcacaccctgcactccagcctgggcaacagaacaggaacctgcctataataaaaataaaaaatttaaaaagcttcagcaggctgggcatggtggctcatgcctgtaatcccagcactttgggagaccaaggcgggtggatcacttgagtccaggagttcgagaccagcccctgccatctctacaaaaaatacaaaaattagctgggcatggtggctctcacctgtgatcccagctactcaggaggctgaggtgggaggatcacccgagcccagggaggtgcagtgagccatgatcatgccactgtactccagcctgggtgatagaccgagaccctgtcttaaaacaaaacaaaaaaacctaagaacctcagcaacttttgggacttctcttccacctgaagccacagggaacagggcacccccaccctctcggctggcatgtgccaaatcaggaaccccaggaaactggcttacctggacagcagatcagggtgaagagggccacagtcagggtcctgtaaccgaaagaggacatctctggcagtctccacgggctcgcagggaccagccaagggctgcctggagggagatggtgggcgcaggtctgagctatggcccagaatccctagccttctgcaaactgatgactgcatttcctctcattatctgagagatctttgggaagccacgtgcaccagctcgttctaggaccccaggcctctaagaatccaggcagaggaagctgggaagctgctgataagcagggcataacccagtcctccctgctgactccctgtgcaaggggcggggcaggcaatgggtgcacgcatgcgtgtatgagacgtgtgcacaggggagagtcaggcctacaagccccagatctggggaaccccaaatcccatgggatgcattgttggagtcatgcctgggagacaagcatccaaaggccaggacctgtccaggacttgcagttaccatagcaaaaggggacagtgacttgggcttttctaaggaagcctggagggcaatttgagcttctcctgctaaatgcctggtgcaattctgcataaaccttcacatcccactcagttttcttttctttttctttttctttttttttttgagatggagtctcactcttgtcgcccaggctggagtgctgtggcacaatttttggttcactgcaacctctgcctcccagattcaagcaattctcctgcctcagcctccagagtagctgacattacaggatcgcgtcaccacacccagctaattttgtatttttaatagagatggggtttcaccatgttgtctaggctggtcttgaactcctgacctcaggtgatctgcctgccttggcctcccaaagtgctgggattacaggcctgagccaccgcacctggccctcactcagttttcaacctagacttgatcttgactcagctgattcagggccaacttgaggcccagagcctcaggaaatgcatcccataatagtccccagcaacccaggcacagacagagaatggggtcagtctggctgcagccacacccccaaaccatggccttcatttcctggcctacctgatgtcctccatcctctctctccctccaggagggagccttgggttgggagggttggagcctgaggtgtttcactttattcctagggaggaatccgcagaagcagtgagcaggtaagggagggatttcaatggacgagaggaccttcctgggggatcgccacacagtctcatccctcagttctgcctaagatcccttttgcaaccaggcagggaaagagcaggacttcttgctttctcaggggaacccctgatggggcctttccaaagggatgccccagaatcctcaggactttggccaagctccattccgggttgggagggcagggtgaggtcctgcccttccctcactgctgagggcaaaggcggttactactgtacacaaccatcaagggctgccattgtcagcctggacccagggaagtccctggacggggttgctggacttgggaatgatgcagggaggaagaggcagggcctggggccagcagagaaaaggagaacagggtggagtttcacccccagcctgaaggaatctgatttcatgtggggccagcaaagtcctgagagcaggaaacactcctgaaacccaagccaggggctgggacagaagggtggggatggggacattgctgtagtggagactctgtgtcctccactgagtcagaataataataacaataacaacatcaataataataatagtaaacatttacttactacaagtcgggcactgtcacaagcactctataaatattaaccaattaatcccctaactctctgaggcaggtactgttactgtctccatctcacagatgggaaaactgaggcacgtcaaggttaaatgacttgttcaagatcacatacctagaaaaaatgaagtcaccatgaatgatagcctgccatggtgactgttgaagcccgcccgagcaggcgcaagaagaggattgttaggagcctggttcccaggagaccctcaagagggaaaagcaacatagcagaaggccagaggaaggttctggggcctgcctcactgtgagggactgtgggaaggtggggtgatccatgcctggagtgctccaaacagcttctggaagggacagtgcttgggaatcccacctgcatacacagcagggccagcctgattccctcttcaagcaaggcttctgcagcccaacgtcctcc

SEQ ID NO: 1244136 - DNA, 4001 bp, Homo sapiens
ctcacagttccattcttagatgtatgccctagaaacgctgtcacactaagaaccagacatgtctttgtgtttacttctcttttttttttttttttttttttttttgagacggggtctcgttgtgtcgcccaggctggagtgcagtggcgcgatcttggcttactgcaacctccacctcccgggttcgagctattctcctgcctcagtctcccgaatagctgaaactacaggcgtacgccaccacacccagctaatttttgtatttttagtagagatggggtttcatcttgttggccaggaccgtctctatctcttgacctcatgatcctcctgccttggcctcccaaagtgctgggattacaggcatgagccactgctcccggccttacttctcactatctgtgtgaccttgagcaaatcacttaatctttctgtgcctcaatttcctcatctgcaaaaaggaatcaataatagtatcttcctcatagggtttttgtgcagattaaacaaataaaataagtaaatattttaaagcatttagaacagtgcctagcacacagtaacgctatataactgtttcataaaataaaaataaataggcatagccaggtgcagcagttcaagactgtagtcccaactaatcaggaggctgaggtgggaagatcactggatcccaggagttcgaggttgtagtgtgctatgatcatgcctgtgaatagccactgcactccagcctgggaaatatagtgtgaccccatctcagtaaataaataaataaataaataaatagagatgcatatgtaataaagcacttaaaaataagagaacaataaacacaaaattccagagggtggctacctgtgggtgggaggcaagtagcataaaagtggacaagtggtggccaggtgtggtggctcacgcctgtaatcccagcattttgggaggccgaggtgggcggatcatgaggtcaagagatcgagactctcctggccaacatagtgaaaccctgtcgctaccaaaaacacaaaaattagctgggcatggtggcatgcgcacctgtagtcccagctacttgggaggctgagacaagagaatcgcttgaacccagcaggcgaaggttgtggtgagccaagattgtgccactgcactccagcctgggcgacaagaatgaaaactctgtctcaaaaaaaaaaaaaaaaaaaaaaagcagataagtggtgtttgcagtttggtgatactccatccttgtgctgagtggcagcttcaggtgtgtttggtatattactgtgcagtatgatgtatatgtatgttacataagctttttatgcgttacctagtaaattttacaaaaataataaaagggaaaaagggcctttctacgtgcctagaaagaagaggcttcatgggaatgtgagccatgggttaggaaagaccccctcgaaccgaggcaggtaggaagtgagtgactgagattcattatgaacccaccacgcctgccggggagaacagggactgtcccttcccctctgcatcagctcagatggtccagatcacagcccacgtgggcccctaaataaggaggcagccccacatttctacatcggccaccgagatggcagagcagaggaaggagagaggggagacaaatcaggaaaggagcgccagggcaagtgcgtgagctcagagacccagcagggcagggcaggagcttcacagagtgcagaatgtcgagccacaggagcgctggggattccccaacccctgcacttaccagcgagaaactgagacccagagaggggaacggactaaaactcagacctcgacactgccaaaatccttcccatgctgccacgcttcattggagggaaagtgagaagctcaaccttacccctgtgggctccaagaagggtagctctgggatcccgggcaggaaattggtgacaaggtgacaaggtgcgcgtgtcacagctgcccagttcacggcttattcagtcttctccctccccccactccccaccagaagtgacgtgcttcctgtgccccggttcccaccctaaactagcctcatttagctccactcccattccgctttttttttttttaattgtggtaaaacgtacacaacagaatttaccatttcaattttttttttttttttagactgagtctcagtcacccaggctggagtgcagtggtgtgatctcggctcactgcaacctctgcctcccgagttcacgtgattcttgtgcctcagcccgcagagtaaccgggaccacaggcacctgccaccacgcctggctaatttttgtatttttagtagagacagggtttcaccatgttggccaggctggtctcgaactcctgacctcaagtgaactgccttcctcggcctcctaaagtgctaggattacaggcaagagccactgcgtccagccaattttttgttgtgttgtttttaagacagagtcttgcttttgtcacctaggctggagtgcagtggcacaatcacagttcgtggcaacctctgacccctgagctcaagtgaccctccctcctcaacttcccaagtgactgggactacaagtgtgcagccaccaggcttggctaatttctgtagtttttgtagagacagagtgttgcttatgttgcccagcctggtctcaaactcttgagctcaagcaatcctcccacctcagcctcccaaatgctgggaatgagccaccgtgctaggcccattttaattatgtttaagtgtacagtttggggcactaagtacattcacattgttctgcaaccatcaccaccatccatctctggagctctctctttctcttttctttctttttttttttttgagatggagtttcgctctgttgcccaggctggagtgcagtggtgtgatcttggctcactgtaacctctgcctcccaggttcaaacgattctcttgcctcagtgtttttgttgttgttgttgttgtttgtttgtttgtttgttttgtagagatggagcctcactctgtcgcccaggctggagtgctggagtgcagtggtgtgatctcggctcactgcaacctccgcctcccgagttcaagcaattctcctgcctcagcctcctgagtagctgggactacaggtgcacgccaccacgcctggttaatttcttttgtattttagcagagatggggtttcaccatgttgcctaggctggtctcaaactcttgagctcaggcaatccgcccgccttggcctcccaaagtgttgggattacaggcatgagccaccgtgcctggccttgcctcagcctcttgagtagctgggattacaggcacgtgccgactggctaatttttgtatttttagtagagatggggtttcatcatgtcggccaggctggtctcgaactcctgacctcaaatgatccgcccacctcagcctcccaaagtgctggtattacaggcatgaaccaccacgcttggccagaactgccttccttttgaaggctgagcaatatcctattgtgcgtgtgtgccgcattctgttcatgcattcatatactgatggacacctgtgttgcttccacctttggctattgtgaatagtgctgctacaaacagggttgtacaaatacctgctcaagactctgctttcagttctctggggtatgtacccagaagtggaaatgctggatcataatggtaaaatatacacaacaaaatctaccatcttaaccttttttcttttttttttttagtggtaattctgactgggcttggtggctcacacttgtaaatccggcactttgggaggctgaggtgggaggattgcttgagtctaggacttcaagaccagcctgggtgacaaagtgagaccccatcgctacaaaaaaaaaaaaaagtaattttgtttaatttttgaagatttgccatcctgttttccttactcctccctttgatgtgcagtttctgtactcactggggccttctgtgaatgaggcagttcca

SEQ ID NO: 1244137 - DNA, 4001 bp, Homo sapiens
catttgaggtcaggagtttgagactagcctggccaacatggtgaaaaccctgtctctactaaaaatgcaaaaatatgagtcgggcatggtggtgcatgcctgtaatcccagctactcgggaggctgaggcacaagaatcacttgaacccaggaggcggaggttgcagtgggctgagatcacgccactgcactccagcctggatgacagagtaagaccctgtctcaaaaaaaaaaaaaaaaaaaagcctggcgcggtggctcacgcccgtgatcaagaccaacctggctaatacggtgaaaccccctctctactaaaaaaaaaaaaaaaaaaaattagccggttgtagtggtgggcgcctgtagtcccagctactcaggagactgaggcaggagaatggcgtgaacccgggaggcggagcttgcagtgaacagagattgcatcactgcactccagcctgggcgacagagtgagactccgtctcaaaaaaaaaaaaaaaaaaaaaaaaggccccagacttcaattcctcttttattctcacttctcacatccaatcaattagcaaatcttgcaggctttctttccaaaatacgtctaggatctgaccaattctcatgactcctactgcttccaccctgcttatcatctcttgccctacattgcaatctccttacttgtctccctgatcttggcatcctctatctgttctctgtaaggctctctgagtgatccttgtaaaactaagataattccattctgcttcaagctctccaataggtctcccttgcgttcagaggaaaggctggaggccattaagtcctagtaacaggcctttccccagccatccctctctttggctttgtctcctgacccctgctgagccacacctggggattgctactgccttcaggttattgcactttctcttccctctgcctaggatgctcatccgccccctattctcatgacttgctgtctggcttcttccaggtcgttattcaaatgccacctcattgacagcgttcctagacaatcctacttaaaattgcaaccctacttcctacctctggcactacttcttccttcttggctttattttctgcaaagtactacctcacacattctatattagtcatttacttactgcttgtctccctccactagaacataagctccacaagctttagaatttcaattttgtttgctactccatcccctagcctagcacagcttttgttgagtgagtgagtgaattaatgaacaaatgaatggatattcttttccagtcctgtaagtggaagctcaatgggtttgggtgggtcttatctctcttgctccggggcttgattcaatgcctgcacacagctggctaaataaatgcatcctgaaggaacgacagagaagctgttttattcgcgcgtcctggggttactagagacaatggacactgtaacgtcccaaagggtagcaaacaacttggcagcctcttgcctttattgtccgccttggagggccagaatgcccgtatttccccttgggactggaatttggtcttgagggccaaggacacgaacgtagaaaagctggcagccttgaaagaagcatacccagccggccttccgggctcctgcacatctcgcgctacagcgagcaccccactcccggccaggttagcgcagacagccagccccctcccgcggcgaccatcacgtagccccccgacgtagctccacatccggccaatgggcctggggttcctaacgtcacccagcagcctgacaaaacgccccttccgtccagtccttcccggctcaccgggaccctccaggcggtgtccgagccctgagattcggggtagagcttgtccaggctgtagatgctcttgaactcagtgccgtctttctgcttgtgcagcgcccggcgtgggcaccgtgcgggcggtgggagcagccagactccggctcggctcaggccccagcgcaggcacctggtggccgccatgctcaggtcttgcgactgcttccggcgggcgcttcctccccgcggtccgcaaactcgagccgccctcgagctttggttccgcgcagtttctaggtcccgccgaggggaggcggcaaactggggtcccgccgatgctttctggccggccgcctccgggaggcctggttggctggggaagacggtggccagagagcgagctgctaccggaagagtgccccgatcttgtggcccccagaaacaccacttctctcctttcagagtccgtgccctccgcctggaccgcccactgcccaattcaaacagcagcgaggcctgcccggccagcctggggcatctcccgccccgcgcttcccagcccctttactctgctctaatttatcttttttctcttcctttacaaaaatcactcagtcctaattgtctaattgctgtctcctagccggaatgtgagctccaggagggcaccggctcactggtatatccccagcacccagaacatggcacatcgtgggcaccccatgagtactgataaaatgaattctgtaggaatgtacttttgaaagttgggttctggtagagctgagttttaggaacgccaggctctttttacaaggcagcctatgagcaaattccccgctgagcacgtgtgtgtactggcttatacccagcagctctgcaggacaaataccagatgggaggagaaggcaggccaccgaaagaaatgtttgcaaaacctggaacatcgtcccccgcccttcagctttatggagcaagatgatgctttcttccagccaggagagagggggtccctcgggaggtagggagagaattcagagaactgccagctaactagaaccctttcatagcgctggtaagggatgaactacagacaagttccaattctgaaaaaggttcacagtagagcaagcagtgtttgaaaacagctaaaccttagttaagttactgtgttgagaggctatgtggtaaatggaaacaaagctaaataaatgttcataattattagtaatgctagcgattgtttcttaatgaagagttctatttttaggaacaagcataattatctagaaaaatgtgcccccggggatgctggctgattgaaacaggagattgtcatcacaccaagcttttaccatctccgcattatggctacagcaaatctttaagaaggaataaaccactttctaagcactggctttataagctcagactagaaaggggtgacaattgacatatctcgggctctatctcgggttgggaggagagtctcctgggtcccgcgctgtttgacttagtcccaagacctcaaagggaatagacgcatctctatggcaactggaataagctgctcagaggagcaaaaccaggcattcactcaggtcgggggctaaggggttatgagtaataaagtcagaacctttccatgacatcattgctctgaggctgggctccagctctgcacctgacccaaggcaataggaaaaggaagctgcaggtttccatggccccaaataaacacagcctgcttgggccatctggtggcctggattctgggagaggaggtgggtagaggagagaatgaggcaagccgccctggggtggagagaggagcagctggcaagctcctcttacctgctgctgccgtgaactatccagaatgggggccctgggagaaaggccagaaaggggccacctgttctcccaaaaagatgggcactaaaggctgaggccagtcttccctttctcctccttggttttctataggccgagatggtgcttcagggaggggacattcatgggagaagagaggaaagaggtcatttctggcagctgaggagcttgcagacacaagcctttctatagggcctatgagttggggtactattcctatgtagggggtcctacataggacctacataggacccctttcttcttctctgtaccgccctgggtcagaagacctcctttttttttttttttttga

SEQ ID NO: 1244138 - DNA, 4001 bp, Homo sapiens
cagtgcaaccccatctctaccaaaaatacaaaaaactagctgggcgtggtggcgggtgcctgtagtcccagctacttgggaggctgaagcaagagaatggcatgaacccatggggcggagcttgctgtgagccgagatcctgccactgcactccagcctgggtgacagagcgagactccatctcaaaaaaaaaaaaaaaaaaaaaaaatgagccaggcgtggtggcatgtgtgcctataatcccagctacttgggatgctgaggcaagagaatcacttgaatctggaaggcagaggttgcagtgagccaagatcatgctattgcacttcagcctgggcaacaagagtgaaactccatctcaaaaaaaaaaaaaaaaaaaaaaggaaagaaaagtccgggcatggtggcttacacctgtaatcccagcactttgggagcttgaggggggcagatcacgaggtcagaagatcaagaccatcccggctaacacggtgaaactccatttctactaaaaatacaaaaaattagccaggcatggtggaacgtgcctgtactcccagttacttgggaggctgaggcaggagaatcgcttgaacccgggaggcagaggttgcagtgagccgagatcatgccactgtactccagcctaggagacagagtgagactccgtctcaaaaaaaaaaaaaaaaaagggattgtccttggggaactggggttctgaaaaggttggcaataataatattaagaagaaacacatattgaatgctctgtaggtgctaagcagtgggataagtttttaccgtgttaatctatggattacctagtgtgattcttaaagtataattcttatagtatatatatatatatatatatatataaattttgtgtgtgtgtgtgtgtgagagacagtctccctctgttgcccagagtggagcatagtggtacaatctcggctcactgcaacctctgcctcccaggttcaagcaattctcccgcctcagtctccctagtagctgggattacaggtgtgtgccaccatgcctggctaatttttgtgtttttagtagagatggggttttgctatgttggccaggctggtctcgaactcctaacctcaagtgatccacacgcctcagcctcccaaagtgctggctgggattacaggtgtgagccaacacacccagcctaattcctttagtttaatttttttttttttttttttagacagagtctcgctgtgtcacccaggctggagtgcagtgatgcaatctcggctcactgcaacctccgcctcccaggttcaagtgattctcctgtctcagcctcccaagtagctgggattacaggcgcacaccaccacacacagctaattttttgtattttagtagagacggattttcactgtattgccaaggcctcccaaagtgctaggatgacaggcgtgagacaccacgcccggcctagaacaattgttatttgggtcacagaacccgctgagtatctgatggaaactacagattctctctccagagaagtgtacacacacaggatttaatgagctcctcctgtctgaggcaataggttagggaaccaactcttgcagaggcaaccccagccctgtgtttctccccagcccttcagcaggtctgagatgggcagggtgaggcttggctgccaggccctgagatatctgcaggttcctagccaagaggattactcctgtttccccacttcccaactccctcctcctcacttacggcatccagtggggctgacatgggtctcgggtctgtttggcaagagctgaggcttcagagctgggcacagtggcagaattcacagcaactgaactcttgtttgtaccccccaaagggctgtggtctctctcagccccagcaagacccgaaatacacctcaggaggctctgctcgcaggctgtttgcttccactttcatttccgtgaaatccctgccttctggcgctcacatgccgccccctgccgaggcttccccacccctgggaggagccttcttggtcagcaaagtcgacttcactcagccaggctgcctcaaggaaagccacctcaccccaactgcaaactggcccccatcaaccattcccagcaatctccgacaagcccattggtagaccctgctttgtcaatggattatttccctagagcctagaataatgctgggcacattgaacattgataaaataattgctgaatgagctgggtgcggcggctcacacctgtaatcccagcattctgggaggcccaggcgggcagatcacctgaggtcaggagttagagaccagcctggccaacatggtgaaaccccacctttactaaaaaaatacaaaaattagccgggcgtggaggtgcattcctgtaatcccagctacttgggaggccgaggcaggagaatagctggaacccggaggcagaggttgcattgagctgagatggtgccattgcactccagcctgggtgacaagagtgaaactccatctcaaaaaataaataaaacaataattgctgaatgaatgagaaacacagtcaggacagataacgcccatagttcaagttcacaaaactgccgggtgcggtggctcacacctgtaatcccagcactttgggaggcccaggtgggcagatcacctgagatcccaagttagacaccagcctggccaacgtggtgaaaccccgtctttactaaaaaaatacaaaaattatccgggtgtggtggtgtattcctgtaatcccagctacttgggaggccgaggcaggagaatagctggaacctgggaggcagaggttgcattgagccaagatcgcgctgttgcactccagcctgagtgacaagagcgaaactccatctcaaaaaataataattgctgaatgaatgagaaacacaatcaggacagataaagtccacagttcaagttcacaaaactgccaggcgcagtggctcatgccttgtaatcccagcactttgggaggtccaggcgggtggatcacgagaccatcctggccaccatggtgaaaccctgtccctactaaaatacaaaaaattagccgggccggatcacaccactgcactccagcctgggcaacagagtgagattctgactaaaaaaaaaaaaaaagtgccaatcccagcagctgggcccactggtaacatgtgcctatagttccagcaggttgaggcaggaggactgcttgagcccaggagttcgaggccagcctgggcaacacagtgaatcttgtctcttaaaaaaaaaaaaaaaaaaaaaaaaaaggctgggtgcagtggctcacgcctgtaatcccagcactttgggaggctgaggcggtgaatcacttgaggtcaggagtttgagaccagcctgaccaacatggggaaaccctgtctctactaaaaatacaaaaattagccgggcgtggtggcatgcgcctgtagtcccagctactcgggaggctgagacgggggaatcgcttgaacccgggaggcggagcttgcagtgagccgagatcgtgccactgcactccagctgggtgacagagcgagactctggctcaaaaaaaaaaaaaagaaaaaagttcacaaaactgttaacagtggccagcaaggagagctatcgtctgcccaacacgcttgtgccttacatgaattaactcttcaaaacaatgccatgaagttggttctattttcttcactttacagatgagaaaattgaggcacagagcattagaaacttgcccaaggtcacagggctaggaatcaaagcatggatccaaacctggtaggaacagtatttacacttgggccttgaggtagagtggaaaaaaatttgctgtatttttcctcaaaagttttaaattcagccccatttctgtgaccctgagtaggcaagctacttaatagaagtctgtctcaatagagatgccttaatacttaagtgtgtgaagattcaattaaaaagtttcctggctgggt

SEQ ID NO: 1244139 - DNA, 4001 bp, Homo sapiens
acactgcatgggccaactaatacatgtctatgagctgtctgtagacgactctggcctttggcctcactggaatccactgatgtaagtgagctagcatcatccttttgaagcattttgttcatctgtagcttccttaaaatagggctttttaaaaagatctggccagtgcagtagctcatgcctgtaatcccagcactttgggagactgaggtgggaggatcacttgggcacaggagtctgaaaccagcctgggcaatgtggcaaaataccgtctctacaaaagatttctaagatagccagacctggtgacaggtgcctgtagtcccagctacttgggagggtaagctgggaggatcgcttaagcccaggaggtggaggctgcagtgagccgtgttcacaccactgcactccagcctgggcaacagagtgagaccctgtctcaaaaaaaaaaccaaaaaatctgtctttcgcagctacaggtcattaatctgaccagctgctccagaaagattgaagtaacatgagggagcaaatatctgcttcaacttccacccccttccctgagagcatgcatttattcagaaacatccactcagtccctgctctggggacagactagtgaaaacaatgcctctggacagatggtaaagaaataatcacaaatcgtgatattactataaggaaaagtacatggtgctgtgtgaagtgctgcaggaggacacagttcatggggggcggacttggaggggagggccaacagaggccttctgaaaaaaatgacacttaaacagacctaaagactgtccaaaagtatgtcaagtgaaaggggaagcaaggcattgcaggcagaaggaaacacgtatgtgaagatcctgaggcaacaggaaatttgatgcattccgagaacagagactgagcaagagaagggaacagaatgaggctagacagggagacaacagctggatcaccgaaggctctgaaagacgcagtcatgagcttggattttatcagaagggtaatgggacagccagcgggttctcagcagaccaacaaaatcagacttagaaagatcactcttgctcagcctgagagaaccgattggagggaacaagagagggcaaagccccaagtaccttcttgttcatcactctaaccctagcacctagcatggtgcccacacataactggcactcagtaaatgtttgtggaatgaatgaccgtggaaacaggagactattgcagtaaccaaggctggcagccgaacacaagtgttccgagttgagatgttttgtaagtcgaggtgatggggcttagcaatggactgactgaatgtgggggtttggggataagagaaaaacaagtcaggcatgactcccatgaatctggcttggcccacctatctgattggaagggctggcttaaagagataggtaagatggaagaagaggtgcagggaaagagttcacagattatctaccaactcccatcacacgcgtgtctgagcatctgagcaacacctggcccaagagctgggactaagctccctgagcatgaggcggtggcatactttctgcgccccggctctcccagatgcatgcgaggcactgcgagccgactctttactatgtaaactccccgaacttatccgagccgcagtttcctcgtaagatcgtggcaagcatcaacgcatcaaactccaggcctaagctgggtgtgaaagcgcccccctgagagtggggcggaattcccacgtctctccccgcccggtactgcctttcctcaggacgcgggcctgtcaggctcctctcgcccctggtccgcccgcgtcccccgacccgaggtcagcctacctgccggccccgcggcggcagcgcgctgcagcccaggctgatgtagacaggcagcttctcctgggtcagcgacagccggtacccagccagcctgccacggccgctgccacggatacagagcctgtttacctatgacgtcactaccttcctgactccggaagcacttacagcccccattccacagagcctgctgggaaacagaggcccgaggggaggcccggcctacaagacccagaagccttagcgccggcaaggcggccagaagtagctctgctctctccgcgaagaccctcgggggattccgcctccaccctttcccggatagagcgctatgcatgcagggacttgtagtctcaggctccccagccggctgggctgggcagcactccgggcggagtcgacgagcgcaggatgtgagctcacagcttgggactgctgaggggcaggcggctgcaggctaggggcggctcggagtccgctggccacccagctgagaggagaggcgcccccggggacggtgagagccgggcccgccgatgccctcggggaagggatggacggcccctgctggagtagagcgagcccggccgggtcctgggggaaaaggcgcgggcggcgtaggggagatggagagctccgatctcccacggagggtgggcgtgagaaccggtgtgggtttctcggtagtgaggagtggtccgggctagagaagagcccacaccggccacatttcccaggactttttgggtgacgcttaacctttacacctagggtttctgctagatccgccactctagccctcagctttcctcccgccgtcctccgtgtctgacggatttctgggtccttcttccttttagacccctcctctttccacctccgcggctgtttgccctttgttgtgcttgggttcccattagcttcgttgcgtgagccacggatccgcccttagccccgggcatccccaaatatccacacacaaagtgcggaaggaagagcactgtggctatcagtggaaacttcattctcactggaattactttctggggcgtcacctgccacagaattcctggaacccattggtctgggcggaatgtgattgacgtcatccaggggctcaaagcaattgctttgtaggaaaggaagagattagctctggatccgccgacctctcttggcaggcctatcctttgagctcctttgcattggcagaacatgtatgtgtgctttctctgatcctgggaaaactaggactagacacaaaatacacagggaacttgctaatacctgttagagaggtggatttattcctttgaggtgggcgggaaaagggaaggtgatctcataccattctagtgtttcttagtcattggcaacctcctggtgagggctcacctcccatacccaacccctgtggcaaatgaaagagtctcccagacaagccgccaaaggaattcactgcttcacacagcacccacgctggctgtccacttccttggacattcttcccagggacttacctaaatcttttcagggacaatttcagtctaacaaactgacgtatgttaaatacttaaaatgtgcatggcattgtgctgagcaccattaggggaacacagcggtaaacttgggaaaccagtgccctgcttctgggttgcacttacaaggcatgagcaactgtaaactcctgcatgtgatgagcattcggtgaaatcattccactttttttctgtctccattattaccaatgtggtccaggctgccatcatctcttcttgcctagactactgcttcctctggtcttcccactttctctcttgcacctttacaattcattctctacccagcagcaagttatcttttcaaaatacactacaagcaagtcagatcatatcactcccctgcttgcaaccctccaattgattcatatactatatagcaattagtatgaaatccacctttgttatcatctaacgcctgccttccctgacttgacatcaaaccaacttccccctactgtctgtgcaccagccattatgaccgtatttctgatcctcaaacttgttttaattttgtcattgttgagatgagatttccctatgtcacccaggctgactttcccaggctcaagcagtcatcccacctcagcct

SEQ ID NO: 1244140 - DNA, 4001 bp, Homo sapiens
ttctgcaagtaacatcttttagcctaccccagccccaacttatttattttttttttacaagctgtaaaccacccattacaagatcttggccaatcttccctccctgcccccaacatccggagttgggggtgggaaagaccagtaatgggtttcttccactggagacgctatggacccctgaacacagcttcacagcacacccccgcggcccccccaccccccccgaaaagagctctttcctacctttgttttttgggcaccgaatgttcaatctctaagcgttttccttgtaattctactttccctaaagattaaaaaaaaaaaattaccatgagagcttgaacaggggttgggggtgggaagaggaaggggaaaagacactaggataattcaggagttactgggattcgagatcttcctaggaatccaggcagtggcttccgcatccagatgggaaaaaggttgctctaggaatggtggagtctgtaaattcgttattattcattttttaatttttgctttattaaatcactgaggcttgttgagtggatcgctctggaatcccgatttgggaaaggtgcgaggccatttgtgtgggtgcgctgcctacacagctcccagatgtgggaaggagccaggaaagaaagggctccccgttcctcagaaagtggggcgcggggcgggaggcagtgtgcagaatgaaactttatttttctctgttggccaggaagacgggctttgggccacggagcggtcacctgtcggggctggtttgggaaggggtggacctgggggagcggagcggggcctggcggggagggtccctcactgccaccgcgcgcgcctctcggcccagcctcggcgtctcgggaagcagcatggcgacccggcgccgccgccgccgcgccaccccgctcacgccccactttcaaatcaaaatggctcaagccccaggccctgggcgggaggcaagacccccttccttgcaagtcctgctggagggctgcattccccacgcgaagcggacagatcgcaggcggtccgggtaccccttccacgcctggaaaggcctaagactgaggaacgggagccggggttttccagctgggggggcgtccaccggcggatagggaggggctgggcgtggaaataacgcccagccaggggtcatccccgtgtccctaaattcaaccccccactactgccagtgggggctcccgccccgtcggtggggaggaaggatgggggaagccagagctccttatctcaggctgggagaaagggatgaggaaatcccgaatgtttctgcgcgggggtgggaggcgcagagcgagggagggggcatcgaagggggtaggtcgagggtgggtacggaggccaaaccccgcaggcccgggaagagaggagttggcgggagaggaaccggaaggtgcgggtctccgttgttcggggctctcgttgtggcttttccgggaggtggctgtgttcttaccggagaaagtttcgatggccttcatcgcccagtgctcgtccgggcagtccacgaaggcgtagccggatttgaccaagaactggccgctgtaggagatcttgtgctccgcaaacactttctccaagtccgcgggggtcacgctctcgttgaggttgccgatgtaaagcttgttcatggtggcggtctcggggcaggacgcggtcccgggcaaggccgaacgagcgggcgcgggcggcgagcctcctaggccaagaggcggagaggccggcggcaggagccgcaaactttctttgcaccccaccccagaagttgtcccgagcccagggcggggaaggcggcctgagggcgcgcagaggtcgcgggagagttcggggagagcccaggagaagtgcccgcggcgcgcagggagacggacgacacggcgcagcttcttcccttcggtccgaaacccctccgagagggctggtgtgtcacgtttctccgcggccgccctggcgccgcctctaaataaaatcgacttgaaaaaaaatggagcggaaaaaaaaaaaaaaaaaaaaaggagaagccacgtggtgacagcccccacccaccctgcagggaaagacccccgacgccacagggcccctcggccctccggccaaacccgataatctcccgcctgagggtggggaactcaactcacccccggggtaaactggggcggtgcggcagcgtccctgaagctctacaggccccttccccctttgcaagaacctggcccctagggaagcgccccgcccccacccatccccctaccccagcccaaactgggggaggatggtccagcccagatctcacatgtcttaaagggtaaaatgtacggttatttttcattcgttttggggggcggggttgctcacccctccccggttaactgctagcgactgacaggcgggggacggccgagacagacaaagagaagccgaagactctggggtcttcaggagagggtcgcacgagctggtgatttaaaaagaaaggaaccttttccctagatgtttaaatggggggggtctccgccttccccacgccagccccacgaaactcccccgcctccggggatgcaggaccgggggaccctgcgagcgcgggactggaaagctgggaacggggtatcccagtggagaacgaggaagccgcaggaaataatgttttgagatccccacgggagaaagggtggttcgcacccggggtccggctgttaaatgataacgtttcggggtcctgaggggaacacgcggaactggccggagatgactccaggagacaggaacggtgggagacaaggaagaggagtgatagctagggctaaccggagcgaactgaagggggaggtcttagggagggagtgaccgggtggagatttgaatggtccccttttccctcccagagtcggggacagacaggtggagtttccagagcctgcaccacccgggacactgctggcagctctctaggccctaggttcgggtctcggaactttgtttggggtgcaggattccgatcctggcgggaaggcgggagagggacggagggcggggggctaagcgggaagccccgcccacgtccccaggtcagacccgcggggggagggggtaatttccgctccgcgcacggggaagcgaggggcgggagcttaggggagggggcggcggccactcccctcctcctcccgccgttcctggggagggggaagcggatccgcctgggtcccttccctcggctttgaccaactcattccggatcctccggctcccggagcccgagggaaggacccgactgggcaaggggcgacacgtgggcggtcgcaccccgtctgggcggtgggggagggggctgctcgccgcgcgtttcggagtcccggatacgcggcggagagcgggacgcgcggtccacgggcaagccccggctccacggcggagcggcgagcgaggccaacgagtttctagcggcggaggctgggatggcgccaggggtggccgagagcgcggcccggagaccctggaaccccctcgcccagggaacggggaaaaaggaggggtcgacccccagaaattctggaatccccttgaacagggcgaaaactggggtgttactccggactctgtgggagggaggataattctagcgggggcacgcgtgctgggagggcaggtgaggaagggggtcactccccttccccagtccccgaccccattgtctcagtcgcctgcggcccgggccgactccgcaacacgtgttgactacaccgatatgaatgccttgaattttttttattgttattatttttcgtttgcagagtctgagctgactccgactttggctcaccgctctgcggccggacgattgtatgccattcaaaaagtcgggagttgaaagacagcacgcagcacctttgtccccctccccgttttcccggcgcgctgaaaagaaatggggctgggacttaggggcgggggagggcttccaa

SEQ ID NO: 1244141 - DNA, 4001 bp, Homo sapiens
ggactgcaacaatggaagcttcaagcaccaggaaaagagacagagacagacagaggcacaggagagcaaaacagggtcggagatggaatgagaaacagaggcatagatacagaaagacagacagagagattcccaaagtaacagggaaagaccaacagtgacagagacacagagaaacagcaacagaaagagagggagagaagcagagcaactgaaacagaaacacagaataaggtggagaaagaaacgcacgatgggcagaagacactgaggaaaacagaactcgagagcatgactagtgaaactagaggttgagagacaaatcaggaagaacaaaagagcaagagaaagaaggaaaagagactgagagtctaaggagaaactgagaaacaaaaaaagaaagtgtaagaatgaggttagggcaagggccttctcagagtctctctctctctctctctctctctctctctctctctctctctctctctctctgtctctgtgtgtgtgtgtgtgtgtgtgtgtgtgtgtgtgtgtgtgtgtttctctctctctctctctctctctctgtttctctcccctggcgccctggccccttctctattccctatcccacacacatgaggctcctgcagctctcggctaggagccaagacttttctaccacctcaaatcctacctgcctggagaaaagaacagggggcctgtataccagggcaggcagaggtgtccaggcctggcagagggacccctgtcttcccactgcctctcaaacaacaaggtgacctggctctgggctttggggaagggcaagtctaatgcccctcaacgccaaagtccctctaatttgtatgtcccactccaccactggaccatgtaaaaaaaaagttcaggccctggctccccagaccactgggatttcaccctcggcctggatcaggaacagaaagctttccccactccctcatcctccccaacacacaccccaccaccatcctccagttctctggccctagacagctgacttaactggaccttaatctgccactcctgcaccagcagccaggcctcccactgggacccccttatcaaacagacaacccttggaggtttgagatggagcgatgggacagtctcccttggtggtggcaacaggctgctagggactcggtagcagtttccttgatgagcctgtcccatgccagtcgggccctgccacgtacctgccttctcttcaactcataggggatttttaagggccttccagggcggctggaatggggaagaagccgctgggaagggagcgcactcaggagggaattgggaggccaggggtaccttaccagagggctgcaggctttcctggatggcctcgatctccgccagctccatgcacacgccttgcccgtgcatcagtgtgtgcaggggcttctccacccctcggggcgggtagcagcgcaggcccgagccgcaacggggggtgtacaccccgcagggcatccccaagcccagggcgcaagtggcgcaacagccgcagcccggctctcgcaccagctcctcgcagcccacgggggggcggcagcgcgccagcttctcctcggagcagggcgggcagtggatggcttcgtcgcccaggctcggcccgggcccggcggccagcagcagggcggccacgaggcagaggggcagcatgaccgcccgaggactgggcgcgggcgcggggcgctgggcgcaggcggggagcgcgggcgcgcgggcgagcggcggagggcacacggcggcagcgcctggcgctcctggaggacccgacccggagggcgcggggagacggggcggcccggcgggcgaacggggacgtagcgggggaagttagcaggcgtgccggaggggagcaagcctggccgccgaggcgctgcgccgcatcctcggcccggcccaggcaggcggcgggcggcgaggggcagggggctgagcggctgcccgggaccggctcccccggactttataccggtccctggccacacccccagcgccttcccagaggtgggggagccggggcgggcgagggggagagggagaggcggccgttagggggagggggcgctgtcctgagtcgccgccgccgccgccgccgcatctgaaagtccttttctgccgaagaaggaagcggcgcagtttggaagctgtagcaggcgcccagagtgcctctgaaccggagccccggaggggaggcaagggagaagggaagccaaggggctgctgcggggccccctttcccgacctcggaggagtctcgtcccgccccgccaaggcggcctcagtctcccaccgagaaagggacttcctagcccggactcccggctctgcggatccggtcttcctggacagagccctttccaccgcaccccggtgcttccagcctcaaccgctggagaccaagcctcctgaggtggggtaaagcgtacaggcacagctaggggcacagaaaggcctggaggccctaagacgttaacaggctcttgccacttgccccttgcaacctctcccgcccccgcaatctccccagggcgcatttgggccctggtccaccctgcttccccaagatggaatcagcagaactcccggggagggaggtgccgccgagcctcttcctccttcttggatgtttgcctctcaggcccattcagacccactcgtggagggaggcaggcctgggagattgccacttgcaatgtgcaagttttgcgttgaacaactccagtggggcaccattccttgtaatcattgtgtatttgtagagctgttgtgatcatttcccagatggcagtgaaggatttgaggggcctgcagcagtgactcacacctgtaatgtcagcacttttggaggctgaggcgggaggatcacttgagcccaggagttcaagaccagtctgggcaacgtagtgagaccttgtctctacaaaaaaattttaaaattagccaggtgtggtggcgttcacctgtggtcccaggtactcgggagcctgaggcaagaggatcacttgagcccaggagttggaggctgcagtgagctagaattgtaccactgcacaccagcctaggtgaaagaaggaaactctgtctaaaaaagaaagaaagaaagaaggccgggcgcggtggctcacgcctgtaatcccagcactttgggaggccgaggcgggcagatcacgaggtcaggaaatcgagaccatcctggctagcacggtgaaaccccctctctactaaaaatacaaaaagttagccgggcgtggtggcgggtgcctgtagtcccagctactagggaggctgaggcaggagaatggcatgatcccgggaggtggagcttgcagtgagctgagattgcgccactgcactccaacctgggcgacagagcgagactccatctcaaaaaaaaaaagaaagaaagagaaaaaagaaggccaggcgtagtggctcatgcctgtaatcctagcactttgggaggccaaggtgggcagatcacctgaggtcaggagtttgagaccagtctggccaacacggtgaaaccccatctctactaaaaatacaaaaattagccgggcgtggtggcgcatgcctgtaatcccagctacttgggaggctgaggcagaagaatcgcttgaaccccaggaggaggaggttacagtgatccaagatcataccactgcactccagtccaggtgacagagcaagactctgtctcaaaaaaaaaaaaaaaaaagaattttaaggaagggatgcttttttaattcacccagtgttgctacttgggctagtgttgggcctggcttgaccctctgtaaaatcctattgatccctattcccccagccttgcccaatcctgcccaaattgagaagagccctggagtggcatttggagcaaagatccatctcctaggttccctctcaggcccccgctaattcccacccattcttccctacaaaggcttctgctgtactggagctgg

SEQ ID NO: 1244142 - DNA, 4001 bp, Homo sapiens
aaagcttattcatctgacatcttcatacatagaaagtctcaataaattaattaaaagataaatgaatttgttaaatgactttatatgctgaaggaatgatatacagtattgcattgtacaataaactgttatgaatcaatgtgacccccaaattgggcagaaaataaaggtattccatgaagtattctactttcttacattgccaagagaggtatacactatagaccaaatctctaatctagactgagatcaaaaccacaagatgatataaaaattttttaaatatcaaaaacatgggccagattagtctattttgggtagctataatgaaccagatattttaccacatcaaatactctatacgcaaggacctgacattaaaatagccaaattcatataattaacctctttttaaaatttaaatgttaaagttttttcattaagcataatctatactatctatctccatggacctatagatttaatctaatcatgtaaacacaactttaaaaagttattgatctacattctctttccatttatagtctacacactctaaattaaattctacacaagttttcattcttttcttcttaagggagtcttcaggcttattaaacatctgtgttagtacaccaataacctaagatatgctatttagtttctttattgcacattaaataaatgaatttggaagtattaacatttatagagaaatactccagtttctatggatttacatgattctgtacattatccttgatacgtggtatggttacggctaggaaaaatagtgttggagtactgatttataatttcataaaaacaaattaatcatttgtaataattaaagcatatgagcttttcaaaaattatttttcccatagtatacaacagcccaactttttttccttgttattggccaataaaacctttgttaaaaattacacttcaataaaccattatttaaatgttaaaaatgcaaaatttttaaagttttcaagccctaattaaaaaaattaaaagcataaagtttttgatattttaacaactttatatactctagaaataaagctgccaaagatcagttcattgttaattagagattcttccattattatgaagaaaatacccacgatcttcatatttatcaaagtaacattttagttaggtgtcaatatctcatttttaatagaatgaaattctgaatttcttaatcccaccatccccccccgagttgagatgcatttgccattttcaaggttttagaaacacttgttgaaaagaccattgaagagtttacagtagcagtgtgaaattttaggtatcccaaggaagtacagaatgaaaaatgtttgagaagcaaggatagtgttacgactttcaaaattaattcatatgaaactcctaatgtgaacctgattttttgcgctgggtaaagaagactcattagaagatcgagttccaagggaactgcaaatgccaaccgctttaaaatgtacctttcccatatgacaccatttacccttggaagaaaacaagttactcagattagtctaattccaataaacactgaggccatgaaggaaaaaatatccaaaagggttgattattccaccccagatttgcagccatttcagggacaccccttaagtgctcttcctctgcagatgtagggtagaccccccatgtctgacaactctttagaaataaaattgcgaagaagttatcactttccaaagggcgggggaaggacaagtgagagacgttaagagaaccgacgcgctttgtcctctgaaatacctcatatttacttttgacaaaagaagtaaatagaagcaaaactgagattcagaagaaactctttctactgcttgcacaggttaagtttctcaaagaccccggagaaaagaagcgggctggaggctcaccttccatgtcgctgccgggccgggctggagctgccgctgtggctactcggcctctccacgtgctcctgccgtcgcctggactcagcgcgcagctggcgggagattcccggcgcggggagtccccgggatccggcagccgcgtcggcgcagactgaaaagggcaggagccggcgacctgccggtgcgcggggttacagcggcgctggctggcggcggctttaaaggacgctggccgcggagtgccgcgggttccgcgcctccagccccctttcgaatgtcaaacccaaggaaccccgacaggatggaaatgtcgcatcactaaattgtctcaaaatgtctattttagaaggataatggatgagaaaagtgacatcacacggagggtcgggggtcagccttgctttcttggcaagctgaagttcaaagacgtttatcttaaattgaggaagatctggaactttttgtctagattcagtgataacagccgtggaaagtatcaatgagaacccccttctttcaaagtatttttttttccttcctcactttttcatttcacatggtaaaagtttttggtccaagttttcagacagttggaaaggattttggcacttctatcaattcaactttttaatttttggaagcatttatctcacttttgttttccctctgggaactgcttgatttatttgccaccactcacgcaatactacccactctatataaatagagggagtgttttatagagtgtgtttattttctcccagcctgccttcttctaaatacacaccttacaaaaatacatatatgatgtaccagaaaattaagcaaagaaagtagagctaagggtggaaggtgggggcagtaagattgtaaaattaacttaaagatgttagtatacagatatgtatcagtcaacatcttctcccaacaccctccctactgtccagaggtaaagcacacatttgactgcagagagaggaaaggggaagtgaccacaaaactgtttttcaaagcagaacttttcttcacattgaggtctaagggacattgttcaggtgagcccttctaaagatatccagcgtgtgggacaatatacgaatgagtctcaaaaggccactgtcaccgctattagaaaattatattagtgcatacaaatatatttgagacttaaggctgagggtttgtgcatcagctgtccatatcagaagaaacccacacttacaagttaaagtatacatgctgtaattttatgaattgtagctttaaacaatagtatgtcgttggtataggcagtctatgtgatgtgtgtatatatattcaagtgggtgaaaaactacactggctttaagcaccacagtagcatctctataactgtatgagttgggagttctgcaggatgtcaattttggagaaatactctaaacactaggtctaattttagtactgaaaggggaaatttgttgtttgttagtttctaaaagcaaaaatagcacatcaaaagtagcagaagaggaactgtaaaatttcacagggatggtatgaggatgaaaagttatttggttatgaaaaagttgtaggccaggcgcagtggctcacgcctgtaatcccagcactttgggaggccaaggcaggtggatcacgaggtcaggagttcgagaccagcctggccaacatggcaaaatactgtctctactaaaaatacaaaaattagctgggcgtggtggcgcatgcctctaatcctagctactcaggaggctgaggcaggagaatcgcttgaacccagcaggcagaggttgcagtgagccgagatcttgccactgaactccagcctgggcaacagagtgagacttcgtctcaaaaaaaaaaaaaaaaagttgtaaggaaactttatgattttccattacaatgttcttctgtatatttgacagtggaacgtgttagtactctgtaaatagttcaatactgagtatttcggactcccgagagtgatacctaaggggattaaaagtgaattggtaaaataacttatgtagctactccaccttcaaggagatgcagcataaatcccca

SEQ ID NO: 1244143 - DNA, 4001 bp, Homo sapiens
gtgagaccccgtctcaaaacaaaccaacaaacaaaacccataactttctccaaactaaaatacactcagaataataaggcaagctttcttttgtactccagtcagaacctcttcacataagtaaagcccaaaagatatatgggaatatttgtagacaatgtcttaaactcaccatttgtttactgtgcctaaactctaaatggaagtcactacatgctcccctgacatgtctcaccaaggggagggaggacagcaaggaggaggggatctccctaaactgaaatataccaacttttctctgacacaatttgttcttaaagtgactaaaagtgcacaaaaacctttcagctagtcaaaataaaataagtaggcagaaataccaaattaggtaattttgaaatatatgggttctttcaatatacctctataattcacatagactgtttgcttgtcaaaacattatctataccagaatcaaatttagtcagatttaaaaaccaggcaggcaacttattatctgtaagagctattgagaagaataaatacaaaaggactgaaataaaaaatcaacagcggcaagcagctttggaaaaagaggctgagacaggtttctaaaatattactgatgttgagggaggtctattttcatgtgataactatttttgttcaatatcaccaactttcaatttatagcaaaactgatacattcaatttcagctgtctacttcacaaatacaaatctatttcaaatatcatggtcacatttatgtaaacatctgggagagttcagcaaaatgtctctgccatttggaagtcctaacacttcaatgaacataattatttcatacccatctcattctgctgtattttttgacaatgtgaaaaccaatggcataaaaatgaactccagtaagacaaatgattaaatcaaaccttgttatttaaatctatgtttgcccaaccactttcccttaaagccaattctcaaattcaagaaaatatggcaatatgttttagagcatgaaaaaagtttgagcatgctaacgaaccaacttgtaaaatataattacaaaagattacaaaaatgctatcttgaacatcttactggtataaattgcataaactctctcatgcaacatatgtcattcagagtaaagaggaaggaacaggattttaaacatcacatccatttaggaaattggatatcaactactcccatctcctgtcatgatgatgctttagttaatatcttttattctattttccagagctatcagaatgaaccatgaagaataaaagtacacaatgaaaaactaattattttaacagaggttaagctaggaaaggccttgtgtagcaagcatcctatgttatttcattcaaactatctgctaacaacagcaggaaaaaggtttgtattcttaccaatgaatttctgaggcattgagctttttcgttttgccacattgcttgctaatctgtccagtacgagagctctttcacttcccatctctgctttgatgtgtcttgcctccgcacttgctagtttggaaaaatgtaaaaagaagagagaaaagaacacattggtacatggggagaaaaggaaataaactggaaggagaagtgtccgaagttggatgcacactctattgttgttacctgttataactgctcagattcttgcctggggtacctgctgtggtcagtgaagccgacaccagggcacattcaaatcttgcagtcttatgccgagatgggaaagctcgacccatccccaaccagtaccttcattagcaagaggaagtattaaataaacagcctggacgtggttggttgcaaaaagatagatagatggagatctaacccccgatcagccttctttctgattctgagtaactgcgtgtgacacctgcagactgatataattcttaacaactttgaaaaaaaagcatggtgccccagatttactgctctgtttatgttaacagcacttttgaaaataggtacactcacacagatagcaagacatctactcagtgatttgtgtattgaaattctgagtggtttctttctttttctttttctttttttttttcagcacgctcctctcagttcctatctttcatattctgtttctctgtgctctgtattatctgtttcatatgctcttcacatttcaaaatagtctcaattaaaatttccctaagcaacacttctgccttgaaattaaagaacaatttgtataatgcatctgtattgaatttctaataaaaatgtgaataaaaactgcctatgggctgggtgcggtggctcatgcctgtaatcccagcactttgggaggtggaggtgggcagatcacctgaggtcggagttcgagaccagcctgaccaacttggagaaaccctgtctctactaaaaatacaaaattagcctggtgtgatggtgcatgcctgtaatcccagctactcgggaggctgaggcaggagaatcacttgaacctgggaggcagaggttgcagtgagccgagatggcgccattgcactcctgcctgggcaacaagggcaaaattccgtctcaaaaaacaaagaaacaaacaaaacacaaaaaaacctgcctatgaatgtgggcccatccacaaatagacctgtgagtggtgtaggcctgtggttctcagacctggctgcacattagactcacctgaatagcaggtaagaaatacctatgcccaggccccccttcagatcaattaaatcaggatttctggtataggggcctaggcaagaatattttcaaagctccccagatgattttaaaatgcagccagaattgagaactactagaagagtatataaatagtggcaatatctaatcaactaaaatagtaaactgtaatgaatataatttacctcaattcagcaggcagtgcccaaatttatgtctaaagttcaaagaaggccaggcacggtggctcacgtctataatcccagcactttgcaaggccgaggcgggcagatcacctgaggtcgggagttcaagaccagcctgaccaacatggagaaaccccatctctactaaaaatataaataattagctgggtgtggtggcgaatgcctgtaatcttagctctcgggaggctgaggccggagaatcgcttgaacccaggaggcagaggttgtggtgagccgagattgagccattgcactccagcctgggcaataagagcaaaactccatctccaaaaaataaataaattaattaaataaatttcaaagagataccagcttctctaaatacaaggcttgacattttaacacatgatgctagcctgaaccagggatcagcaaacttttgtctgtaaagggccagacagtaaattttaaaaatttgccagacacatatagtctctatgttatattctttgttttttgttttttttttttctgttccacggccttttaaaaacgtaaaaatccctgtacacaaacaggccactggctgcacttgcctagagcgccacagtttgccctcacctgccctgggcaaacatattgtgatgctgtaaacatttttctctgttttctcataaacacttcgggagatccaaactaaaatgaactatccatacatttctattatgtctaaggaagaataaattgaaattagtttaagggattagagtaaaaagcaagtagtggctggcacagtggctcacccctgtaatcccagtgctttgggagactgaggcaggaagattgcttgaggccaggagttgagaccaacctgggcaatatagcaagatcctgttcctacaaaaagtaattttaaaaaattagctgggcatgttggcatgcgcctgtagtcctagctacttgggagactgaggtgggagggttccttgagcccaggggtttgaggttacggtgaactattaaggtaactgcaaagaccacaattacttttgcaccaacctattagtgccagtgcactccagcctgcgtgac

SEQ ID NO: 1244144 - DNA, 4001 bp, Homo sapiens
acagagagacgtcatctctatttaaaaaaaaaaagttggctgggtgtggtggctcacgcctgtaatcccagcactttgggaggctgaggcgggtggatcacctgaggtcgggagttcgagaccagtctgaccaacatggagaaaccctgtctctactaaaaaatacaaaaattagccgggcatggtggcacatgcctgtaatcccagctactcaggaggctgaggcaggagaattgcttgaaccagggaggcagaggttgcggtgagttgagatcgcgccattgcactccagtctgtgcaacaagagtgaaactctgtctctaacaaaataaaaaaagaaattaaaaaaagttaagtgtggacataatggtcaactggtgacagggaaggagggggcagttgggaatgcctgtggatagggaggtcagttgcatatagggacagccaaagatgacctgaaggccagttggggtggggagaaagggcagttaaggctgggcacactggctcacgcctgtaatcccagcaatttgggaggcggaagtgggtggattgctcgagcccaggagtttgagaccagcctgggcaacatggcgaaaccccctctttaccaaaatacgaaaaagtttagccaggtgtggtggtgtgcgcttgtacccggaaggctgaggtgggagtgtcatctgagcccgggaggtcaaggctgcagtgaggtaagatcgcaccactgcactgcactccagcctaggcgtcagagtgagaccctgtttctaagaagaaaaaaaaaaaagccaggcgcggtggctcaagactgtaatcccagcactttgggaggctgaggtgggcggatcacttgaggtcaggagttcgagaccagcctggccaacacagcgaaacccagtctctactaaaaatacaaaaattagccgggtgtggtggcaggcatctgtaatcccagctattcgggaggctgaggcaggagaatcgcttgaacccaggaggcggaggttgccgtgagccgaggtcagcctgggcaacagagcaagactccgtctcaaaaaaaaaaaaaaaaaaaaaaaaagaatactagataagttaggagagagtgcacataggctcccgaaggacagaagcagccagctggaactgtagaggtgaactagtatttatccaagggaactagggatgggctgggaaagcaggtgaggtcaaaagcggagagaagtataccgtgcggaagcggcagatggggctagttggagttgggctgaaagggcctaaagtggggtctaaaggggatgtcctgactcggaggggggtcagcagaacgcgagggagcagcgggagctgcggggcattcgggcctcagatagttgggtccaagcgggtgacctagatccaagggcaggatggagctgaaggaagccaggaaggatcctccacagttgacttcggggtagccacggcctgcgcctgcgagggtggatgaggacccgagggtccggctggggctgaggggctgcctggagccccgctggagggaagcgccgggccggagggcgcggcctgcgcctgaaagggcgacggggaccctcgacaggtggaccgggcgtggccggaccttccgggcagccccgcccgagggcacgactgggggctgcttccctcgagaggggccctgaggtggtgggcccaggctgaagggcaggctggggcctgagggacgccccgggtctgagagggcagctccggccttaggcggcacccgggcctgaaggggttgtttgggcctcaggcggcgtccagggcggccgaacttgagggccaggcggggacagagcgcccgagtagccgcgccacggccggccgcatttggccccagcacctgaagcagctgcgcggcgaattctagaactcggcggggcggggaggagagagacggcgattcgagccgcgggaggagccggcgggcggtgctcgtctgagggcggggcctgagcggagccaccttctgggcgggcctcggcaggaggctccgccccctggacgcgcctccaacggcggcgacgggaactgggccggggcctgggtgcccccgcgggtcagcccccgacgtttccctgttcttcaggcgtctgcaaccctcctgggttgcggcgtctgctcgcccttctgcgtccgcagctcggtccccacgttcccgctcgctgggccccacaggccaggagcgttgcccctttaacaagagtagcccgggtcgctcccggctccttcccgggaccgcgcgtacccgcccctccgcgcgcgctcgcgcgtcccccgcccctcgctcccgccccagctcgcgctgcccgggcgggcgccggccgctggcgccgctactgctgccgcccccggggcgcgagtccgccgcccgccgcccgggcacccggcgaggggcgggggcagctccgaaccggccccagatccttcccgcttccgcctcacgcttcccggaaagcttgtccctctccgccgagctgctccgggagccccgccgcgccgaggtgagggctggggaagggggagggaagggacgcccgcggaggaatgtgccgggttggggggcggggagccggggtccggcggcgcgatctaggctcaagagtcgggatcatgtgctgtttgttccgcggaggcgcagagaggtgccaggcccgggcggccgccggctggctggacaggaggacgggtccgcatggccgccctgagaggccgggcggggacctgtgtgagaaccgccgggtgggcaaggtgcaggtggcccaagaccccctttcgggccggtcggccccaccccagccgcccagtatcctccttgtaccccacggctccttcacagctgcaccggccgacccctgtccctacctctattcccttaccccgctggcccccagccgtgccaccccatccctgtcccattagctgcagcaacggcgtcaccatcgcttgtccccaccagtgtccttccctcccctggtcagggtctagggggtcagggctgttcttcctgagccagcttctgtgattccagctactcccttcctgtcctgggacagaccagcccctcaccctcccatgctctgcccaggaagactggtgaggggaggcccagcgtgacaggagtttggggtccactggggccacaggagggggctccgcatcccttatccttcgtggtcctcctccctgttgtccgtgggcgtgggctgctcagcctctcctcccagggtgtgggcacccgatcacccacattcctgggctccagcctggcaccttccccagggcagtggacgccatagcactagccccaggttggggctggcaccagccagccggcttccttttctttctcccttttagggaggccccagggaccctctaccctcaaacacaggtatttctgggcgccccaagggtggagccctgagggttggtctgatggctacaggatgaccccaccctcccctgctcattgtcccggatcctgaggaggaagtgctgggggctgggcaaggggcttagagcccacacagctggccctgtggatcccagtcctgggccctacctacagtccttggactttgcccatctgcactactggcctggtgcatggaggttgtgggcctcaggtggaaactagattctcccttgccgacactgtgggggaatttgaggacaggttttgcatttgcagtttcctctctggtctctcttctgggctcccagtttgtgctttggcgccggagttccccaccctgtctctttaacaccgtgtgtttgctgtgctgtgtctcttcctcctttcctctcccattctttccttcatagcatgacctcaggcttgccttttgtcttatttctctaattttcttggtgtctgtgactctctgcccctcctctctctcttcccacccccctcacgtctctgcccatgtgcccctctctctgaattgccctct

SEQ ID NO: 1244145 - DNA, 4001 bp, Homo sapiens
aagcacttcagcgagactttttttttttttttttttgagactgagtctcactctgttgcccaggctggagtggactgggatgatctcggctcatcgcagcctccgcctcccaggttccagcagttctcctgcctcaacctcccaagtagctgggattacaggtgtgtgccaccacatctggctaacttttgtatttttagtagagacggggtttcaccatgttggccaggctggtcctgaactcctgatctctcaggtgatccgcccgcctcagcctcccaaagtgctgggattacaggcctgagccaccgcgcccggccaaggagtttttaagtaacaggtttctcgacatctctcttaagagtctatgctctatgtctgcgtagtattccgtgaaaaataaagagtactctctggggaaaagtcatcagttggatattttccacctcagcttacaagtcttagggaagcaagaaaactagataaggggcctcaatgacactggatccagtcagaggctcaggaaagagagacctacagatgtctttagtggaacagtcagtcacagcagctcttcaagaagcctcagactgtgcggagcacagagcgggcaggagctacagaccctgcagagaccaggaacagcctagcatgagtcctaggcacacgatgaggagtacctgcagcagctggagatctggaatggcagagggtacagggggatgggagaaaagggcagttaatgccaaaacatctctcctccaacagaccccgtccttagaggtcgacgttctcaaaagcacttcaagaaattcttggccagtttaaagcaacttcctgtccctccctgttagcataaacaacactatacagaaaccaccttcccaggcactcggcctgagattttgagcttcatttgtttacgatctccccctgctgtccgacagaggcttaaggaacaaagaccttttactcagagacttcttttcccagactcactctaagaggatggagagcaaaagtccggatttcttgttcccactctcaaatccgacgattagcagcaaatccaagcatcgtgacttagactaagtgggcgattagcgttgttccccgtgaaagagcaggcaagagaccaggctaagtcacttccctaaaggatcttatctcaatctgatttcggattcccggggttcaccatgggatcaggcagacctcctgatgtatgtgctgatgaaaagtaggaaaaagatttctaaccgagagccgaagggtgacggcctcgttatgtctttaacctcaaacaaccccacacggctgtcctctccagaaagcaaccgggacacctgctgcgccccagtgggaacgagcttggcggcctcggcttagagggggcgcgaggctcgggcccaacacagcccacctgacacaggcgtgggagaaggcgagagcgcctctgaaccaaaggcagtcatggaggtctggtgccttgtccacccccagcccgcagcccaaggggcgccgatccccccgagcaggcctgcctctgccgccagggtgccctcacctgagcctcctgcctttcggcccgctcagcttccgcgagctcatggccgccgtcgtccccgcgcggtggtccggcaggttcgcgtctcccggccagcgggtcccggccagagcagccctgcgggcggccggtctcacgcgcctagctgtcgcggactgtttttcttccggactccgaccgtccgccccggcttccgtcagagacgcgccctccgcgcaccccgggatctgggtggtgcggttcgcagaaggaggcgggactctcccacgagcgcaaagctgcgagaggctgagcgaagacgggttcgcggacgtaagaggggcgtgtcgggcctgtcatcagcgcacgcgcaacactgccccagacgacgcgaggtgtgcggccgccactagacccggcccagcccgcgcccgccgtccgcagctcccagcgtgccccgcgccaggggccgtcttccggcggaagttgtctcttcgccgccgccgcagcctctgccccactcgtgagggatccgagggctccgtccttgtgctgtcttcgccccggctcccaggggtcaaacgagggtcgggggtggggacacgcagcctagccactgtcctgcctgggatccggtctcccccgccccccggctgcaggtaatctccccattcctgctactgcgggagcgcctccgttctccacgcccactttcaggcttctactccaaacttattggattacctattgcatatgggacgtttggggattcctggactcctacagaattagccgtcaataaatgaaacgtaggccggggcgcggtggctcaatgcctgtaatcccagcactttgggaggccgaggcgggcggctcacttgaggtcaggagtttaagaccagcctggccttaacatggtgaaaccccgtctctgctaaaaacacaaaagctagctgggcttgatagcgcgcgcctgttaatcccagctactcgggaggctgaggcaggagaatcgcctgaacccgggaggtggaggttgcagtgagccgagattgcgccactgcaccccagcctgcgcgacagagcgagacttcgtttcaaaaaaaaaaaataataataataattagccgagatggggtttcgccatgttggtcaggctggtctcgaactcctgacctcagctgatccacccgcctcggcctcccagagtgctgcgatttcaggtgtgagccaccgcgcccggcctaaaactactttaaataaatgttttgcttgtttggtagggtggataaagaggaagatgtgaagaggaggcagacaaaagcaaaaggacatcctgtcagtaggaaacggccgaattacaattcagatgtgcaatgtttgcataagtaaactgacacgggactattatatgcagaaatccacgtgcaaaaattttcagacacacctttgtacctcttcctaatcctgccctggtaaaatggcggttatcagtgcaagtttgaggatacatacagctggaaaatggacatcaccaaactggactccagaaagttctgtctaggattttattagactgctttttttctcaatatacctgtattggaagattgagacaaaaaggcacaaactcacattaaataaacaaggtaatctaatcaattctacaaagtgtagtttgtaaaacaagtagcactaggaaccaaccaaagtaagtcagggagtcccagcagggactgtaaaagaacttgggaagctatacacatgcccacgatactgaccctgtcccggacctctctgcatgagaaggccagagcccagcacccctcctacagaggcactgctgcttctgttggggctgtgaccctggaattctgatggaagcagctggtctgaaggggcatggcacacactcaggtactacccctggagctgaacctttatcataagtccctctgagtgctagtcagtttggaggtgggtgaggaggaaagggggtacttaaaagaagccaacactgttgcccagcagcaacaccatccgtggggatggaacagaccagggacatcctcctttatgtttatgtgggctgcaattccagatccaggctgacctcagctcataatggatgcttttcaactggggcaacaggtggaggtgggaggagcccttgttagggctaaagtgatatgtgtgggtctcaagagccaaaggaaggagactaacagctgctgaccctcagaccacatagacaactgtctgcctagaatgtcagtttgtttctttcaagataacccgcatctggacttcccctagttgatgaatgaaggaacatctttaagcacaaatataatgaatagctaacacagagcttataggaaaacactgacatttttctccagtaggaatgcctcttctccaactttccaagtcagataaatgctaccagcagttg

SEQ ID NO: 1244146 - DNA, 4001 bp, Homo sapiens
actctgtctcaaaaaagaaaaaaaaaagcctcccaagtgattccaataaatccctctaatctaggggaagttaccctacctacttcccactgaaagtaattggcctaatgagtttagcccacatacaacagcacattgccatatttctctagataacattttataacatggaagtcaaaagattctggaactgtaactatatacagaaaagacctaagtaaaatgctctccagaatttagattctcattctctcttttctggagagctctaaaaaatatctgattccctgttctttgtcaaatccaaatccacatataatataacataacattacctaagctgctgttctttgctggcatcttgttctaaagcatgaaagtccacggacaacaatgcaacaatggagttgacagcttccactccagaaagaaggcgaaggatgagtttcttatcctgagcccagctttggctctggtcagcaggtgcacaaagtgccatccgtaccaaacagggcagaagaagtcttaattctggatcacttaaagatgccaggcaaacaacatccaccttctgcattgcctcaaaagcaaaagggctgacaaactgaagacttgtacattcagtcattattactgtttgttgatcctaatggtaaaaatacaaatgaaagtaggagtttaactttcacatgtatgaacacccaactttctaaaaaccctgaaaaatgtggtgtatctttaataggtccctatgttggcaatgttcctggcacaatcaagacaaggcttctctgtctccctaggtttatactgtcacctgggaaatgggaaagaaaacagagtatattaatgtctcttccagcctcaggaatcttctgctctaatactcatattttacaaagaaggaatatgaagcccagagagatgaagtaacacgcccaaaatagtattactagttagaggcacaatccaaggctgaatcctcatctactaaaatcccagtccaagactttctccactatatcagtcacatgagctccacaaaatgtaaacaaaagtgaatggtcatagttaagtgctttctttcataccccgatagtttcacatgcctaccccgatatacatcaagaactattgggcttctctttctcaccctccatgagtcggtggaaaaactagcaaatcactgggcagaaccaatgccagattcaaggctctggaggccacaacactatcctatgtcccctgtgttaccgggtaaaaagcagatgtgtgggtgctatgtgagaaagacgcgtctcattagcgcacttctctgtctccaggaatcatccaaggcacaaaaagtaaacaaaaaggcagtgagctggcagccaaagcagtcccctctcaaggccgaccgactagcagcagcgtgggtaaaagtcgtgggtaaaaactgctttgctttcagggaggggctgctcttttaacagaggggcgggctgactggagcagaggagccaagacctgcgtgctcctccgtctcgccccgggcgcaactagaaccaataagtccctcaggctgagcaaagtctggccaggctccgacacggacctaggaacgcgctgaggccagagaagcggacgcttcataccttaagatctaccctccagcctcacggaaccgcacacggactccgcgtcctagaggcgggacgcggcagaaatcgagagcgcggtccgatgttgggcctaggcgatatccggaaccccaaaccctagttgtgcctcgagtcgactcggacaccaagaactcagacgccgggaccaaccgggttgtcgatacaaagtgggaaggatgggggcaccacacaaaggcagaaccgggactgtaggaacggaaaagcgggagactttttcaacctgcacccagcaccttcattcatccccagcgtctgactcccgtcggccaccgtactggtctgagaggaagggtggctgcgagaggaaaggcagagacgtcggcgccaatgcaactgtgcgcgtgcgcggccccgcccctttctccactttatttgccctgccctacttgttcgccaaaaatttagaaatgtgattctggtaggctctgatttccagagcctaccagctccttccttttagacaagcaagccactgagcccctcagaacttaaatttcatcatcacaggattgccatggcattcaaatggcataacgtgtgttaaaatcgttcccactattctttgacactagtggtaccaaactgtactctttaaatctttgcctgtgccttcccagaaccaaaattctagaatcccaggatttgtgggagaattttaaaagtgatctaaccccaaactttcttccgctcttgacctcacacctccgctgtcagaagttaaacaccttcctttcaggttcttaacttgggggacccatagaaccttagagaggcaatgcacggggattcaggaattctctggaatccgttcagaactgagtgctcggcacttcttctgggaagagggtccaaaactttcaacaacttctcaaaggaagtctgatcactcagaaaagaaccactagtctatatatgaagaaccgctagtccatatgtcttcatactatttattgttcctagttcgatcaacgtttatttggcaacttctatttaccagatattgtgctaggagctggaaataaaaatattttacaaagatatagcactttataacctctttaaaaataaagtcagagccgggcgtggtgtctcatgcctgtaatcccagcgctttgggaagccgaggcgggcggatcacctgaggtcaggagttcgagaccagcctgacgcaacatgactaaaccccaactctacaaaaaatataaaaattaggccgagcacgatggctcatgcctgtaatcctagcactttgggaggccgaggcaggcagatcacgaggccaggagttcgagaccagcctgaccaacatggtgaaactccgcctctactaaaaatgcaaaaattagccaggcgtggtggtgtgcgcctgtaatctcagctacttgggaggctgaggcgggagcattgcttgaacctgggaggcggaggttgtggtgagctgagatcgtgccattgcactccagcctaggcaataagagcgaaactccgtctcaaaaaaaaaaaaaaaaaaaaaaaattaccccagcgtggtgatggagcacctgtagtcccagctacttcggaggctgagacaggaaaatcacttgaacctaggaggcagatgtttcagtgagcagagatcatgccaccgcactccagcctgggcaacagagccagactccatctcaaaaatatatatatatatatgactttcaacatagatcagcaaaggaagaaaagaattgtgtgttgcaatgcttctgaaaattttttccacctgacccacaataatacatttcacattgtgacccagaaaaaacatatgtatatatccacatacaaaaataagtgtaagtgtataaatttatatgctatataaacatataaatatataacatataaacccacatttacatggaaacaaatatttcgtataataacacacacactacatgtttctacttctctttaaaaaactgctggtcactgcacactaaaactgatttcacactctattaatgggttgcacactgtactgtcctagcatttttaagctaatatttgggatttatttattgaacacttgctaggcactgtaataaatgctttatatatattatctgattcaatcttgtgacgtaggtaatattcgccttttgcaattgtggaaactgagagagggtaagcaatttcatctccatggatggtcatttcacaggaaaagtgtgaaggcagtgcaaacattggtttgagggacgaatgagaggaagatgtgggtatgaactaagtgattttaaagatcctttccaactctaattatgatcctctgttcactaa

SEQ ID NO: 1244147 - DNA, 4001 bp, Homo sapiens
agagcgaaactccatctcaaaaaaaaagaagaaaaaaagtctgggcatggtggctgaagcctgtaatcccagcactttgggaggccaaggcgggtggatcacctgaagttgggagttcgagaccaccctgaccaacatggagaaacctcgtctctactaaaaatacaaaattagccgggtgtggtggcacatgcctgtaatcccagctacgcgggaggctgtggcaggagaatcgcttgaacccgggaggcagaagttgcggtgagccagtgattgtgccattgcactccagcctgggcaacaagagcgaaaccccatctcaaaaaaaaaaaaaaaaaaaaaaaaaaaagaagaagaagaaaaaaagaattgtcagagttgatgaaagagggctggacccttatcaaatgcctcccccacacctgcctccactctccccactcacccacttctcattgatcagacactggatgtgggccatcttgggaggggacttggagtgaactggctctcttcagcagaggaaatcccctaagtggctgacacttgaaggctatctgccattgccacccattgccactccctgaagctggtgggcacagtgtctctcacaatagtagctcagggtacacgctatgaagaggaggagccaagactctaatcttggcactcttgattctgaagcctgatcaatactaatcattaatgacctattgcttcttttcaaatatttataatgttgatggagatgagggaaatggaacagaaatgcaaggtgcgggagggtagacaactttagttctgcaaatcaatttaggacatgtgctcctctccacatttcctttcttttttttttttttttttttttgagacagagtttcgctctcgttgcccaggctggagtgcaatggcatgatctcggctcaccacaacctctgcctctcaggttcaaacgattctcctgcctcagcctcccgagtagctgggattacaagcatgcggcaccacgcccggctaatttttttttttttgagacggagtgtcactctgtcacccaggctggagtgcagtggcatgatctcagctcactgcaacctccacctcccgggttcaagtgattctcctacctcagcctcccgagtagctgggactacaggagtgtgccaccacgctcagctaatttttgtatttttaatagagacagggtttcaccatattggccaggctggtcttgaactcctgacctcatgatctgcccacctctgcctcccaaagtgctgggattgcaggtgtgagccactgtgcctggtctcttttttttttttttttttgtatttttagtagagacggggtttctccatgttggtcaggctggtctcgaattctcgacctcaggtgatctgcccgcctcggcctcccaaagtgctgggattacaggcatgagccaccgcgcccggcctcctctctgcatttcaaggtgttgagggtggagtggttcatacaactgacccttggggaaaaaataaagcatcaactcttgtcttccctttgttcttgctgtagttttcagtgcccatcagcccacatgtgccctgcccttataccttcacctgagccagtcccctggaccccaacattcttgacaagaaatcaacctgaataggccccacaagtcaccttgctcaactgctatcgcaaatgggaaactcgaagcccccagaagcagtgatggggaggggtcctgctctctcccaataccccaacttcccttacggctcacctcccatggctgtccttgtggaagtccagtgaaaatccaaactggctgccattggggcctgcatagaaggtgagctgcactgggtccaggttcaaggcccaggctggaggggcagcacaaggtcccaagagcagcagcacccactccagaagccagagggcttgcagtggacacaaagctctggccatcttccttcttccacaacctcccaggcaggaatgggccagctcctcctccttcccttcagattcctccacaggaagtcttttcttatcaaactggaaccccaagtaacttgctgagcaacgggcagagcaaagggctatagcccctggactcatggtggctagaattgccaggaagtgggtgaggccacccagagggtggatgctcatggctgaaagccatgactcctcccctttcctgagaatagtttattaccatgtcctattggttctgcctatcaatgatgtctcttgaatctttaccccatctctactaccaccgtgctagtccaagccaccatcactttctgcttgggatagcgtgattgtgaactggtccatacttgtctactctagcctacagttctaatctcctcccttcccccatctggctgtacagctgtggtgctttgtgacttggccacaggtcggggaaggagaaggaagctgctgcccccgataaaacctgaggcttctgtatctttttggatatggcatttacccacttcctccttctaggaccttgggcggcctcaaccagccatattggtgcagcagcttcctcactcctcctccgtcttgagccaagctttagtgtggccacagcagtgcagtcagtgctggggacagggtggtgaatggaccttggtctaggtggcaaggagattggggataaagtggagttattccagggaattttgactcacagtttctgagattatgcattagctgttcagttgaaggtaggccctcaatcctttttgggtgatggagctctttaaccattaagacttgattctggttgggggctttgcctaggggagccttccctgactcctcaggctggccgcgtgggctaacacacgtaggcacagcattgagcacactgtttactcttggtccgttcacaggattgtgtaaatgagtcccttgggagcaaggctccttgctacagccctagagactacccaagagtccaatgtgtagtacgtgtattgctgaaagactggatggaaacacacactaaggatggaagatgcaaacatagggtgacaaagtgaagggatgagttttgagcagaaaggcaaagtcattttctctcggtaagcggaagaggaggagtgccaagtcttactggcactcatgccttcccaaaaaagcaggttctcaggaagatttaagaggtccgctaggggtaaccatagccacattttccttttgatttctattttctgatcaaacttaaccattgccgtatcctgctcaaccaccctgtaccattttgaagtcccctcgtaatttactacctcagcctagagttaagaatcttatcctttataggacaggaagctaaaagcctgaactttggtctgggccttcttcattgctgagttcccagtgtcaagtacatgggaggcgtgtaattaatgtatttgcttgaacgaatacttaacccagtcctctacttaccttctatcctcccactgtcctcaggtgagtgattgctgtattactggtgtattctgtgaggccaaatatgaacttacatttcactcaagttttcaataagtatttactctgttcaaggcactgtgttgataaaggatacaaagataaccattaggccaggtatagtggctcatgcctgtaatcccagcactttgggaggctgaggcaggaggatggcttgagctcaggcatttaagaccagcctaggcaatacagtgagacctcgtctctattttaaaattataaaaaataaaatattttaaaaactccaaagatagccatcaaggagacttaacaaacagcccagaaagagttaagacatgaacacacataactgcagcagagagacagtcaagcatgccttgaaaaatacacagattatcaaagtcgtatatcattgttactcataacaaccctaggaaataagtactattatgcccattttataaacacaaaactgtggcacaagagttttaggtaaattgccc

SEQ ID NO: 1244148 - DNA, 4001 bp, Homo sapiens
atagagggttggctaaggccaggtggcagctgctggggccaggctgggaagggtgtggtagccctagcctctgcaagagcaagatggagttgaggttaagtccaggtaggtaggctgggtcaggagggcagaaccaaggcgggggcagagtttggactttggacattctaaacttcctcaagctctgcaggccccagccagagcagggagattttccagtgtaccctggatgtgaccacgtcttcttgttcagtggggtcagaggccaggtgggggcagaggctaggtgggggcagatgcctggcagatcgcccagcccaaagtggtggatggtacctgcttaacctgtcctaaacaccgtccctctttggacagcttcacctcccccaaccgccaacctccgcgcgctctgaggccacggcagagagacctctgaagcctggacatgctcctgggcatgagggcgtctggtggagtgagggggacccaggaggctgggtgcaacctcctcctccttcctccactgtgcatagctcttcccctcctccttgcagctgttggggaaggagaacagaagaaagagaaaaacactgtttccctcttcaaaccaaaacaaacacactcagggttgaagatccaacacgaatctgtggaatgcagggaagatgtctgcggggagagtgccactgcttgcgggtgggcaggaggagacccagccagagttgggacaagtcctcctctctctttcaccgcccctatcctcaaggcgtcagagggagcgtatggacagctccaaacgcccagactcacccatcgcctcaccctccatccgccaagccagcggttgagaaggccatccagtctggctctgcagagggtgtggctggcgtggccgcagactaccagcgaggtgcttaaatgtatatgctcatttttcccccaagcgtacgggaaggggggagtccgctgggtgtttatcttgcagtttaccccagctcccagccctggagagaacaggctagtgctgggtactcggttcacagaatgggagaggactcagccaccgggaccccacttccgctctcatgagagatctaaagggcggaggggtggcgtccagacaggttctggccccgtcagcacttgccaatgattactgcccgaccccacacccaatcctccacttcccgccaacccccagcagccagagggccgccccttaatcctggctcccaagggccagctgccctgggctccgactcagctccggacccgcatcccgcgctcgcacactctctcgctcccaccccacaccctccagcttcacttacaggtagcgctgctgccgctctgtctgccgatggagggcgaccgagtagccgaagaggctgcccgggttcccggcctccttcactaccaggaatcgggtatccaggttgaaggcggagacgacgcagccgccggccgccaccatcaaggcgagcgcacagagcatcaggcgtggggcgcggggcgcgcggctggggccggggcccatggctgccagcggaagcggggtcccggcgagagcgcgtgagggcgcggagctgggcgtgaggacctgttcacctgctccccgcgccgccggaggacactggaacccgccggccgctgcgctccgtagcgctgatcggtttcgtgcccccagccccagccagtttcacagctgcgctctcggatcccttcctaagatccgtgggtctatcttcctgcctccccagcggccgggtcgccgccgtccctgccccgggcaaccggcccccagcttgtcccggccgcgcccccttggccgcgctgtcgccttcgatcccggcttcgcggcggatctggcaagcgcaccggtcgaccgcaaggaggacaggagggaggggtcccccggcgcgcgccccgcctccccacgcccagtcccgcacctccccaccttgcgagcccagcccgggctgcgctttccttccggggaaagagaaaaagatcccggctcggccgcctcctcttaaaggggcagcaccgcccctccctcctcatcctccctaccccagctccgccttctcccccaaacacctgtcggcaacccccaaaggcttagatttcccctccccgcccctcgcttctccgagaaagcgtcgcctggggagcaagatggatgtgacgggcggggccgggggtgggatttgtctggccgctttcctgcggctgctgctgctgctgctgaaaaggccagccgggctggagagacctggcattggcgcatctgggaaccgacgtccgtgcgcggctggctagaatgctggactcgcctccgcagcgctgtgagtccccaagaggtggctggcggtctctgggagttcttcctcgcactcaggcccctcgctgtctttgccgagatttatttctcctatccactcaccctgatccgagctgagattggctcctcagcaaagacagacatatttagcagtggtaacaaccaaatgtcgctaattataattaccaaaaagcatttttccccctaagtgctgcgacttctggtatcaaaggctaagactgtcaatgtagaaatgagtccgtccttcacagaacgcactgcgtagccgggaagctgagcctagaccgtatccatttctcgtccactcctgccttcagggcccagcccagcagaatcccagaggctccctcttcccacccaagctcgaacagagtgtttggagactgggctcggacgtcagcacccatcaggtgtttggtgggtagggccaggtggcagtaagtgggcggagactaaaggtctcctccaccaaggaatcaaatcgaaagggaacttcaagaggttactctggccaggcgcagtggttcacgcctgtaatcccagcactttgggaacccggggagggcggatcacgaagtcaggagttcgagaccagcctggccaatgtggggaaaccctgtctctactaaaaaaatacaaaaattagccggtcgtggtggcgggcgcctgtagttccagctatttgggaggctggggcaggagaatcgcttgaacccgggaggcgcaggttgcagtgagccgagatcgcgccactgcactccagcctgggtgacagagtgagacgtcgtctcaaaaaaaaaaaagaggttactatgtactttcttggatctaactcacatttctcttattgcagctcagagacccattttccccggaacattgtttttttgttttgttttgttttgtttttgagacgacggagtctcgctctgtctcccaggctggagtgcagtggcgcgatctccgctcactgcaacctctgcctccggggttcaagcgattctcctgcctcagcctcctgagtagctgggattacaggcgcccaccaccatgcccggctaatttttgtatttttagtagagacggggtttcgccgtgttggtcaggctggtctcgaactcctgacctcgtgatccaccccgccgcctcccaaagtgctgggattacaggcgtgagccaccctgcctggcctccccgagcattcttttctccatctattcttaaaataataagaacaaaacaccatgtattaagcacatacgcagcaggaactatgctaaatgcttcacaaatgttaaatcctcacaacaatctttgaagtgttatctctgttttaaaacgagaaaaatgaggctcagggaggttaggcaatttggcagaggtcacacaactaggattttcatcctgtgttatctgaccctggagcccttaactacttatgctaataatgaacatttatacactactttgggcgtgtccaagtttggtgggtcctgaagcttgtgcaatctggggtgctctttaagaataaaattattttgtactcataagaattatgagtacaaaattagattcagagcctgggaaagggtcctggcctagctttacagtttacaaatcatttcacaagcaggct

SEQ ID NO: 1244149 - DNA, 4001 bp, Homo sapiens
catggagcagaactgcagcagcctcgtttccgccacccacaccggagctgcgggggccctgctctggtccccttcccgtggctgagctgagctgtgggctaagtggtctcatggcaagtctgctccatcatcgctctctgctgcccatcagcttgggaagggcctaggcctcaaaagaggtttgatcgatgccacctgctggaaaaggcactgaggtgatgggtggtggtctcagaggctaaaggagacagatgagccacaggagtattctggagctgggaggcaggacagaggcctgggcttgagcctcgtgtctattatcagttgcttgcaagcctgggtagtcactgcccgctctgtgccccagtcacctcctctgtactgggagagggtagacaagagtctagtctaagcatctgctccagatattcttggtaatgggagatcaaagccacaagccataaaaagagtgagactctctccacaccccacatgtaactaaaaacagagaagtctaaattgtaaaataaaaggaagttcaacaaactgttgacctttccatggtgactattctgatgtttttgaaatataaaatattaggccgggcaaggtggctcatgcctgtagtcccaacactttgggaggccgaggcaggtcgatcacctgagggcaggagaccagcctgaccaatatggtgagaccctgtctctactaaaaatacaaaaattagccaggcgtggtggcaggcgcctgtaatcccagctactcgggaggctgaggcaggagaactgcttgaacctgggaggcagaagttatggtgagccaagatccagcctgggctccagcctgggcagcagagcaagactctgtctcaaaaaataaaataaaataaaatgaaatataaaatattaaaatctgtccaaaaacgtgttccttgctggtaccctacacattgtggcctgcttcctgggtgatctggccccaggtgggatgctaatcccaagtcccctcccagcacagcctcagcccatctttcagggagaactcagctaccaggagcctttcatccacataagcttgatgcccatccaattctccggccaacctcctgagcaggggcaggagacccatgggaagtctgctcagatcactaggcaggaccaccctggcctccggcttaatcttagcagcctccaggggctcacctgaccgtgctgtctcatcacagggggcccccgaaaggactcatggcttggcttgcccagaggcttccatgggacagttaaaggctaaaatgggaccccccaggcagcagaagtgcctccccccaccccacattccagtttttaccctgggcctgacaacacaggaagcaggctccctgccaacactcacaccctctaccatacagacacttgcccccagtctctggtcaacactctctcacagggtcctcaccctcatcagcccaacccctgctctgtaacagaagggagctctgccaggcggagcctccacactcagagaacaaactacagagtcaaggacctgccccaagtgggtgccatggggagagggcctcggtggcggggggaggctggctggaggaggaacagaatggcagagccctggagtccaaaggccctggctgacagaactggcaacacgaagcctcagccgcccttcccaacaagcctggggccctgacccaccgagcaagactcctttcctggaggagctgccactctctaacctctggctctaactgagccccatcagagacagacagtcaaggctgtagtctgcagacacctggctggagctgagggcacagcagcccctcgaagcagcgggtgagaggacttactggctatgcagagcagagtgtggaagagccacatccttgctggagcagaggcggctgtgtgggagccgaggcgagtgcgacacatgggccgtggcccactcagcttcccctcagccaggaggccaggaggcggggacagaagcacacacaccagcaaggacccacagaccggcactttcaaccaaacagagacactccggctcgtacacaaccagccgtgtggcttcctcagttgtgggctggaccctaggagcttaggggccactgtcagccccactctaccacccacactttgacccacactttcatggaatagggagctgaggtttggccagggccacagttctaggtgtcctcagcagatgctggaggtgcaggagcaacgtgaatccagcctgccgttcgtatcatccatttgagtcggtcccctgtcctgcctcagaacctaccaccagacatctcagcccagcttccagcccagggtcctcggtggtggttgcctcagcactgagacaggcgtccccctcccataggaagtgcctccccagccaaaaactgggctcttgtaccagcccatgcactcaaggccctggggttctggagggccaggtgagtggaaagacccaacgcactgagtgaaatcactgcctcgattcaacttcggctgcgttcattctctttaaaaccaggacagcaacctgacgtggaaactgactgaacaggactctgagttaccagaataacagaagtaaaattctatacatcttccagcatacctgtgatgcatcccagcattccacagaacacgccgttgacagctggcagtcgtgtttaagtgctgatctgagatctgtactgtgtgaccaagtctgtgacacagaaggaactctcctgcacccctgctccccaggctgctggaagtgcagagtggcgccgtcaaacagaactctgcgcggggatggaactgctctaggtcgacgctgtccaggatggtactcatgagccacatatggtactaaacccttaaaatgccactagaacaactgatgaactgaattttgtatattttatttaattttaattaaacgtaaaaaggcaggacattccaaggctctctaacacgagtgtctgcagccccattcgctttgagatgtgaatgtgttaacccagggtggacaatggtgttgacttcattactagataaaaatccatgttattttgtttctcgcattgaaaggctgcttggctaaggttctgtgaagatccgatgacatttccaacactttgccttgtctgctttgctctgacaaagtgcttatgactactagatcttgctcggttatgtgagattacaattcaccggtttccatcctgtatgaaacagaagttaaacagttgtaaaagcaaaattccaggtctggtggttttcctgccaggtcatgatgaaaccatcctacttctgttgaacctcgtcccaggcaggatcggggcctgcggcctacagcctgtcttcccagcgctccagggctcgtgaccctcctcctcccctcacttcattctgcgctccaagggcactggggagagtcacagtggtctcctctcccccgcattggcctaaagcaggaagagagcagcccagtcactgagcagatccctgctagggcagggctagaacccagactgcagctcactcgagattcctgagagaagactttgtgtttggagtgtgaacgtcagggtgcctcgggaagccagggaaagctgatgactgggtgctggacagggagcagggccacttctgtacctctgcacacttctagaatgcggactcatcctgcatccatccagtatgtatttatccaagcgtcagtgcctctagtcatgagacacacaggggtccgtaaagcccacctggcggtagctgctttccccacaaacccaaactacatccccaaggtcagggccaggctctgttgagtaatgctccccatcacagcacgcagcacaaggctggctgtttgacaaatacacacataaccaaaagacatgtgaatgtggtttcccaactcactttaaacaaatattccgggaccaacttcaaggacgttctacaacagaaactggactgtactct

SEQ ID NO: 1244150 - DNA, 4001 bp, Homo sapiens
tgctcactgcacgctaacactatcagctgatctgttttagtcccagtcacataggaaatgcagcaataaccactgcaatattcctctacatatcaactgtaatccctccttcaagatacccttggccgggtgcggtggctcacgcctgtaatcccagcactttgggaggccaaggcaggctgatcacggggtcaagagatcgagatcatcctggccaacatggggaaatcccgtctctactaaaaatacaaaaattagtagggcgtggtggtgcgtgcctgtaatcccagctactcgggaggctgaggcaggagaatcccttgaacccgggaagcggaggttgcagtgagctgaaatcgcgccactgcactctagcctggcgacagcgagagtccatctcaaaacaaacaaacaaacaaaaaaagatatccttgccctgtccagaatgagttatacgtctatacatacacagaagagtcttgacgggaatcactaaagtattttcgaatagtttatctttgaagtgaatttatcaacaaatcttccctttttaaaataaatcctggccaggtgcggtggctcacgcctgtattcccagcactttgggaggctgaggtgggcggatcacttgaggccaggagctccagaccagcctggccaacatggtgaaaccgcgtctctactaaaaatacaaaaattagccggccgtggtggcaggcgcctgtaatcccagctactcgggaggctgagccagaagaatcgcttaaacccaggaggcagaagttgcagtgagccgagaacccaccactgcactccagcctgggcgacagagcaagactccgtctcaaaaataaataaataaataaataaataataaaataaaataacaaatcccttctgcagggtgtagattgttttacgagtactacagtttttattaaaaatacttacatgcactcttgtgtcatcctctgaggcagaggcggccccagcagaccaggagccagggtttctctccagcccaggcaaaatcaccaaggactcagagaggaccacgggcagcaaccccgggctgtgcccgctccatccctccacctgtgtccccagtaccaaagaggccgaatgccaattgccctgacggctgacggtgtgcgcagcagccagagacaaagccaaggatcccaccggcccaagggagccttttcatggctccccgaatacactagagatttttcgggtgcagggtctgccctgggagcagaggcaccgctgccacctggggacactggaggaggcaaagccctcatcctgctccaaaacaaccccgcaggaagccaagttgaaggtaaaaaaaagaaagaaagaaagaaaaaaggaaaagaaaaaaccttctggagaaagcgtaacaggagaaattggaaatgtggggaaactggcaaacccgcgcgcgcgcacgctctcacccaggaagctacagcggcatccctctgccaaggcgcgggaacaacccccggaagccccacctcgccttggctcctgggccagtcgtccttggcccgaccaggaccacccgcgacgcgcgcagccccgggtgagcgcggggctcagagatgcgcccaccgcaccgtgcgcgccgcggcggccgggaaggcgctcagcctggctgatggcttcggcgtctcggaggacccgctcccaggcaccaggcacctctcagccccgccaccgccgggccaggaaggtccccagctcccggctccgaccgcgccagccaggacacgcgcattcccagcgcagacgcgcgggaccagccctccgcgtttgccggctccaagtccgcaacttgaccggggcgcagatcctggggcagctgcgacgctgccgagccggagcctcactcacctcctacgccaacgcccgccagcgcccccagcgccagcacagtcgcccagagcggccggggccgcggccgcgctcgcatctcgtccgcctcccgcggcgctccgcccgccccacagtgggcgccgccgcccgcggccgcttttcccgcagcgggaggggaggggaggggacgcggtgggtgggacgcaacggggcgggccgcggactcgcgcttcctcccctccggcttctctagatcccctcgcgcttctctagaccctgcgcctgagagggagcggtgggaaactattgctcctctctcgccgcctccctcgcctcgcccacgaggacccgcctgccagccgggtcgtcagcgcatcctggtcccgggggtccgcgactgggcacttggtgtgcttagaaaggccaggagcctgtggcccctctccggacccttccagtcccgcctcctgggagaccctgtttcgctggattcttgggacacattcacccactacctcgagtttcattcattcacactttaattcatttgactggcaaacatctgctgaatgccttctctgaaccggttcagtcctttattattcactaatttttttcttgccttagtttggttttccggtagactacctacctgttgagggcaagaccacatcccaagcttgcgtaagcagtgataggtccatgaagagcctcgccctacaaacacttgcttgcacctagccagtgtctgaaaacgtttcagaacacagcatattgcctccaaattcacactcacaggctttgggactttatctattttcctcaaaggcctcctgcctgactcccccaaactgtggccccttatctcccaccccaatctttctttgagtccctgggtcttccccagacttaaaacctctggaagctcagagaggcaaaatactatggctatgagcaagagggcaccaggaagtagctggtagtgcagcctgcctcaatgggtagtcctgatggtgataaaaacaaggccagaggcatcagttcccctttagggctttcagagtggccctgggcttccctacgcagcgtgcccaccctcttctgagacacacaagatgccagacaactggccctgacccatctctccagcccatctcccaccctagtccaagaagatacttgtcattccccaatgctccatgccttcctatctgactgattttccttcctttttccacttggaaaattccacttatctttcaaaacatctcagatgccatctttttccatgtaatttttttctgacaatcctccacctcctgccccaccctcccaaacactaggaccttaatagtaacacacatcagctgaagcgtcactagcaatttgcaaggggaaaagccagctctgcaaagggtacttgggccctctgacctgggttttcaggctgaagctccatctacctcccctggctgcagagggcctctaggccagaagcattttaacagcagtgtcaatgccctggagcaaagttcaggtcacatggcctggttacatctctgcctaagtatttagttatctgctccattcccatatatataaaaccaatctccagccacttaggtgtctccttagcctatccctgctgtcagcaaccacttggggtgggcactggcctcagcaagtatgctaagtccacaaccctagcccaagccctagcaaacatgacataattgtgcaagtgagtccatcctgcactcccagccccagggaaggcaaaggagctagtccattcacatttagtatagtaattgatggttgtgtttacatttactatcttgttattcgttctatctttttggctggtttctctgtttctctttttctgctttcttttgggataatttttttttctctactggcttcctagctacacctcgtttgcatgtgtgtgtgtgtgtgtgtgtgtgtgtgtgtgtgtttgctctaggtattacaatattcctccttaacttatcatacagtagcctatgttgaattaatattgaacaattctatgtaaattgtaagaacctgtaaactaaaaataacattataagcccccccacaactgtctg

SEQ ID NO: 1244151 - DNA, 4001 bp, Homo sapiens
tacaggctgcaggctcaggcctcccaggcatcattacacaggcaggtacaggcctggagagctgagcccagctcttcctcccactgtccctggccacagcccctcaggcagtgctgattcccacactgtgactgccatatgagcccagggcttcacggaggagattgctcagcacaggagcccggcgggagatgatttcattctgcccgtttcccagatgagagaccaggcacagaaggctgtggaacttccccatcccgcggacagcactgggagggccaggacagggccctgctctgcaggccctgcctttaacctccatggcagcctccacgcagaagctacaaaatggcagttagagggttggcgaggcacccaagagtgtttggcttcatttgtttagaaagttttaaaagtaggagccaatgttagaaacaacgagatttcccataaaagttaggaatttgtgtttatcattagatgtatcacgatgggctgggcccagcgctcaggacacctactctccaggcggcccggaccccaccaggctgccccgactttatgtaccagcaggtccctggagtgtgtgactgccaccctgaatgccatcacactgcagcacaggcagtttcccccccacagggacacacacacacacacacacacacacacacacacaggccatgcccacccacccacaggctcagagctcccctggcccccatcccaacccctggggacccctctgggcacacctgctcctgtccactatcctctcccgctgtcacatctcctcccctcagggacccaggcccttcctcgccccagagaggcagctggccagaagtctggggaccccaggcccttggctgttctgtctccctgagaaatcagggtcgagtagacagacatacctcccctcctgtccctcctgctgtccttccctcagcccccaggatggagactccaagccttcactgccagctctgtttcggacagcaacaaccatgccacctgtgcctggtccttgtcctcagggtgtggcaaggccatgggggcagaggagaagccctgtccctgctcctgggagtcaccaggagccccagagccccagtcccagccagagggccaccccagaggctgagccatgggaaagagggcggatgctgcaggaggtggcagtgttgggcacagccctggggctggtgggtgaggcctgtagagcttcctgaaggaaggcgcctggggctgactttgggaggaaggcaggcctgtgcttggccaagagaaaaggaaaatcagggactccccagccccagatggactgtggcaccgcatagagcaagccctgcctggagccgggatggcgtctgcctctcagggtggcttttaaaagtaggagccaatgttagaaagaacgaaatttcacataaaagtcaggaatgttggtttatcattagatgcgccatgatgggctgggcccagcactcaggctggtgtctactccaccttctttgcaaaccctggaggggcccagccccagagggctaccagccactggcctctgcccacttctcccgcaggcgcacccaaggcgctcctctggcctggaggtctgatgggcaccacccttctctagctgccctgccccttggctgccagctgcccccggcgcaccccggggaggctgggcacctgtcctgcgcagcgtggacagagggaccggggcctgtcagccttcagggaggggaaggggagacaaaagccaccggccctgcccgaccagctcccctgcgcggctgcccagctggggcgggcactcaccctctcccggccagcctcggctgctgctgtgcgcccgtcctggacctacctcggggcggactcgctccctccgcgcctgggctgccgctaggagatggggctgcagcgcgcgggcgagcagggactgtccgagggcgggcgcgggggttgggggggtggggacgaggcgggcagcgctttatggggcgggcgcgcaggtaggaaggaggcgctggtgagtcagaccggctgcattccttcgcgcggcgcgcacctgtcggggcaggagctgggtgccgccgccggagccgggtccgccccccggaaagggctgcggctcccgcggcgcccgcccagcgccccgatcggctagcggcgggggccgggggaggagccaccgctctccctctccctccggtccggccctgggcgcggggcctccccacccctccaggctccgggctccaggctcgggtgcgcggactgccccgggctggaggcggcctcttagcccccgtccgcacgggaaccctccctgccccgactctgggccgctagccaacgccgggctgtgctgctgctgctgccccgacggtcgtcagccgcgtacccccctccccgctctccgtgccagcgcgaggcatgggcccagggagtgcccccggcccggtcgggaggcctgactccccgtcccagctctgctctgcagttcacggggtcctctcagcctccaacccctaacctcacgttgtatccagagggagagccgaggaagggtcgggtcctcggtgcacccttcaacaagctacttaaatctccttacagtgtgaacagtgataccctggagaggtcagtgccgacctggcatggattggcactcgatgccttgttacagttgttcttaacaagctggttacagagctggcccctccctcccgtcagtcctctgagagcagtctctccattgccactgcttaccacgggtgttcaggtcagagaagggcttcatttttctttttctttttgttttctctctctttttttttttagatggagtctcactctgtcgccgaggctggagtgcagtggtgcaatcttggctcactgcaacctctgcctcccgggttcaagcgcttctcctgcctgtttcccgagtagctgggattacaggtgcccgccaccacgcccggctaatttttgtatttttagtacatcatgttggccaggctggtctcgaactcctgacctcaggtgatccacccgtcttggccttccaaagtgctgggattataggcgtgaaccaccatgcccagccagggctccatttttctctaggcttactggccagcaatgccaaacaacaccagactgctggcacagcactgtccaaaccatgcggtttcaagccaccgtgctttttcaacaggctggtcccttcccatgacattgagcccagtttatccttcttgtccttgaagacgttgcaccaaccacgtgctagagagccttccttgacctctccacaccccaagttggtttatgtgtccccataacccttgggccatggcttttacatggcatttgccacattggtttgaaatgatgtttaggaatctcgccacactgttggactgtgactccaagggcagctactctctagcacctagcaccatgcctggtgcatagcaggtgctcaataaaagggtggttgagtgaatgggatggtcacacagcctccctgagcctccatgctgtcatctgtaaacagattcctccactgctacctctcagagtgattgcaggggtgctggttgcaaatgtgtgagtcgccacctttcctggtcatctgagagctgttctgcacagagaaagtgttcagagaggcttgctcctggatttgggaacaatgtggaaggagtcccagtttggttgaagcactcagatctgtgtgtgtcaggccagcacaagtgccctgtggacctgagtcactccagcaggtacctatccaccccaaaaaacagaaacatggagcaggagctcagagaacggccaaaaacagcttgcctgaggggcctgggtctgccagcagcacccattagagaactagggggtcatatacaccccactgtgggtgggggctgaggcttcttcctagagaagacccaggtccagagctggcgatgccccaggccactggg

SEQ ID NO: 1244152 - DNA, 4001 bp, Homo sapiens
gcagtggtgcgatctcagctcacttcaacctccgcctcccaggttcaagtgattctcctgcctcagcctcccgagtagctgggataatgggtgggcaccaccatgcctggctaatttttgtatttttagtagagatggggttccaccatgttggctaggctggtctcgaactcctgacctcaaatcatctgcccgcctcagcctcccaaagtgctgggattacaggcgtgagctactgtgcccaacctgcatttcaattttatttagttttgagatacggtcttgctgtgtcgcccaggctggagtgcagtggcatgatcacagctcactgcagtctcgacatcctgggctcaggcaatcctcccacctcagcctcccaagtagcccagctaattttttattttatgtagagacaggggctccctatgttgctcaggatggtctcatattcctgggttcaggagatcctcccaccttggcctcccaaagtgctgggaattataggcgtgagccactgcacccagccgttccctattttacagaggccaggggtatgtgatctgccccaggtagcacagctagaaacaagctgtgatttcaaacctgggacttcccactcaagccagaaggacagaaggtggggactgagacagtggcactggcacactcggtgctggcacaccctggccaccccctggcctgctgcctcctcaggtccagccagacggtcctcagccttccccattacctttgatgagctgcacctagcacccttttcaggtacctcctccatcacagcttgtgcctcacggcgagaccactgccacatggcctgtctgtcctctgagccccttctagggtgaagggaatggtgtcttgtttatcacggtagccctagcacccggcacacctggcacacagtgggtcctcagtaacgaatgaagtaaaactctagatttccctttggctctgctcagttaaaaatcacagtgaggacctactgtgtgcacctggtgtacacagtaagaggtctcctgggcttcaggcaatggtgtgctggtcagtgtttaacaatggctgtggtggccagtgcgatggctcacacctgtaatcccagcactttgggaagccgaggtaggaagattgcttaagctcaggagtttgagaccagcctgggtaacatagtgagactgtctctacaaaaaaattgtttttaattagccaggcatggtggtgcatgcctgtggtcctagctacatgggaggctaaggtgggaggattgcttgagcctgggaagttgaggctgcagtgagccacgatggcatcactgcatttcaccgggacgacagagtgagagcatgtttctacatatacattgaattaaataaaaaaataacaacggctctggtctctggtgcttgacgtgtagcgtttgccaatttctgtggtgtaaacatttctgtcgtggtctatttcaagccaccagcaggaccccctctaacagacaaaattcaagtggtaggagctggctccagtgatttgtccactagtgacactcagagagcaagtgacacgtcagcagtgcctctcttctccaaattcctataaccctcttgactacacctctggggcctcagtgcatcctctgggtgcctcagtcctgggtgggtgtctcctctttcctctagacacagcctccttcgctcctattctcaggccccgtggtcagggctcaagcttctctaggctgaagagcttggagcctcaagttttccagccctgaaggtgggcagtggtcagttgctgaatggccaagcgtgtttaggtgagacaccgtgagatccccgtgcaagggcaatgcctgcccaagggatgatcctgccaggagggggctgcagggcaacgtggactcacccaaggtcccagagaggctgacgctgatcaaggctgccaggagcagcctggcccatgggctggggcgtggccctgccatcctcttcctcctgcagaacagcaacaattgacacatgaggcctccacagccatggtcggtgccgtcagcttcctctcgctgcacagctgtgggaactgaggctctgagcaccaacaatgtgaccaagggcgcccagccgccagaggcagggccctgggcctcggactcctgccttttccgctgccctgttccgtgccatccctgcagtggcctatgccctgccccgggaggccccctccagccctcaaggactctggtttgcgagtttgtcccagtgccaggcctctcagcactgggctccctgagggcagatgtgggtttattcttctttgccttttagctcccagtgagcctgggtcaggcttggccatgacagggtcatccaatgagggtgcctccctgagagggggccgcagctctgcctcctgctccttctgtcctggcccacttaccctttggtgagggtggcacagccgggaggagaggggcccctcccaatatctggggcctggggctgggccacagctgcccgcagtggcttactgcaccgggttgggttctgcagtgactgcccggcccatcagggtggggtctgaatcatctgccctcccctgtacctctgcctgccccagagttaagttttctgggcccctgagctgttcaccctttcacaagttagcccagagtgagacatgcacacacactgtggctcccctcaaggcgtccccagcggctgtgggttcagtattaaaccatcctaagtcctcagcggccttcagggcaggactggacatccctgaggccctctaagagatgctcagcctgaagcctggacaagaaaagaggctggcggcagagccatccaggcctgcaaggccggggcaaaggtgagcaccgcgcctctttctctagggccaggtctcccaggggcccaagcctctgccctgcccacgggccctccccattgaatcctgtctcagcccggcttctggggcagtggccaccccagggtctgggggctggggtccccgaggtgctggagaagcccttctcaggccaagggcaggaaggcgtagcctgcttctaaggcgtgcagcctggaggaggccacagcagcgccaacacatgcaggtcagacctgttgtggcacagggactgggaggcagccctgagccagcagggaaagggtggggacagcagggttcctagagggaaatgacttccttgcagcctcggggtgtagccgccacacccacatgctacacaatacaggctgcaggctcaggcctcccaggcatcattacacaggcaggtacaggcctggagagctgagcccagctcttcctcccactgtccctggccacagcccctcaggcagtgctgattcccacactgtgactgccatatgagcccagggcttcacggaggagattgctcagcacaggagcccggcgggagatgatttcattctgcccgtttcccagatgagagaccaggcacagaaggctgtggaacttccccatcccgcggacagcactgggagggccaggacagggccctgctctgcaggccctgcctttaacctccatggcagcctccacgcagaagctacaaaatggcagttagagggttggcgaggcacccaagagtgtttggcttcatttgtttagaaagttttaaaagtaggagccaatgttagaaacaacgagatttcccataaaagttaggaatttgtgtttatcattagatgtatcacgatgggctgggcccagcgctcaggacacctactctccaggcggcccggaccccaccaggctgccccgactttatgtaccagcaggtccctggagtgtgtgactgccaccctgaatgccatcacactgcagcacaggcagtttcccccccacagggacacacacacacacacacacacacacacacacacaggccatgcccacccacccacaggctcagagctcccctggcccccatcccaacccctggggac

SEQ ID NO: 1244153 - DNA, 4001 bp, Homo sapiens
gagggagactccatctcaatgaagaaaaaaaaaagaaaaaaaaagaaaaatcactaatgtggtttattgctggactttattaaaacctcccttagagatcagtgcttcaaccatagctgcacattcaagtcacctgaagagctttcagaaattctgatgcgcaggcatcacccgaattaaatcagtctccccagtagggcccaggcaggcctcaggagccccctaaatgagttcaatgtacagccgagggagtactcactgtttccaaaaaagattagcaactgaactcagcgagcaaatgctgttgtagataagattttaaccacaggccgggcgcggtggctcacacctgcaatcgcagcactttgggaggccgaggcgggcagatcacctgaagtcgggagttcgagaccagcctgaccaacatggtgaaaccccgtctctactaaaaatacaaaattagctgggtgtggtggcgcatgcctgtaatcccagttacaggaggctgaggcaggagaagcgcttgaactcgggagatggaggttgctgtgagccgagatcgcaccacggcactgcagcctgggctacaagagtgacgctctgtctcaaaaaaaaaaaaaaaaaaaaaagaaaaggattttaaccacttagctgcagaatactttacctgtaagggggcctgcgcttctccccagcatactggaaaaggtcatcagtgaaaaactttggcaccttgtagtcttccaaaagtttccttcttttagggtgttcaccatagctgctgtcaaagatgtaaaggggactatcatctcgagtgctctccatgtactcgatgtagtatttcatcttcatcttcactgagtagccatcgttatcctcaccacacttgaacttctggttccgatatttcctttttaggcgctccagagtccatttctcctgcgcagaccagccctcttgcgcattcaacaaaaccacgggcttgtaaggtctttcataccgctccacaaattcttccacagacagctgtaaagcatctgccctttccacgttatcctgagggaattaaaaaagacctgtccagttaaaaaaaaaaaaaaagtccagtggcagataagggtgtccccaaggccaactggtaatgacaaaccgaaggaagttgactctcgtctggctcctccggggtgggggcagggcgcgtgcgtgaggccacgtcgttcctagagccaccccccatgagccttgacagccaggtcccctaggggacccgccgcccaaaggagtcagggacgacgggccttctagttgagagcgccacaggcgtgggactcccgtcgtccgccagagcagacgggcggccacagcacgggaggaagcagacccgccccggaatccgcgcctcggggaccccaaactccgcggggtgcgggtgagcctctacgaggtcccgggcgctcggggcgagggcagcctcgggcccagagaaaggtgcgtagcggctggaggtgccgatgcccggcctggccacccccgcccgacccgctcaccgccacggccgccgggctcagcgagaagctctcgtagtagttgtgccgggtccaatccagcgagtccttgagctccggccgcgcactccgcttggcctcgcggatgcgcttcttgctcttgtggttcattctgcggggtcgccagctggttccgctacgacctcggcgcagcccgcttcctgacactaacgcacccctccccggcctgggcggcggcgacggcagtacccaaacgcccttcgctcagtcccggcgcctttaaagtcgccttccagaaaattcactccccagccacctcccgagcctcgggttgggcaagcggccgccgtcttccccgccccgacgcctctcgcggttttccattggctttggctcccctggggtactccttcacatacggcgggcctccgccatgttgggaaggtcacgtcggctgcgtcaccgccccgccccgccccgcccctcccctcccgcgctgccgctgtgcccatcacttccggtcgcgccagccgcccgttgccagttctgcgcgtgtgagtctctttcgccttgctccgggctttcttcgctcgcagcgcggcagggttatcaccagatctgggctttccccttcttgccgtcaggtgctacggccacgtggcccgcggcttcccgctcgcgcagtctggcagcccggagccttccgcggtcccccgcccgcccggggcccaacgacgccctactgggcgagcacgatttccgaggacagggggtccgggcccagcgctttcgattctcggaggagccgggtccgggggccgacggggctgtcctggaggtccacgtcccgcaggtgcgtgcagcagcacccgccaggaggcgcctgaggtcaggagcggatgtcggctgacttggctgggttcctgagggaccgggggtgcggacgctcagctgcgcagcttcctgctttaggttgacccccggagcaaaaacgtcggatatgaagcccttcggtgcattaaatgtctctcagtaagaattttggagaccctgccaagaagtgaccctggtcactatgttggtcaggctggtctcgaactgtaagcttaagtgatcctcctgcctcggcctcccaaagtgctaggattacaggcatgagccactgcgccgggccggctttctccacatcgaatctttcctgccaggaaagtgacattcttgactgacctctaatgcttcttttgatcttgtccaagggtttcttgattcatccttatctctcacttttgtgtgagttttgggatcagggtttccagttttatttggtgcccaaagtgtttcttgggttggacctcgcttcttcctctaagctcacagctacaacaaaactctcaataataattctttttcttttcttttttttgagacactgtctcgctctggcgcccaggctggagcgcagtggcgcgatcacagctcactgcaacctccaactcccggattcaagtgatcctcccgcctgcctaagtgctgggattgcaggagtgagccaccatgccctgcctgtcttcggtttttcaaagcactttcactttgcagtatttcatttggttttaacaccagcctgtgaggcatgtcccatgctaaagaaacagctttagagaagttaaatgggaggcggaggcgggaggatcgcttgggaccaggagttccagaccagcctgggcaatatagtgatactacgtctctacaaaaagtagaaaaattaggcatcgtggcttgtgcctgtagccccagctactccggagggtgaggtgggaggattgcttgagcccgagaggtcgaggctgctgtgagctatgatcaggccactgcactcaggcatgagcaacagagcaagacattgtcaagaagaaaaaaaaaaaaaaagactggagtggaggctatttctgattgtttccaaacagcttcacttttttttgctaactgcaacctcaacctctgggctcaagtgatcctcccacctcagcctttcaagtaactgagactacaggcattggccaccacacccaatctggcttcacggatttttttttttttttttggagatggagtctcgctctgtcacccagacgagtgcagtggcacaatctcagctcactgcaacctccgcctcgtgggttcaagtgattctcctgcctcagcctcccaagtagctgggattataggcgcccaccaccatgcctggctaatttttgtatttttagtagagacggggttttgccatgttggccaagctgatcttgaactcctgacctcaggtgatgcacctgcctcggcctaccaaagtgctgggattacaggtgtaagccaccgctcccggctggcttcacgtttaaatacacttgcatttcttcctaaatgtagggggtgatgatattgcctgtgagaatagaagcctctttcctttttttt

SEQ ID NO: 1244154 - DNA, 4001 bp, Homo sapiens
aaggggctgagtctgggcccccagcctcactcccccatctacaacaaagaaagaggtggtagactcttcccctccaagcactctcgatccccgccccccacaatctttctcccacccccaggactgagagagaacccaactgttgtattctctctctgttccccaacgaggctgggctccaaatcctgcaaaaagaccacatttcagattttttttttaaaccggggtacaaaccctgatcaagatccccaattctgggtgggggggggcggtctcaggaaattgggagcagggaaggcagggggcccgatgcagctctgcctgagagagtctagcattgaagaaaccttcccccaaaaagccttcctgcggtctcactttccctgtcaaattctttcaggaaagcgggtgggaaaggtctgtgcaggcctccagaaagcatgcaccttcacaattcagaaatcaaatggaaggcaagtcccacagcctcatgcgcttctgcctcaataaccagccagctaagtaatgtgggggatggggtagaggcaaaaaaaaaaagacaagaacaaccactccccccaccttcctcagtttggcccagccctgccccacccccattcctggggagggggcagagcttgagagacaaccacttacgcaggccttgtctgagggggtgtggtggtcccaggaggcaggaagagaaggaagaagctgcttcccctctcagcactttccaccccccaccccggcccctacctcaggcccctggggcccagcgaacaggatgaatgtgggggcagggaagacagggtcggagcccaggcaccggcccaggttcagccaggggccggctgggggaaggggttttgcaccaggaaggaccccctaagcctaaaggaagttttgggcaaggagacgggaaaacccccagataaagctgctgtgaatacttcctcctgcaaagtttgttttgggtgattttttccaacaataagaggttagagaagacgggtcctgttcccctaccaacactctggcagccacagctactggaaactgggccaggtgaccctgaattcttcatccgtgcacagaccccaccccccagaccccagggcgagccacgggtgccagacaccagctggacactgagccgagccctgcaccccccagtcactccatcccacctccgctgaagaagccagagccgggctcccaccggcgtggagggaggcgccgcaggtagtatcgacgaggctctgggagctggagggcagggcctctggactccgtgcgctcacctgctcggcaggtggggccagagtcgctgggaaaatgtgcgctcggcccccacagttgggcaagctgggcgcaaacaatagggccccacccaggcctgggggagtagggagggagggaaagcgaggatgacgcgtggggtggggtgagggtggccccaaagagaccagcggcagcaagttccccaaacggtaaattcctgactgcagcgtgagccctgggacgcagtcgaagcagagcaaagtctcccccgccagcccagggcgagagtcagggacgcggcgtcgggcgagctgcgcgggccccgggggaggcgcgaccccggaggcacctgtccggatccctccccgccttgctcagatctctggttcgcggagctccgaggcgcgctcggcccgaaccgcgcgacccccaagtcgccgcgcccaggaccccagcgcgccccctgccgccggtgcagggtggcgctcgatggcaccggccctcacctgcccagggacggctgggaccggccccgcggccgctcgccacccctctgtccccaacgatacctgcgcccccgatagcccgcacctgagtatggggcctgaccgggccgggtcggggtcgggccggggtgggagccggcgcggacagcgaactgagctcggcgtggtcgggcggcggctgctccggactctggccaaggcagcaactcagtaaccgaacaaaaggcgaagagacctgacagccaagccacgcccctcgccacctcgaagctccgcccctgggggagacgcccaccctctggtgcgagctcactggctatctcgcctgactgtcccgtggaggggcggagcctcgcctccagtcctcttccacggccgcctctgtttatccgcttgccattggccccggggactgccagtcggctctagggatggactctaacttgaggtctcatcctaacattgcatctattggcagatagaaagttacttcctcctgattggacaaggctctgtcagtaagactaaggaaaaaaccaatggaagggatggggtgtgtcttgccccacccttgctctgagcaggtgagactcattactctccccttccccctacctgtccaacaggtaagtcatagggataccaagggaagggacagacgccttcaccggccagccaactcagcgtcaggcatgatgcttctttgggcttattcatccttgccccaaagtagtaatcacatatttgtatagcatttcataggctttgtgctggggtgggatttttttcccgaaagatggagtactcctgggatttagaattagaaggccaggtttggtcttctcccacttggtatgattttaggcaagttacttcaccctgtttctcctcttctgtaaactggatacattagccatatctacctcactggagtatgtggggattaaatgaggtcaggtttgtgaaagcactcagaaactgctaaaggttagaaatttaaattaacggtatgtttttttttaattattgtgacagctctgaaaaatagttaggatgagaaaacgaccctcattgtaaagatgaagaaaccgaagttcagagaagtcacaaaactacaaagtggcacaccccaagctagaacctccttcctctcatttgaaggaccatcaaaccagctgttcccctcatggaagaggagcatagacataaaatgtcaaggcaatggggaaggggcagagaaaaggcacaaacacttggaggagagacagaacaattaattggcacaaaaatacagtattggtgtcaggaggctttggtgggcttggaaacatcaagcagcagatctgaaggaaatccagccctggcatgaaagaaacggggcaggccaggcgcagtggctcactcctgtaatctcagcattttgggaggcaaaggcgggtggatcacctgaggtcgggagttcaacaccagcctggccaatatggtgaagccccatctctacaaaaaatacaaaaagttagccgagcgtggtggcgggcaactataatcccagctgcctgggagactgaggcaggagaattgcttgaacctgggaggcggaggttgcagtgagccgagaccatgtcactgcactccagcctgggcatgacagagcgagactccatctcaaacaaaaaaaaaaaaaagaaaagaaaaaaataaaccgggcagcacacccctctgcgataggagagcctggggtagagatcagagagaacttctcggccaggcgtggtggctcatgcctgtaatcccagcaatttgggaggccaaggtgggcagatcacttgaggtcaggagttcgagaccagcctggccgacatggtgaaaccccatctctactgaaaatacagaaattagccaggcatggcagcgggcacctgtaatgccagctactcgggaggctgaggcaggagaatggcgtgaacccgggaggcagaggttgcagtgagctgagatcatgccattgcactccagcctgggtgacagagtgagactctgtctcaaaaaaataaaaaggacttctcacaggcagcttaagaagacaagggcacttcctttctgtggttgatgacatgaatgctgctcgtggctgtatggtgtgccaagggccctacaaacattccttcattcaacacttgagtattcattgtcaactgtatgttaggcact

SEQ ID NO: 1244155 - DNA, 4001 bp, Homo sapiens
ggaacataattttacaactatgtaagttgccataatttaaagttaaaaagatcactgcctttcattataatggaagttaatttgagaacttcattaaaacattcacaccgataatcaaagaacagtagagatacaaagtaaaatatagccaatcaatcctaggaagcaaacacaagaggcaagagaaatggcaggtaaaggaagtgaagaatagcaaattcaaaaactacaatattcccaattctaaagaaaaatgaataaaatgaggctggtaatgaaaaaataacacatcttaccttaagaggcatccaagtagcattcatagtgtcaggatataaagacaatactcagaaatgagcaagaagtcttagtaattccctcggttaccaagtataagcaggtaggaaaatcttttgtttcgagaaggtatctgaaagagaggattttcatttagactaaaaaataatcaagacaatgcaaatagtttaagctacctgggcagggattttgaagtactatttgcctcatcgcactaaaaaagtatagaaaatacagtcccctttagaaaagggcaaatgtgtgtctccatatatatgtgtgtagaaacatactttacataaaaagagaaataaatatgtaacacgtattttagataatgtaaaattgcttatcaaacaattagccaaaatcccagagagaataaagtaattttccagggtacttcataaacactaaacgtgatttgttaactaaccgtctaaagaaagacccttgccacatttaattatatttagtaaagtaaaacttctctaatcatcccgactgtcccaagattatgcttaagtttcagagtcaattccacatgaaaagtaaaacctattcttgactgaagtactagaaacaaataaaagacccttcttccccagagatcgttaaaagcagaccgagcaacttaattttgagggtgggaggaaggtaaatttgcctggaggcaggaggatggactaaatgacctctggtaggatcctcgttcaagtcctgggcctgtatacaattccagcttaaccagttactgcttcgcttaaaatggaggcttgcctgcgtagggacaaaaataacagcacccacttcttaaaaataaatgtcgaaaagtacccctttttaaataaaaataaaaaataaacacctctggagtggatgtgttcttgctatgcgtttgtcactgaggcttcgaagacttggcatcactttccttaccgctcaccggattttgggggaggagcggggggcgacagtttgactcttgacccaagtctcaggcggacttcagagccccacaggggcccccaactccagagccagagggagcggagaggcgagagcccgagatcgcacctccccccaccgcggaccccagtcccaaacccacccctcacctccccgcagtggggcgcctccttctgccccattcccattgttagggagggcagagcgcggggtgggctcagggcaggggcgcccgcggccgttgcccggctcgcttcaggaggggcgccccgcgggatgcggcttcccttcctctccgcgtcggtccgtcccacctcggctcggcctggcgccccgaggtccgctccgcgcccccggccgcggccccggcccgccccccgggcagccaggccctcaggccagtcggccggcagccggcgtcccaggcctacgagtgggcgctgggcgggggtccccgtgccccacacacgcgtcccctctcccccagccccgccgcttccagggccctcggcggcgcccgctccccgggccccgcggccccccgcctcccagccgggccgctccctcgagctcgtcgggtcagggacacctcctctacctcaccatcaccctggcccactcgtgcccccacccccaggggcaccagtgccaaaggcagctcccccagccccggacctacctgcacggttcaaccaagcctagaagtgggggcggggaatcttccgccctcctctggcgcccattggcccttcaggggcacatcgtgagcgccattggctgagcaatggtgtccgtcagagcgatggggcgggacagaagggggagagggatgctggtgccttggcgtctctgtctctgtgtatctcgttgtctctgtctctgtctcggcccttggaaacgagaggcttttggctgagaggactagaagggggcctgaggtgggaggaataggaataggaatcctgacagagcgtcacgccagttggccactctgaacgccctacctaagtcccctttaggttctcttctccatcacccccaacccctgcccctcacccctcgaggttctttcatccaggaagcgacgtgatgaaaactccaggccggaaggccatagggagagatgttatatatgtatataaaatatacacataaaaatgtttatatataaactcaaccagatatcagttcactagggcctggaaaggaaagggcacacatctcacagacagggaaggacttgagatagagccggtagaagaaggaatcaaaaatcactctaagagctggcaacagtggttacctcctgggagaggaactgagtgcctagggaaccagtgggcggaagacttacatatctcggcatatcatttgtatccattgatttttgcaccattcatcaagattccaatttaaagaaaaggatttaaatgtttaaataaggtcgcaaaaccaggggacagacaagataattgggcaggaaaattggcgcaacatgcagatttggggaggaatcttagcttttaatatgttcagctcccggtaacagggttttgtaaaacccagtgaaggtgtcccagaggcaactgaagttatggaacttgagagagggtagacaatcaggactagagaagatgcagggtcctctgcctaaagatagtgatctatgacatgctaaaggataaactcccaaagaagggtaataagacacccacagtaaaaggtaggaggacgaaaaagaaggtcagtgaggtaaaagaaacaatattaaagaggcatgaaaattaagggaggaagggtctgtggaaaatagaataataaaactatgagagaggccgggcacggtggctcacacctgtaatcccagcactttgggaggccaaggcgggtggatcacctgaggtcaggagttcgagaccagcctgcgcagcatggtgaaacccgatctctaatagaaatgcaaaaaaaaaattagccaagcgtggtggcgcgcctctgtaatcccagctactggaaaggctgaggtgggagaattgcttgaaccgggaggcggaggctgcagtgagccaagatcgcgccactgcactccagcctgggcgacacagtgagaccctgtttcaaaaaaaaaaaaaaaaaaaaaaaaacaacaaacaaactgtgagagcctcataggtcttacctctttacctctttaggctctggtaaccatgggacaataagaatgaaagccaaggccgggcacggtggctcacgcctgtaatcccagcattttgggaggccaaggtgggcggatcacaaggtcaggagatcaagaccatcctggccaacatggtgaaaccacgggcatggtggcgcatgcctgtaatcccagctactcgggaggctgaggcaggagaattgcttgaaccagggagtcagaggttccagtgagccgatatcacgccactgcactccagcctggatgacagagtgagactccgactcaaaaaaaaaaaaaaaaaaaaaaaaaacaacacctttatcgattaagaatcttttttctgagtttattaattctatttaaatcaaccccagaaaacaccttcaacacagcctctcatttcatatctgtaaaatggggcaaaaaaaaaaatagttcctaccctttagagttgttgtgaagattaaattagtgaatacatatgatggatttttttttcttttttcttttttat

SEQ ID NO: 1244156 - DNA, 4001 bp, Homo sapiens
aaatccaattcagaatttcatgactgaaggtagttattccacatttataatacattttttaaattcccaagggatgagcatttttaccttgccttatttttagaactacacatcacactgcacatatcacatgacatgatgtaactgttagcaaagaaaatggtccaaaccattgacaatgtacatggtaaatcaggatcaatgcatactcaagaaccacatttcgtatttactttaaaaaaaaagtttcttaattcaaaatgttttttcaaattgaaaaaatgtctagtaacctatgtagaaaaaaccagaaatgtacttcgtattttataaaataggagtttacccaattatgggaaaaactgatataaagaaacagataaaggaataacatacttctaaaactacaggattaaaagtaaaaattttctagatcaacaccgaaatgctaataaatacacttagcattaggcacaaaacaattactactcaaaagtattcactgttgataggttaaaaaaatagttttaactgacaacgcctgtagacaattgaaattttctaaattggtcagacagcatgctagaaaaggaaccaagtagagcctataggaaaggggaaagggaaaacacacccacttaagcctttgtaaatagtggtcctttaactgacccaaaaagcagagaaaacagaaattacagaccatcctgacaaatggaaaacatattctaacgtactagtttccatacttgaaaggactttcaaaatgaagttcagtagcaatctataactatatcatgattatgcaaggcaaagattatgtaattttatcgtttattttaaaatgttctccgactctaaaactaaaacaagtaaaacgttttgatctctccaaagcgaaaaggaaaggttcctctgagctgcaatttaaaaatataaacacacaccccaaaacaaacaaaaaaacacaatgattgctagccacgtgacaaaggagatggcaacaccaggattgtgaatggaggggagggaggcgaggctggaggaagagagatttctcggaactttggggaccgcggcagtcggtctgccgaccctaggagcactaaactccagcccctacgagttgtgcttctaacaccctcaagtacagttttattaataagtcacagaaaatgctccagtgacctccaggataaaggggggtgggggggaccgaggaaaaggaaagagagcaatttaaagtggcgccatcatgtcaccccttctcccctaaagcaatcagtaagcaatagttaagtagcacgtttctctataaatccacattgggattccaacattggaaaacgaggatttttaagtaagacacgggagtagcgctgtttatcgtatggaaaacaaactatttgctaagaatcaaaagaccgtcagccggaaaacaggcccccaaaaaggcagttaagattccaactcacttaaaagcaaataaatccctcttcctctttagtttaaaaaaaaaaaaagtccgcctgagggagactacatctgaaaacgtaagtgacctgaatttacaggcaacaaaaataataaatgaaacaatcagagttgtgatacaaaccgtgcaacgcgccaagatgtgtgtttcgagcagagaaaggccttttgcagtcaagagaagttcaaggcgagagccagagtttgtttggggggttcttttacgggaataaatcatgttcttcaggccgcctttttaaatagaacgccaaaggaaaagctggcgaacgaggcggcagctcctggggaagggcccccgcacacccccgcccttggggcgactcccagcccggacccgcagcagggaagcccggagaggccatttaaagttccgggggatttttctaccctgccctgcctttctagttacaactaacaaagagagagagaaatgggagccacagggagagcgaggagaaggagaaagggcagcaggaggaggaggagaggagcagcagcagcacctaccacgtgatggaggagcgtagcccgggcggattcagccccacaaaatgggcgcagtttgcaaacagccccccggcctgggcgccgagggccagcggcgggcgggggcgcgcgacggcggctccggcccgggcccgccgctctcctccccccgacgcccggagccgccctgactttccgggcgggggggcgaggcagagggggaggggaaggcggcggcggggagcggctgctttttcttctctttcgggccctttcccggccttgctccgcaccgacggggcccgagcacggctggagaccgcagcccggccgggagggcgggcgggcgggggcagagagtgaaaccgcccccccgccccgcacaaacaagcaccgccgtctgcagcccgaacccgcacccaggccgccacccccggccgcctctttccagccggggagcgcgcttcagccgccccccgcgccgccgcggcgagacgagtcggcttcgctacggtgctcggttctcccgccggctcggcgagcggtggcggcggtggcggcggcactgggaaaatggcggccgagctccttttccctccccccctttaatctgaagcggagggagaatggagcgagcgagcaagcgggcgagcgccggggacacggggaggagggacagcagcgcctccgccggctgcggctgcggcggcgaagggccgctccaccccggcgcgccgccagggggcgcccgccgcgccgcccccgcgggccgccaggaggcgcggccgccgccgcctcagtcatggctcctcgccgtggccgatgtttttgtacctccatctgcggaggccgcggcgcccggccccagctgccccggacgtgcggcgacggcacgcagcactgcggcagggggaagccagccctcgctgcggccgaggtgagtctaacctgaggcactgacgccgtcacatgccctccgtgctggggccggcggtgcggctcgccagttgaggggcagggcgggccggcgccgcggagcgagaggacgtgagcgaggaactgtttgcactgtgtagtaaagagggtaaggccgtcggcaccacactattccaaggctaaccctgcagaaagctccctgaccagtgaagcggcttccgccgcccgccctttgtccctagcagccagcctccgtatactgcagcacggctgggcactagccccagcaccgcgctccgcagccaccagagttgggcggggtggggagggtgcacgtagtcactgcgcaggccccagccagggcccgcgccgggccagcccgggaagggacagccgggagccagaggggaagtgatggccccgccggcgccgggcccgctgggaactgtagttttcgtgaagaaacacgcgtcttgttttgggtgtcatggcttggcagatccgccaaaacaggcaaatggcattacacaatgagtatttatgcttcctgccgccaccaaaaggaagttcactgccatgctaaaagtttaacaaagaactccataaagaaacacaagtctcacaacaaaaagccaacttcccacctcgttaccagagttggtttaaagtggtggcaccttatcatttctcatgaccagtttatcagtacagaactttatattgtccccaaaataggacctttaaaataatggaacctttcctagacttaaagaattcataaacataatgtaatacaaagtgtcacacaaagtgtaattctaccaccctttaaagttgccaaaagatgagtggagtatcttgagatttaaaagactaatctaggattcatcaaaactggcttaaatgactgaagaaaaaatcgttcaaatcattaaatcatcaaattcggcagataagaagggtatgtatgctctactaccaaaaaggaagacgcaaaatgcttcacacttttttgtggcttaccagaaccaatatccggcattatacgtcacttctgcttatca

SEQ ID NO: 1244157 - DNA, 4001 bp, Homo sapiens
tacacatcacactgcacatatcacatgacatgatgtaactgttagcaaagaaaatggtccaaaccattgacaatgtacatggtaaatcaggatcaatgcatactcaagaaccacatttcgtatttactttaaaaaaaaagtttcttaattcaaaatgttttttcaaattgaaaaaatgtctagtaacctatgtagaaaaaaccagaaatgtacttcgtattttataaaataggagtttacccaattatgggaaaaactgatataaagaaacagataaaggaataacatacttctaaaactacaggattaaaagtaaaaattttctagatcaacaccgaaatgctaataaatacacttagcattaggcacaaaacaattactactcaaaagtattcactgttgataggttaaaaaaatagttttaactgacaacgcctgtagacaattgaaattttctaaattggtcagacagcatgctagaaaaggaaccaagtagagcctataggaaaggggaaagggaaaacacacccacttaagcctttgtaaatagtggtcctttaactgacccaaaaagcagagaaaacagaaattacagaccatcctgacaaatggaaaacatattctaacgtactagtttccatacttgaaaggactttcaaaatgaagttcagtagcaatctataactatatcatgattatgcaaggcaaagattatgtaattttatcgtttattttaaaatgttctccgactctaaaactaaaacaagtaaaacgttttgatctctccaaagcgaaaaggaaaggttcctctgagctgcaatttaaaaatataaacacacaccccaaaacaaacaaaaaaacacaatgattgctagccacgtgacaaaggagatggcaacaccaggattgtgaatggaggggagggaggcgaggctggaggaagagagatttctcggaactttggggaccgcggcagtcggtctgccgaccctaggagcactaaactccagcccctacgagttgtgcttctaacaccctcaagtacagttttattaataagtcacagaaaatgctccagtgacctccaggataaaggggggtgggggggaccgaggaaaaggaaagagagcaatttaaagtggcgccatcatgtcaccccttctcccctaaagcaatcagtaagcaatagttaagtagcacgtttctctataaatccacattgggattccaacattggaaaacgaggatttttaagtaagacacgggagtagcgctgtttatcgtatggaaaacaaactatttgctaagaatcaaaagaccgtcagccggaaaacaggcccccaaaaaggcagttaagattccaactcacttaaaagcaaataaatccctcttcctctttagtttaaaaaaaaaaaaagtccgcctgagggagactacatctgaaaacgtaagtgacctgaatttacaggcaacaaaaataataaatgaaacaatcagagttgtgatacaaaccgtgcaacgcgccaagatgtgtgtttcgagcagagaaaggccttttgcagtcaagagaagttcaaggcgagagccagagtttgtttggggggttcttttacgggaataaatcatgttcttcaggccgcctttttaaatagaacgccaaaggaaaagctggcgaacgaggcggcagctcctggggaagggcccccgcacacccccgcccttggggcgactcccagcccggacccgcagcagggaagcccggagaggccatttaaagttccgggggatttttctaccctgccctgcctttctagttacaactaacaaagagagagagaaatgggagccacagggagagcgaggagaaggagaaagggcagcaggaggaggaggagaggagcagcagcagcacctaccacgtgatggaggagcgtagcccgggcggattcagccccacaaaatgggcgcagtttgcaaacagccccccggcctgggcgccgagggccagcggcgggcgggggcgcgcgacggcggctccggcccgggcccgccgctctcctccccccgacgcccggagccgccctgactttccgggcgggggggcgaggcagagggggaggggaaggcggcggcggggagcggctgctttttcttctctttcgggccctttcccggccttgctccgcaccgacggggcccgagcacggctggagaccgcagcccggccgggagggcgggcgggcgggggcagagagtgaaaccgcccccccgccccgcacaaacaagcaccgccgtctgcagcccgaacccgcacccaggccgccacccccggccgcctctttccagccggggagcgcgcttcagccgccccccgcgccgccgcggcgagacgagtcggcttcgctacggtgctcggttctcccgccggctcggcgagcggtggcggcggtggcggcggcactgggaaaatggcggccgagctccttttccctccccccctttaatctgaagcggagggagaatggagcgagcgagcaagcgggcgagcgccggggacacggggaggagggacagcagcgcctccgccggctgcggctgcggcggcgaagggccgctccaccccggcgcgccgccagggggcgcccgccgcgccgcccccgcgggccgccaggaggcgcggccgccgccgcctcagtcatggctcctcgccgtggccgatgtttttgtacctccatctgcggaggccgcggcgcccggccccagctgccccggacgtgcggcgacggcacgcagcactgcggcagggggaagccagccctcgctgcggccgaggtgagtctaacctgaggcactgacgccgtcacatgccctccgtgctggggccggcggtgcggctcgccagttgaggggcagggcgggccggcgccgcggagcgagaggacgtgagcgaggaactgtttgcactgtgtagtaaagagggtaaggccgtcggcaccacactattccaaggctaaccctgcagaaagctccctgaccagtgaagcggcttccgccgcccgccctttgtccctagcagccagcctccgtatactgcagcacggctgggcactagccccagcaccgcgctccgcagccaccagagttgggcggggtggggagggtgcacgtagtcactgcgcaggccccagccagggcccgcgccgggccagcccgggaagggacagccgggagccagaggggaagtgatggccccgccggcgccgggcccgctgggaactgtagttttcgtgaagaaacacgcgtcttgttttgggtgtcatggcttggcagatccgccaaaacaggcaaatggcattacacaatgagtatttatgcttcctgccgccaccaaaaggaagttcactgccatgctaaaagtttaacaaagaactccataaagaaacacaagtctcacaacaaaaagccaacttcccacctcgttaccagagttggtttaaagtggtggcaccttatcatttctcatgaccagtttatcagtacagaactttatattgtccccaaaataggacctttaaaataatggaacctttcctagacttaaagaattcataaacataatgtaatacaaagtgtcacacaaagtgtaattctaccaccctttaaagttgccaaaagatgagtggagtatcttgagatttaaaagactaatctaggattcatcaaaactggcttaaatgactgaagaaaaaatcgttcaaatcattaaatcatcaaattcggcagataagaagggtatgtatgctctactaccaaaaaggaagacgcaaaatgcttcacacttttttgtggcttaccagaaccaatatccggcattatacgtcacttctgcttatcaaaaaacaccctcacagtcgttacagaacggttttagtcttcccacaaagttacactaactcacctgcccctgcaacatctgcacctaggtttctgcgaatttccat

SEQ ID NO: 1244158 - DNA, 4001 bp, Homo sapiens
ccaaagacatgagtggtttcgtagcgggggaggctatcacagctctggggcacgtggcagtaacagagccatctggagtagggggtcgagggggagacaggtgagggcggaaaccactgaacccaggctgggcctgcaagcctcccccgaagctgcccctggctgggcctacctggtgtaattgaccttgtaggtagccacgtcctcagcctgagacctctgccgaaactgggcaggtgtctcaagcttccagtagttaaggcagagcaagaacatctttgagagctcgaacatcgtctgccgctcccggggagccaggtgactaaacttgtactgcacaaagttcagcacaccctgagaaggggtgggtgggggataaaaccaggaatgaggtgtgagcagcccgcagggccttcttagacaaaggaagatgctccctggccagggacaaggttctccttctcctctctctctcgggtgctctctatagaaaagctctgccccctccctaccaccatgcccaccctgaggttagcacaaaacacccttccttctctgaacctccccagtgttctcagcttgaggagaatggagaacacaggctccccactcctccaagctgtccccaattctcctatccgctatctccaattcccctatctcacctgctcaatattaggtttctcaaatggagggctgcccagggacccctccaccacaggccgggtcatctgcaggatgcatttccgcagtagctagagagaagaggaagggggcatagaggggaggggggcagagctgcagacaacccctcaaggccccacctccttcactcacaccctcctttagtggaagctcaccttgaagaggtagaaatagacctgcttggtgtctgtgtcctcttccttgtgaacagacatgaagagattctccacatccaccaccatccccagcagtcggtttatctcatcctctgacacattctccaagtgggatacgtggtcagctgcaagacagatggcagagttaggaaaaattgatagaagaaatcaacaaggcttcttgaccctcttcacagccaagcaagatacacactctgttcctccaaccagtgtgaccaacagtgagactgactgctccgatatcaaccgttgggttgcctgggcctgttctgggctgagagatttcctttctccccccttggtgcacacccccccccaacccaatccctccttcgaggcatctttgattttttcagagatgaagctttgtggcacttgtcaccctgtccaagcaggacccagcacctgcccccagctccaagggcgctgcctgccttacccaaggggtgctcacaactgcggcacagctcactcaggttggcagctggctgctgcagatccatgcggggtgcagtggggggcttggggtttttccagccattacacttacaggtttcattggcctggaggtggaaggatcagtcaatgacctatacctctggggcaagagccgctccgcagccagagctttgaccccattcccaccagagccctgggatgccccaagccccgccccttcaccccaggccccgcccccaccttgcaagccgagaagacccctagcttctcaagcttcttggcgcgcggcagcccccggacttgcgccttcctctgactggcgcgctgctgctggctcaggccaggtcgagccggatcccccccgctcccggcccccccacttcctaccccgggccccccagtccctgtgctgccggctggggctgcagctggggcaggggctggtgccggggtgggagtcggaatcggggctgaagccgggctgggtgcaggagtcggagttggggcaggggctggggactgaaggggccggggctgcgcagccggggccggggtcggggcctgggaaggttccgccatggcctcccccgcagcggagagcggcgccgcgctcccagccctagggccgcatgggcaaccagcgctcagtgcgcaggcgttgctgcgcggcgcatgacgggagttgtagtcttcccgcgccttcccctcactgcctccagcttccagacttttctgtcctgtctcttggcccctgacagccaagtgaggcctgagtgaaggccccacattgacccctcttcacttgtaatctcttttaatggagtccgggagagtcacgatggctgtcctcttggggacaaggagtcttggggagaatcgtggggtctgcctctttcacgcgcctgtctcccacttaaccccctcccccaactcccgcacaggccctgccccacgcggctccggacacggaattgcagctgcggtagagatgagatgtagcaacagttctgcagtagtgtggtggtgacttgggtgtgttctcctcctgacattcacctgcacctttttctgcgcttttcagtatgtatgtatttaatagtatcactcaacaaaaaggagtttatcaggccgggtggctggctcacgcgggaggagagcttgagccctgcaggagttcgagaccaggctgggcaacattgggagaccccccccaccaatctctacaaaaaaataaaaaataaagtttataggctgggcgaggtggctcacgcctgtaatctcagcactttgggaggccgagatgggaggatcgcttgagcccaggagttcgagattaacctgggcaacataatgataccctgtctcttaaaaaaaaaaaattatcaaataacagcaccagaggcatagctgtggttatgatggtcaccaagaaggctactgacgtggagggtgaggcggaggagggctaggtctttctctgtgcactgggagccactctcctgaagccccaactgcgtcttcatctttgtggccccagagcccagaccacagcctgcagcacaggacgccccgggaagaattaatgcagccggagagaccagtccacctcctcgtgtcgcgtgtccgcgtggggttgtgggtggtcagggagaggtagggtggatgacccaggaaggccgccctcccctggctctgtctaggaacaatccttgccccaggcctggtccttagaaggcaagacagcccccttccagctgggggatcaatctgctgttggctgcgccagggtgcggctccctcgggtctggcctggtcgtggatccagttccttcacagctgcggcctccccgggtccattaacgaaggtggggaagggcggagaaagggtcggagtctgggaggagagcagctgcgggcgcgccagggcgctgacagtctggctcttggaggtaagatgggcgtggctgatcccgaactccgcctgcgtttgcagaagcgaagggaaccgagcgagcggagctgagctcgggtaggccgcgcgaggtccctcctctccgggcgtccgtgcgcctagctctgcgctgggagcctcgcgccctttgacagcagttagttgctgactcggatgcagagagtcggtaacaccttctccaacgagagccgggtggcatcccggtgtcccagcgtgggccttgctgaacggaaccgggtggccacaatgccggtgcggctgctcagggacagtccagcggctcaggaggacaatgaccatgccagagacggtttccaaatgaagctggatgcccacggcttcgccccggaggaactggtggtgcaggtggatggccaatggctgatggtgaccggacagcagcaactggacgtcagggacccggaaagggtcagttaccgcatgtcacagaaggtgcaccggaaaatgctcccgtccaacctgagtcctaccgccatgacctgctgcctgaccccctccgggcagctgtgggtcagaggccagtgtgtggcgctggccctccctgaagcccaaacaggaccgtccccgagactcgggagcctcggctctaaggcttccaacctgacccggtaaacaaacgacgcgatgtgcagcagccttggtgtccg

SEQ ID NO: 1244159 - DNA, 4001 bp, Homo sapiens
ctaaaaaaatgtacattttcaagtaactcccggtatttgggaaattaagaaagaggactgtggccctatttcaaggcaccaatattattcctgcatttggtgagcctttacatacataccaccggccgggcgtggtggctcatgcctgtaatcccagtactttgggaggccgaggcgggtggatcacctgaggtcaggagttcgaaaccaccctgaccaacatggtgaaatcccgtctctattaaacatacaaaaattagctgggcgtcatggaatccgcctgtaatcccagctactagagagactgaggcaggagaatcgcttgaacccgggaggcggaggttgcagtgagccaacatcacgccatcgcactccgacctgggcaacaagagcaaaacctcgtctcaaaaacaaacaaacaaaaaaacacatacataccacccaccagctgaggtcattttaggagacattaaaaagtgtacattttcaacctgaaaagccgctgtgaagagaaagatttctattgatatgagcaagaataccacccagttttccaagtatcttaagggtaacctgccaggaaatgagcaagaatcacagaaaacggctgaaatgaagggggaatcttaaaagtcaccattatagtctaattaccgagatatttaaagccttgacgtgagacttattccttcctggcttgatcctggaactcagctcttctctgtggcttttaccaatatatctcccattgtactccagggcagacttaactgctccttcacttccttccagcaacaccttgtatacacctccaagctgagaacttactagatccttctaagattattcatgtctgttttctcctatcgggctgtgacacccttaagccagggatcacatctaattaatttctgaatccacagcaaccaccgcgcagaaagtagtcaatagacatttgttgaattgagttagatttgttctatattctggatctgccactgcctgagtggcttgcggcactccatgggcctccgttagttcagctgtaagaagaaacgacggggccattcctgggtgatcttctaagtgccttctaattctagaagtttttagtttttaccaactgcattttctaggcgctgtcgaactagcaaataaggaaagaggcaactggcctgagagggatcccctgcgagtgggcgctggcttcccaccacccagtcttctgctttgttgtgcccctcacctggaaggtaacgaggcctccaaaaccccgcctctgcacctatcagcgtccccgctcggaaaggcggggattcgggccacccaatcgaggtccgcctaagccgcgcccccacaggacagactgccaacctcgaccaatcaggagaggagggatcgttctctccagccagtgggagagcgctggggccggggccagacaccgcccccgcacgcggggaggtgaccgttgagcccaaacaggcggcgtcaccagccaatcaatatgcttccagacgtttcagcgaccaattaataagaacgcctccgatccaggcaagcagagggcgggaatagttgcaagcataggccgaggccagggtcgggcccacatttttctgttgggtatggacagaagagagggtagctgaacaaggttcgggggagcggaaagttgggacccaagcactgtgaggcgtggccaactgcgtcacggtgctcaatcgactgtccttagaaacccgccatccctcctctcccgtttctcaccttccttcgcggcattgccggcggctgcggcccgacggttccgattcgggcagcggcggcagcagcaggaacggtggctccggcgggctccgtggcggcctctgtatcagtcccaatcctgcggacgatccctagtgcctcctgcctctcagcgtctggagcgttctgcgcaggcgccgcgggctgaagcgctttttccttcacttccggctgggtctcgcgtcacctgacgttacgggccagagagggtgctgggaagttcgatccttttggtgaagctagtgggcgccattttgaagttgggcagaaagtgactccagtggtggaacccggagccaaccatttttagttacgtgagtggctctgtttgtgggcgtgggtagccattcttgtttggggcagaagcctgacagttgatgtaaacggttctcatctttaccttgggcaaaatttcgttttaatttctagagtcgaggaaggaaaccccccagaatccatcaggttgctgagattagatttaaccccttcgtagcctgattgtttaaaggacgtttccgtttattatataaactcaaagttgcggagggatgttttgtaaaagaaactttgtattttaagaaacatcgtggtctcgaaggggtgggaatggggaattgaaaaaggaactaacggatagcgtccgccatcaagtttcctgtctggtagaggagacattgtccttgcccttagctaacagcaagtgagttagttgatgtcgcggggaggaggcaaaaccattctccagaagctgcaggtcaaataattcccaatttagctctgtggcgagtgcccacttcctaaccgcactgtgtttgggtttgagaccactgggggccctggggtgaaaaatgtgatttgaaagtggggaatgcagtaccagagtcagaaaagctttgaaccccatttagctcaaatgacctctggcatccagatgcttgagcagagagttacgaggcggaggaagaggaaggaatgtttttagtgaagttgaagcccccaaaagaatggacatttaaataataatgagagggcctaggaaggagaagttggtcacagatactaggctgaaagaagagccttaagaaaaggctggaaagtggagagcaggcgttgaggatttaacctctccggaggaaaggccttgagaggaccaagtcttgaccaattgcgactgggtggaacccaggcacgctcagtcattaagttaggatcccgaaccccaatttcaaactgaggccccgttaagatggagatttcccccaggagcagggctaaagaacaaagaagcagaaggtaaatatctgattgatgtgctaagtaaagaactctaaagatttaaagttccagacctttagccagcactctccttggggatgtcctgggccagtgttgacacaggcagcttttagtatttaatacttagcttttagtgcttagtataaatacctttgataacctacttaggttgaactgcacgtaagaacttatttgaaaatggttcacattacttctcaccacttaagcatttaatttcatgtagcccctcaccacttaagcatttaatttcatacattactctgttattttgcactcacggatatgttcctgaggttacatttgaatgttctggctccccaactggtggtaaggatctcttacattaagagcatatctcagttatttcataccatcctactttttttctctctcttctttttttttctttcaagacagagtcttgctgtgttgcccaggctggagtgcaatggctggatgtcagttcactgcaagctccacctcgtgggctcaagggattctcttgcctcagcctcccgagtagctgggactgcaggcgtgtgccaccacacctggctaatttttgtattttttgtagagacagagtttcaccatgctgcccaggctggtctcgacctactgagctgaactactgtctcggccttccagagtgctgggattaaggtgtgagccaccactcccagccataccagcctttctttttttttttttttttctgagacagggttttgctcttgttgccaggctggagggcaatggcacgagctcggctcaccgcagcctccgcctcccgggttcaggcgattctcctgcctcaacctcccgagtagctgagattacaggcgcccgccaccacatgtggctactttttgtat

SEQ ID NO: 1244160 - DNA, 4001 bp, Homo sapiens
aagaggtaaagatcaactactgctcctcagttacctccctcactgtactctaacccatcacatctcagccctgggttctctagtctctcccctctccccatcctccagcctcagatccctcattccctgtgcttgttgtccaaacccctatccaggttcacttcccttttttcaagttccctcacccccaccaccctgattctaggtccgataacttatacctcatctgagatctgagaaccaaatgtgacccaggtacctgcaagagagaagccaggcacatgagaactgcagggggcagaccatgaaagaatgccctcctttccttaatccctattctgactcacctaggccaagacaggatacccgaagaccagacttccctaggttcctgcaagatacagaagcagcgggaaggggtggagcctccattatggacttagattatcagcccccagctcctctccttccagactgagaagccctcaggtgtctcagtccaaagaaattagacccagtgggcctataagattgggcaagtgctatctccagagcagaggtcctaggaattttctcaaaaggacaagtgaaccatatgtgactgttcctctggagccactgtccagagtctccattccctcttatcacattgaagacgtgcagtctggtttgtccttcttctggggtcttgtctgtgtttgagtcatctgtgggttgtgtgcagtgaggggctgggaggaattttgtttgattgtggtgagtttgtgagaccaggccctcaggcagagtgctgtgccaaatggtagatggcaggttggaagaggtaaaccaagtcaagttcaggcattcagacagacaggggtccctggctaggctaggcagatgggcctggaggaaaggcagattgaggacctggggggaggggggagagtaagacagaaaagcctagttctccctctccactccctctgttcctattgacttgtgaagactgtctctgaaccagtgagccccctcatcctcccaaagcccccaacccaggtgtcagctcagctttccaatcagggccaccatatagaggggatcagattcctcaggtgacaaagcaggtcagatcagtgacctcagctcactcccaagcaggagcccctcctctaccccctacttcaggttctgagcttctggtctggcagtcctctgagataaagtcagttacatttcagtctacccagaccctgtccctcagcatggagatgaaaaatgtggtccatccttcccaccggccccactccccttgcacccaagaaaggtcgcagaagacctagcctttggggcaggcaggggcagtatctgggtcaggcaccccgagcaggccagagtgagaagctgattccctccctccactccccaggacacggacccaaggacactccactggaggaggcatagcctggagatccgtgtagcgtggagatccatgcatccctgaccttcccaggggtaaggagggaagctcaggggcatcccctgggtctgacaggacccagtcaaccttggtaaacttgattctcgtagtcaggggtatcgacagaaaccaagagagggacaaagtgagggagtgccagagacagaaagaagagatggaaagaagggagacctacttagtgaagtttgaaggggtcttggcggccatctcaagcagtctcaggggtcccgaaaggaaagcggaaggggtgggctgcccggccacccccatacctgtatttcatgccagtgcctcggccggtgctctctcggagggccccagcgggcgctgggggtcggggaaccagtgcagctcgggccttggggccagaccctccaccccccggaggattcccgtgccccccgccggccggcccaccattaccgcccccggggcccggccggggtccacacagacggtcctcactgctccggctgcgaaggttctgctcggtacacgcgatagacacctgcatgctggctggccgaggcgggggagggggctccgaggggacgggaggggggagcagggaagcccgagggctgacgaccgggggcgtagtggggcgaaccccggcagagcgggaaggctgaggaggctgcggcgggagccgccaggcaggatcgggcccgcgggggcgggctgctggaggtcgcgaggtttgcggcgggagggaagaaacgtggggggcgccaggagtggagatattcagttacgggggacacaggagcaaggattaggagggggaaatggatgagggtaaaggtcgaggatgaggtaaaggtctcggaggataaggacccagggggaagcggggcgggagagagatgccacttcagcgcgaaccgctgcgggacccgctgggctcccagccgcgtcggcagcgggcccagctcatcagcatgcaggcaccgcctcctcatctgcatagagccgccctcctctcagccaaacctgccgctcatctgcataagccccgcctgctgaaggctctgcagcttgaatattttctgagcggaattggggaggatggctcctgcaccctctgggacccaagggctgtcaggcttcccccggcccagtgattctcaatcgggagggaatgtatctcccagcgtactttcggcaaggtttggagatatttttgatttcatgcctgtgctatcagcatctagtgggtggtggccagggatgctaaaatcctacaaagcacaggacggtccccacaataaagaattatccagctcaaagcatcaatattcccacggttgagaaacccatccgcaaagccacttcgtggccctccagggggtgtggctgccctactttccaccttcatgcgtggggcaggactgagagggccctcaaaccaacacgctcaggccgcagagagtgacaaaaagtttattctgtgcttctcgcagcattaggcaggggataaaactggagagagggcctggtgtggaggtggagggactctgtgggcttcactctggtaggaggagagcatcagggcaggcctttaggctgttgctctgggcagggggtgggggtgcgggggcttacagtgggggcccttagttggcacaggttcggaagggccccaggcagacatgaattctcctgagacttgaggtaggttgcttcagccagcccgggcggagaagaagggcagagagcgaacataggagtccagtcgggagcgaaagagctcactttgcacagtttggcccagcgggcacaggggattcttcaccaccagctccacatacagctatggaaagggaagatgttagagccaggctttggatacttctggtttttagccccaaaccttgtataacctcaggggtgtgtgaatgcacaaggaataagggctggaaggcaagccctctctgaggagaaagtggtggtgggagttaagaacctaagggcccctgagaaaactcttgagttgagcaaacatatagtaggattggggcaggggagatgagggagtcttggggttctgaagagctctgggggatgggtccctggggctggcactgaccgcactgtagatgtggtgcagcacatctcggatgggtcccacgcccaagtcagtattcatgacaactttgatcccagtgggcgtctcgtagtaatggagtttgtaacggctagtttggaaggccaggaagccatccttcctgcagagatgaggagggtgttaaagaatgggagcagaatctctcccaaagagacacttctgatccccgcaaacatcgactccctctttatctaaacatatcctttgtagaagcctggttgagtaaagacatcgcccatcgtcacccctcaatttagcccccaccaacttctctactttcagaccctccccacccccactcctgccagctccagcactctcgctccggactcagcctctcttaagtaccctttcccccctctggaggccaatgctccttccacttca

SEQ ID NO: 1244161 - DNA, 4001 bp, Homo sapiens
catccatccccctgccttccaactggtgagctgtcactgtagaaggcagtatagcatggtgagtaagagcctgggctcctgcaaccctccactgccacttactaactgtgtgaccttgggcaagttgatgacctcttctgtgcctaagctttccttatttgcaaagtagggcataataggccttcctcacatggtcgttgtgagagttacatgagttaacttggggagaacaagtcctagcacatggtaagtgctactctgagaaggtgaaattttttccccacattcacttggctttcttcctattacagagtaagcagggcagagattctgatgacaccacacccatttattgataggaaaccaaaaggcagagattatccaaactcacagatctccttagtgtgggggcagacagtgatgagtgctgtcttccttccctgccttccagagaaggtccactttttagcattcttgtagctgctttcaggggatctgccccactgctcaaagtctaatgggagagggcattgagcgtatagctccagcaacccccagcagcagaacccgagctgtctccctccagctccaatgggtgggaggccagggggactcctgtgggccatccagggacagagactcagctaagagatggggcctgtgacacaaccagtcctggtgctctaggagggatgactgtctgggggcagggaggctgatggggacactgaaggtgcctgggaggcactgggctctgggcacagcctccttcttccatcccagggcctgttgccccggtgatgggcgctatggaaacaaggtggtggggaagagggtagggcccggcggctcagtttccgccctcgggtaccgctcccccaccatccagatcccggccagggttcccgagggaatggcggggttgggggaggtgagggcggggaatctctgggttccagagtgggaagagggaatggcgggagaagaggcgggggaggagtgatgtggctgtccaaggtgctgaacctgaaacccaagctacgttgggcgagctgggagttcccaccgtcgcacagaccgctcccctcctcctgcctcacccaccttagacactgacgccccacgatttgggggcgcgcgacctcaatccaaactaggtcctgctgaagtctgatcttttctcctttttttctggaggtagtgggagctggagtctgtgagtagaccccagaatgcccggccactttgccccacttctgtgtctcggatacccccatacacgcccccagcacagctctgcccgagagtgggcggctccgaaggaccctcctccgctctgccgcacaaagagcctcttctgcctcgagtcacaccccctaaccttggcccccgtgctctcggccctttcccctcctcccctcgcagggcactccccgccctgttcctgcaccgcggctttgggagttcctagacccgcacctccattctctcccctcgcctcgggtctcaccatgtccaggagatccgagacggccccgaggatacttgccccccagctcgaacctcaagccccgacctccgtcccactcacgcgttccgtcaaaacgggtggcgatggtgtccaggaaggtgttttgcggggccagcaaccccttcatgaccggcatggccccggggcgtgggttcaaggcgcggcgctggggagctttcagcgcggccgggccggagggggcgcgctgtcggaggggccggggcgccccatgcgccctcctgcctcctcccctccctcttactgccgctgccgctgccgctgcctctgctccgaaccccgtagctctcggctcggctcagcgccgtttcggtcccccccacctccccacgggccaggttcttcccctcgggctcggcccgcacccgccacgtggccccacacggggaggggccgctagcgacacccgcacccctctgggcagccctcctcccagaggggagcggcccacgcgtgtctctcggggagagaattcggggcacgcccaccgggaggggaggcctgaaatgatgggcggggcttgaataacagacccgccctcttccaggctggccacgcctccacacgtggttccctggctgctccttgtggctccacctcgcgggttttcccgcgcggcgtccacgctgggctggtgtctggttcacagtgccgcctactggagttgacatatttcgcagcacccacaggccagtagctccagcgtgagacagcaagggttaagaggctagtttgctggtagagaatggacaatgggaaggcttgaaaccccaactctagaaagcaccattcttacctcctgcctcagttttcccaagacaccctggcgaactctgcctactgagacacagcatggtggaatgaaaagagctttggagtccaccaggtagagtcccagctctagacaccaatcgtgtgatatcctctccaagcccactttcctcatctgtaaaatggagctgataattcttacctgatgcagttaccgtgagaatgtaataccataatgcatgtctttggtacaaaataagtgtcttgaagggcagttgcctgcctgttttccctcttcctactgtcttaatcctcctctctgctgcccttcaagtggaagagaggctggaggcaagtttgggagaaactacctctgaaaaagatagtttcgaggtgggcagagtcatggcttgcaaatctccaaggatgcacatgtgaactttgacctctaacttctccaagatggaaccagtacagcagcaagagggaccaaagtgagactagacacaggactttctcactacctatgcagaaaattgaggcagctgagttctgtggctgagggtggctgcttcccacgacaaaacagctgaagcagtgaaagtgggaaccctatgggcaaggagggcaggctaaattctccccaccctctgagctaggtattatctgggatgttagattgctaagaagtgccacatttttctgtgtctctacttttgttgttgttgttgttcttgttgttcttgttcttgttgtttttgagacggagtcttgctctgttgcccaggctggagtgcagtggcatgacctcagctcactgcaacctctgcctcctgggttcaagcaattctcccgcctcagcctccttagtagctgggatcacaggcgtgcattacaatgcccggctaatttttgtatttttagtagagatggggtttcgccatgtttgccaggctggtcttgaactcctgacctcaagtgatccgcccgcctcagcctcccaaagtgctgggattacaggcatgagccacggagcctagcctgtgtctctacttttggatgttatattagtttcctaggactgccataacaaagtaccacaaagtgagtggctcaaacaacagaaacctattgtctcacagttctggatgctagaagtccaagcaaggtcaggtgaagagcgttggttccttctgaaggctatgagggagaatctgttgcatgcctctcccctatcttctgggggtgggggtgctggcaatttttggtgttccttggcttgtaggagccaatctctaccttcatgttcacatgggttctccctgtgtgtgtttctgtgttccaattcccttttttataaggacgccagtcacagtggattagaggcccaccctactctagtatgacctcatcttaactaattgcatctggaaggaccttatttccaaatacagccacattctgaagtgccacgggtacggacttcaacatatggattttgggaacaccagtaacaggtgtctttggctggagttgcagtaaaatcttgtactgcccctgcttaagaatgtcccatgactctgttacctacaagataaagtgcaaagcccgatgatttgtgagagcctttgcgagctgtgctgcactgactgtaactgtgtcccttcctgagcctctccac

SEQ ID NO: 1244162 - DNA, 4001 bp, Homo sapiens
cagagacttgggttccagtcccaggttggactctagcagtgggatcttgggcaaatcccttccacatctatgaaatgaagggatttacctaagccagtggttcctaaagtaagcaggacatcagaaccaccagggagatatttccaaatacacccgcttggcctcatctcacaccttctgagtcagcctctctgtagagaaagcatgttttggaaaacatgctctgggtaattctgatgcagaaccaggttgggggccattgattcaagagatttcccaggacattcaggctcttttcctcgttcccacccatgctgccaggtccagtgaggaccctgtggtcctggggggtgggggaggatttccaagggctgctgagatctgtcttcagctcctgacttacgcttctgttctgcttgcagtatgctccagctggcagtaacaacccaaactccatctgaatgagcttcttggtcagggaaaactccagaccctgtctccccaaagagctgagactggataaggcaggcccaccccactttgccagccaaaagcccccatgccttgcctggccacagaggtcttcaggaggtgactcctcctctaatccttggagcagacggagaggagggaaggttaatttccatcccagctgcctgaccgctggggctgacagtaagatagtggagagccaggagaccagggacacagcagagggatggcagagcaggaggccctgccccaggccagaaccagtgggtggcccagcctgatccctagctcctgcaaaggacctcagaaggcatcatatccaatgcctgtggaggaaccaaggcccctagaagaaacagggtttgttcaggccctttggaccctgggtcagtgccttccccaaggccaccctggctggacaagacagagggccaagcctgccctgcaaagcctctggcctgagtatgcctcaccatccttgcggtagtagaggatgtccaccttgcactcctcagcccccagcagggcctgcgctaggcgggacacggcgctgcttggtgtgttggggcctgtgaggaagtcgcaggtgcagggttgctgcatcacctccactcgggagtagccgaagagttcgcagaagccgtcgttgcagtaaatgatggcgcagttctccatctgagcattggcaatcaggaacttccgacctggggtgggaggtgggaggcaaaaagtccatgggagccaggatccagcggctgggagggaaagatcataaggactcttggtggcagtaaggggaatttaggcagaggagcagggcagtgaccggaatgagggagggagtcaggcctggggattgtgggaagactagggcagtgagggtcttgaggtggaaggaaggcccaaggcctcctggaaacaggaaaagtgtggggaagggaggcagggatgtgaccagatgggggtcaggcctgggaaagctcctgggaagaccagaaccaggatatgaaaaggaaggaaaagaaggactcagagaagcctctggaggacgcggatgagggggcaggcagtggctggaaggggaggttcgaacttggggcaccaaggaaacagctggcagtagggagggaaggcctgcacgctgctccttgtgttccagaaaagaggacagcatttaaggcaagcgggtccccctggaggagaaggtgttggggacatcaaaagaaggatttttcattcagcacccggcactcaccaccttgcccggttagaagttagtaaaggggtccagccccccctttcacggaaccaggactccagatcgtccccccgccccaacatacacacactcactttggccctcgaacttgcggatgatggtgtccaggtaagtgttttggggagcgacgtggcccctgcggaccggcatctttcggccgcggcccctgcccggagccacaggcgccactggctcccggcgtctccgtctgtcctcgggctcagcagcgtccggctccggtgggcgccgcccccggggagggccgccgggctccgcgccccgcccgccagcctgcgtctgccctcccctccccacccctgccccacctctcctttcctttcctgcgctcccctgccctcccctcgcctccctggcccgcgccctcctggcctcctctcctctgcgccggcccgggagctgtccacgccttggtgctgaaagaagccgcgcgccggcggcggggagggggccgctgggcggggcagtttctctgggacccgacggggctggggcggggccttgcatcctacggggcggggcggggcggggcggggcggggctggggtcctggccctggaatagggcaggtgttctctgaggagctgcttctgttcctgtcctaagggccaatggcctcagcacctctccgattccctcccagtaccaaagggcagtctcccctcccagtgcagggagtttcccaggcaggaggggggctacagatggggttgttaggggcctcaggtggtctttggctgaaagctttcttccgggtctgaccactgggcccgaccctggcaatgataccattaggcctctggcctgctcttatagcaagtgatctccagctcagctgagacctaggtcccatgcagagctcctgccgccaagtccagccagggcctggtcctgagaggagggggtaggagtacacatgaagacgtgcaagaaatatgcaataagggccaggcgcggtggctcacgcctgtaatcccagcactttgggaggcagaggtgggcagattacctgaggtcaggagtttgagaccagcctggccaacatggcgaagccctgtctctactgaaaaaacaaaaattagctgagtggtggcgcaaacctataatcccagctacttgggaggctgaagtgggagaatcgcttgtacccgggaggcggaggttgcagtgagccgagattgcgccactgtactccagcctggtagacagagcgagacgcgagactccatctgaaaataaaaagaaagaaagaaagaagtatgcaataagatgccttcttcagaggcctgagagctcttagcatacaggtacatcttggaaggagaacagatttaaaaccacctattagcaagtgaccactgataaaagtgtctgagtactgagtactgactgaaaatgaacacactagaaaaagcaaatgggggtgggaataggtttattgaaagaggcttcctggagaggaaggggagaaggggactactgttcactgagcatctgggtgggcttgtagtgctgcagagggtttggtgagcaattttgagcctgatcttggagggcaagcattcaaatggggcatgcaccttaggcaaaggccaaaggtgatgtcagtgcagaggggctggggtggggggaacaagggggtgtgggagaggtgagtttggaggaaggaggtaattaataaagaccctcagatgccattttgaacatctagatttaattgatgaacaaccaagttcttaagcaattagacatgaaagaaatattctggtgacataaactttacaatggtgggtgggggaggaaggatagacaaggaggctcagcaaggtttttactggagtccaggtgagaggcttagagtcctgggctggatgtgtgtttgtcatgcagagccacagtgcctagtgggggcctctttggccactgtggctgggggatgagaagagggcagagatgtcctggctgcccctctgttggacaggctggctgtggaggaaaagaaggggctatttctcatgagctcagtacatggggtgctgagctctgaggagggacttgggcagtgggacattcattcattcattcattcacttactcattccatcattttccaagtcccttttgtgcaccatggcctgtgctgactagagttgttacagaggggcacactcctgatgtgcatccagctcttatagagctgatagctagtaat

SEQ ID NO: 1244163 - DNA, 4001 bp, Homo sapiens
tggggggggcggtcccagcagacactgaggggctcttctcagaatacagaagggagtacccctcaaaaagagcgaaagcctctggtggcgcccagggctgagatggacctcccctctctgaccctcgcccgccacagggcggcggtccagggcggagctgcgcgaggaggggccgcggaggtgcagcgcagcgcgagggaggctggggtccagccgcgcggccagggaccggctctcctttggcatctcagagggggcgaaggctaggcccaaggctaacgccttccgggttcgcaccttccaaaggcggctgccgatttcagtggcgtgtgggcgcctcggcgctctcggagacggagcctgtgaacctgggtttggggcgcagatgtgggagccaggaggtccccagcgctttattgcagggctcgaacctgggtataggggagcaaaaaagaaactagaaatggccacaggcagcgcggtactctaagatgggaacgccccctgggaaatggggagggggaggtcccaggtgcgggcgagtccaggctgtgaggaggcaggaaaacctcccagaacaagaccgtccccaaagaaacactttgacccccattctgatcacaggttttaaaatattcacatgacatgggcacgctggatcaaaaccgaggcacagacactcgcttgggcctcaactcccatctgaaccccccaaggagcgccccaccccagctgtctctgcccatgagcccctgattcccgccccgctcccccagggcacccggagaggccgtgcgcgcgcagggtggaccctggccctgaaaccctgggagcttctcagccagcggccatcccctcggagatcaaggccgacttctaaaagcaaaagggagcctctggacttggctgacttgctggcatggaatcatttccagaatatttttactccattacagcacgggaggtgagaaagagacacgactccaagaacccgcaggtctctgacgggaggcattctcggggcggctcatatagcccgggcgcccacctccgaaccccacctcgatcgcggggtctccgggaaggtcacgcgtaggacccgtgccgcgcgccagagtgcttccgcacgctccctcccgagccccctagtgcaaaccagtcagaggggggccgagggctcctcaaagtttcccggagcgccccccaggacgaaggttagccaggagcaaagttccttgtggtggtagccggagacatggcaggaaaagaaaagctcgcagtcagcatttcctccgatgtctcaccaagggagggaaaaaaataaaacgagaggaagaaaacaccctcccgctccaccttccctgttgctgcacaacctcgtgctagctccgggccgggctagtggcgaggcgcggcctgcggggaactggggccgggcccgggagggaccatgcgcccgcggccgcgcacttacctcggtcagtggcccgggcgcggcgcgctcggcgtcctccaagctccgggcggccgttcctggccccggcagctgccgcgctggctgcatcgccgccgctgccgccaccgcctcagggcagctcccgggggcgctccatgccgaggggcgcgtcttctctgcaaagcggatcgccctggtccagccacgggtcgggggcgcgcgcctggacggcgcccccggccgctgggcgctcgcttgggccggggcggctggcgtcggtccctcggtccggctgtgagcacggccggcccaccccctcccccgccggctgttatctgatctcgggcagggcccggcgcgctcccctacgccccggcgccccgcacctcctcgcaggctctgaccgcgccagtccccctcccccggctactgttcccagggaggcggcagcagtggcggtgtggccgggagaagacggggagcgaggaatggagggcgaggaggcggcgggaggcagaggctcggcgcgcacccagctccgcgcctcgctccaccggagctcagctcggcaactcctctaactctccgcggagagcacgcccgccccgcgccgcgccgcgccgcgcagccgctgcaccagcctaccacggctccggcctggccccgagcccctcctagtcccgggccgccccctacacacacaccgccagccacttgcgcactgggacgcgcgcgcgcacacacacatatatatatacacacacacacacacacacacacacacacacacaggcacgacttcccggggacatgcgcgcacacacacatacacacacatgcaggcacgtccgccggggacacgcgcgcacgcacaggtgcatggcgagcacacacacaggcataaacatgcaggatacatgcccccacatgcatgatgttcgcaggggcacatgtgcacactcgctcatatgtgcacatgcaggatggcatctgcacgtgtgcatacgcacacacaggtctaagcttgtgcattcccacagagcccttttcccctgcacaccaggcacgcaccctctacacacaccatcccaccctaatagcatttttctcctctccatcttgagctgcttggcttctcccatctcctgccttctctgtgctcctccctggacctctctctgccgaccggatccccatgtgacccccttctctttcgagcccctgtctctggaggctcaggctttcttcccaacctgtccccaaatgccctgccctcccagctttctgaggcctattgtctgggcctcatatctctgagcctcccgcaggggccaagtctttcatcctggcagacagacctgctcgcctggacactgacccaggggaactccattttgtcaccagtctgacccccagctcggccctagggcctcagaattgggccgaggaggccagtctgtgcccagagcatgagcctcaaagggctccttggcccccttggcctccagcttcccctttaatgtgaaatataattatgtgtctgcacagcagggagactggctgcaggattctaaccgaggaggacggctctctggcccgcacccagattgctggcggctcagagcagagtgatctgcaggccccaccagccctaggatcctggccccaggcagctggtgggtgaaatccagcccagcactcaccgacatcagtctgccctgggtttgaatcccacctcaactgactagctgtgggacaggtcacttcaccactcagtgcctctgtttccctgttgtcagtagaaatcactacactcatggggctgtagcaaggattaaatgagatgagtctacctaaagtgcttagcacttgacttggctggtaaaacagccaggcggagcactcaatatgttctgagctctgtgctatggacccagctagaattatttcattaccactgcggccatctgtggtggataagctcattggctccattttacagatgaaggaactgaggcacagaggggtggtcacttgcttaattacagaactaccagatggtggagccagtacgcagaatcaggtgtgtcctcaacttagggctgcagtggagaaagaaggggcatcgcagaagtctgcagcccccaccctgccctgcctggcacactgtgtcctggtttcctcctcctcctgggagaaacagcctcccaggggaccaaaagctctcaggaaacttccttcttctccctccgagtgaccaaggagggaaatgactcagctccccacctgcccctgctccatttcccagatggggaagcccaagccagctgcggaagaagcctcaaaccagctcccaccctcagagaccactcagctgtcccaagaggaatggggcctgagacatccctccctcgaggccttactctggtggcctagaaaggggcaagggaatggacgggaacacctcagggctcctctgggtctaagattctgacagctcctgggacaagtggctgtgcccagggcatcctcacgcctggaacac

SEQ ID NO: 1244164 - DNA, 4001 bp, Homo sapiens
gtcttggtaaatattatggcacatctacaggacctcatgtattccctgctactcccactcctgcaattttgcttcagccacactggcctctttgctgttttgttaactcgccaggcacacctcagccttagggctgttccatctgcctgaactgctcttctccaaggattctacgttgctcacttccttgccacctccaggtctttggctaaatatcacccccttagtgaagacttctttgacagttccatttataaatggaaaatggtgggaggtagctttgaagatggctcccaatgatcttcttatgctggaactcaagttcttgtatgaggacaagtggtaggttttactaatttaacaaagaaaatacctgtattatttcggtgccaaatatttactttcaatgccctttatatattttgcctcaaactatactttttttccatttctaattttcaattaatttatatccaggtcttagcttgtactcaccactaatctatataatagaagaaacatatatttttcaatatccttgaagactcttgttctctctcatgctgaaattcttgttgagaaaaatgcattaaaatagaatattgaattcctctcccaaagcagtcttttcttgcagtttcaaaggttgtcagtcttgttgtatatgagactaataatcttagatttatcacaattatcgtgttctaaaaataaacaagcaggattacatctctaagttactcaggctctctttctctttctctctcttttgatttgaattgaactctggaccttgttcacttttaaattctttttggctgaatttcaggaattccttaaatgtattctgcaaaacagctgtggtttgggtacttcatgttcctttattggttaaaatctgacataaagagtggctagtctacatttcccatactaaagtaacaaaggtgcattcatacatttttttcttcttcaggatctggctcttactagccataagagtaatatttagcagaaatactccaatactctttttctaaagaccattcagtccatgtaatacacatgatcaaaattcatctggcttatagaaatgttattgtttactacctaaatataccaacaaggaaaactgttcaattatatatgtcagagaattcgtggcatccagagagcaaagttttacaagctcacacttttctgactaaatactcaaaacaaaattttaagatttttaaatgataagaaaaaaaaaaaagctttagagggattaaggtgaaaacaaaaggagaaaattcttcactttcaatttatgttaaaataaatctagaaaaaatagatctcttatttcctttcaatgattatagacaactataaaaaaaagttaacgtgtattttctctgagctttttaagaggggggtataaaatacatatttttcaatatttgcaattatatgttcataagtgcatacaggatgcaaaaatctggttttgaaagacattgcagaatactccatgtggtatgaatataataaagccacttttagacatttacaaatataatagcaggcaagggctgtttaacagactctgtaaacaccaatgtgagactacttttaaccaaagcttcaaaataacttaaggaatatgacacactgtttgattcctacttaaagcacttggataaaaaattaaattatcttaattgcatttaattgatcattaatatttacgtttgctggaaacagagtgttgctgctccccaaacacagatgccagcaagagcaaaacataggctgaatgacattgtatccatagcaataatagcacttacctttattcactctccccacagagaatctatgagctaggtgctttcagctgggcaatggtagagaatgctctttagttaataataaaggaaagaaaagctccagacaccaagaacctgggttaaccattgacaccggtttgttcctacagttcctccctgggaatctacataggtagcccctggcgtcttatcaagcaagccatagccagtcagctgtggcagtgattacgtcaccacctctgtacctctggaggaggtacagtgtgaaggtcacccaagtatatcctgactaagtttttacttgatcagggatacaaaggaggaagatttgctgggccagaactatgctcaacaatgcctgtaagtgactcaaatatttacagacaggattgttgagagacgacctatggaaatgctcctgctagttttcagactctgttggaatagtacaaataaatccctttcatcagaactctttgtctacatcttaacagctgaggattgggattgcatgctgacgaaaagcgagacaggataatgacaggtagctaagcatccattcagtcttttatttaccaaacctttaatgattatttttcctgtgctgcctagttccaaagaacatgagttcacagttgattagccctctgactaatcaacatggatggcagaaattggggttggaaagtcttcctttcctcaaccccaggaatcagagctcgagcctgagatggtgaatacaatgcaggctgtggtataggttttgcctggcattgagtcctaatgggttaaataaaatggtgaggtgatcccgtggtcagtgctctccaggaggtagaaaagtgagtgatcagggaagaggtagacttataatgctagaatcaagagaaagatccagaaaatgtgaaaagcagccatggggaactaaacaaatagcaaccctaggctcttcagaacctgggggagttgtgtccaggaatgctcaatagaagtgttatgctagcaaggaattagtttttcctttgcttcacagagcggtggcagccaggggatctagggaaccacatcaggcttggttaacactgcaaatttaagaggccttttctaggttctgacaatcgttgctgtttgacggttgttagagttttgtttccatttttaaaagcatgaacacttgaggaagtggacttctatgttggcaccgccacttactagctgtgtgacactgagaaactgcttaacctttctgcaactccattttctcaactgtcaaatggggatgataatagcaacaacgacaacacctaccacagatagataattcgtgttccaaactcatagctgtcactaaggtatacatattctgataggaagacctattttgcaatctgttacacaatatctgcagaagagtttgaactctccaagggacctatcttttcattcatccataaatctcaggtaagcagtgaatgcagaggttgccttttctgttaaaaaaaaaaattgaagactaaacaaatgcctacatttccataacaattgcagcaactctcattgtggtttatccatgatgttgttcaatattatcacttaatgctgctcaattactgccttgtttgaaagcagagcacactttgttagagttctatctcaaaagacttaaaaaaaacacacacgcaaaaatggacaggactccatctgctctgcaaatacaatttcaggaaaggtgattttatgtgggtgagcatttagattgatctgagaagacgaggcatctaaacacagcgtaaaaacagaccatggagaagagcaagacgggaggcaagatggggaaactagatggattcccaactccagctgagtcagatcgccattgcgtggcttcattcctttgtttgaagtaaattcccagaatatcagacacacccatactcacatgtaagtagaaaaacactttctaaagccaaataaataaaaatgatatctggattggcttttctgttacatgtctctgcctcctcagtctaccttaactgataattaacttcattgaagttcaacttttgtgaactttaatcctcccccaaacagaaagacaaactgaggcaagttgaggaggcatgttcaagatttgtcaaattacaagaatttgttacttgaatg

SEQ ID NO: 1244165 - DNA, 4001 bp, Homo sapiens
tgccataactttcttctcgacccccatgactcctcatgccagcccatcccaacataccttccctcacctcagctgcatggctgacctgcagagattgggcttaccagacaggcaaggtccagggtggaatgtggatgtctgaaagctgaagattaaatattgcaggtcagaaaaccatggcagaagcaggtcagggctggtattagttgtcagaggcagctttgatattgcaactgtatcccatcttcctcatcacaaaattgcaattggcttgtgttttcttaacttgagagcaaaacatgtatctttggaattgcaccacttggtatattactgagagcttagctattaaccccctatcactctctctatcagtttctctcctctctaaaatggagctaacaataattgtctccatttactctgtgctccttgtgtgtcaggtacacaattatcaaatgaaattaaataatatctaagatatagatactagtaaaggcttttgaaaaggaggcagagagaagcttagtaatttgggggaaggtcacactgccaatgcgtagccaatttggtctctaccttgcagattgtagactttcagaacttctaatcttttttaaaaaaaataattttgagccatatttgtcaggccaacgagacagatcatcctgactcatgttttggtattatctgtgcctttactccttgcattgacttcttaattttagctgacctgttttcattttcattttgtaattctgcatatggctcaatgataacaaaacactcagactggatcaaggattttctgagcaacaattagaaaaaatacccgcactccatctgaattctcaggattatttcaagattcatgggaaattttttaaaaggcaggggagggattttaaacagaaaagcttaacatgtttcataagtaagtcatttatggctaaacccatggccaggcatctatactgtcttagaattttcacatggataagctgccttccttcaacttgtgccacttcttctagtgaaatggaaacctgaaggcatggaatgtagtaggtgttatttactccatagcaacagtccagattacaaattgaaagaaagcaatgagcagaagaaaaacattaaaagttcgaaagccccgtgcttttatacttagtcagatttcaatgcttgaagggcttattatttattgaagttaccttttagcagttgtttttctaaagagtctttacggcatttctgtctatatttttagttgtgaagatgtaattccaaattgatgtcaacgtattttattacacagtttcaaatttgcgatgctactttgctgtcactttgcaacagtggaagagtgacaaagacatacaaaaaagatggttttatgaatgactgttttccacaggaaatgaaagattcacctcttccacgttgctccacgtcagtaagttatgtcagctggctaagtcatcatccttttagtctccctctgtctctgaatgttacttcccttaatggatctgcaaatggcactgacatttttaatctgtttggctcagcattccccagagatatatgagagaaagaaaacctattcccagccatagagcatgcctccataaagcatgactgctgagccaaaaaaagcatcataaagatgcatattagcggggatacatgcaaaaaggatgagcttaaaagagccgacaagcaattagttcaagcttggaacacttttaatccacaacacgatcttaccttagtgaaagatgatgaagtgcagatctgaaccccatgtccttttcatcttgtaagagcaccgtagctgagcatctcagggcccttttctcttggccctgttagtacccttctgaagctgtcagcacctaccgccatggagatgagaaaccccacaggagaatctctctcttctttgcctttccggatacattcaccacagacaaaggccactgagttctcagcttcgctctagtgaatcgacactttctttaactggttcccatgcctacgcatagtagatagtcttgccaatggtggcggacagaaaacaagaaccaagaatagccttcttccatgcctatttacatctttgttttctgatcaaacctctggaagcttatataataataaaaatctttccatatcacaaaagtggccacacattacccctaaatttcttattgtcctggaaggctgcattttctcttactgacacctctaggtcttgtacaacctcttccaagtgtgtgcttcttaagtgtaggtgctctgtgattgtgacagcaaagatttttctatgcaaatgcacactttgtctgactatgtaaccctatacctatggcaaacagcatcttgcccaacatcatttcatttgggtttcaaggaagcgtatgcccccagaaagactatcagccacctcagtagtgactccaaggacaaagtttagatgttctttcaacatgctggtcttgttttgctgtttgttcatttgcttcctctaaatttcagattagagagggagcaagtttcttgtaaagaagcattacttgccaggtgcagtggctcattcctgtaattccagcactttgaggggctgaggcaggaggatggtttcagctcagaagtttaagaccaacctgggcaatgtagtgaaacctcatctctactaaaaataaaaaataaattagctgggcacagtagcatgtgcctgtagtcccagctatctgggatgctgaggtaggaggatcgcctgggatgctgaggtgggaggatcacttgaacccaggagatcgaggctgcaagtttgctaggatgacaccactgaactccagcccaggtgacagaatgaaatcctgtctcaaaaaaaaaaaaaaaagataataaaataaaaatgaaccattacccaataaatagcacagtaaatacttgtgctgtttactcagataatggagctggtagaaaaggagttttggagtgaggaaatcaataattggtgttttattgtgcaaaatttgatatgctttctgacagccaaatgaacatgtcaaggagacaatatattagtctggagctcaggggagaatttcagaatggaaatataagattggaagttatcagtgtacatagagtaattgcaaccatgaacatggatgaaacaatacaagagtcagagtagttagaaaggagaaggattccaatgacgaaggcctgggacagcctaatttaagtctgggaaaatgaggaggctataactaagaagactgagaaaaagaattgcttgaagtaggaggaaaaattgtgacatgtgatacgaagtaaagaaagtgttacaagcaaaaggcagtgtggtcgggcatagtgtctcacccctgtaatcctagcactttgggagactaaggcgagaggattgcttgagcccaggagttcgtgaccagcctgggcaaaatagtgagacgctgtcttgacaaaaaaatatatatatatgtgtgtgtatatatatatatatatatatatatacacacacacatatatgcatattatatacacatatacacataaatatatatatacacataaatatataatacacatatatatacacaaaaatatatatacacatatatatttatatacacataaatatatattaaataaattatatatattatatacacatataaatatatatattaaatatatatatataatatacataagctggatgatggtgcacacatgtagtcccagctacttgagtgcctaaggtggcaggatcacttgagcccaggaggtcaaggctacagtgagccctggtcatgccactgccctccagccagagcggcagagtgagaccctgtctcaaaaaaaaggaaaggaaaaagaaaaagtcagtgatcatgtgtgttagatattaacaatcagtcaggataaggacaagaattgaccattggatttagcagtgtgatgtc

SEQ ID NO: 1244166 - DNA, 4001 bp, Homo sapiens
gcaagtaggatagatgactagatggatgagcaggtgggcacatggctaactacatggatgggcacacatcagtaatttgccagagatttgccttgggtacacatacatcctacatggtccctgcaatcccaaagatgcaatttccccacctgtcaaagggatccccctgccttcctatccagtgtgccgtgagaatcagagaagaggttggtgggaaggggctctgaggatctccacggtgagccacctgacatgcttctcacctccgcacctcccagccatggagttcatggggcctgccctttccaaggttacagccgaggctggtttgtcacactggtttttctggctggaattaaggcaactgttggtgagtcacccccacatcatcagcctcctgggacaggtgacagtggtttacaggcacacagacctagattcaaatcccagctctgcccctcataagctgtgtgaccttgagtgagtcacttcccctctctcagcttgttctgaaatgggatggcctgcctggtctctagtggcccttcagtccctcttcaccctccaagtcccccaatccccagccccttcttccccatccctcatcattctgggagcagaagccacaggcctacactttgcctctctcagccattccatcctcaaaactgatggggacacagaggttcagagatggatgggtggatggatggacgggtggatggatggacaggtggatgagctgcagagtttcagagaggttctgtcacaagccaacatcaaacagctggggacctccacggcagggacttgggtccacccccttccccgagtgagccaacactgtgcttggccctgcatgcttggcagctggctgcagtcatcccgatgctcacagccctgccttggaggagggacaattctcccctctggacagataggaaaactgaggctgagagaagctaagtcacctgcacagtcacctggagctggaactctgagcagcgaaggtcggatattgccacagggccatggggagccaagcaggggtgggggccagaagtgtgggcagcagcatctatccacatcctgctggtcacctggcttgcaccaggctctcccaacctcgtccctcactccctactacctgaaaggggcattccccagaccacaaatccagctggatttgtttttatctaggaggaaggcaaaattagctctactctacacaggggtactgagacgtagagcagagaagcgaatttcctgaagtcacagggcagggcagcaccctgcaaacaggagccagccttccggatgccctggccagagctcccgccacctgcaggggccacagcagccgccatgtgagctcaccccgccaagtcccacaaatgcttcccggggttatggtcacaatcctggatggggaggtgggctgcaggggcagtgcttccccatgaccacgactgagggccaacaggccgggctggcccacagcgtcccgcaggggagggcagggcctgggctgaggatggggctgaaatcccccacggaacagggcaaggcacttccccttcctgaggctcagcttcccctgaaaaatgaggctggtgtcgcctgccaggcctctcagagggtgtgccatgaaattgaaggtggtgacgaagctgcagtccgggcactgggcctcgccccagcgggtctctgggaggtggcagccgtcaccctccctggagaggcctggcagccccccagctgactggggcctgaaactccccatctgcaaaatgaggagaccccacacacctcgggagactgtcacgagggtaagccaagccctggcttcagtatctgtcccacagagacgatgcagcagtgtgggtcctgcaggcgttcactgtgaccggcgttcctgacaccacgtaggcactgaaagcagaaacaggcttcccaacaggacggaaagctgactgtgcccaagcctccctgtggcctgctggatgtcctcagaagcccccctggcccgcaaggagccacaaaacgcacaagggcaggatctgcctcgctgttccatgctcgggatgcgcccagcccacagaggatgctcagaaagtggaagctgcaggaaccttgagtgacactgacccctcacattctgtggcgtaaagatgggggctggacatatggaccccagaaagaggctgcaccaagcggctagaaaaggcaaatgtccacccttaagccctgaggtgaggccaggtcagaagattctggccccacagggtggacgacagtcacaccaaacaccagggaatgtttctgacggtatttttatcttgagaacatccttcttcacagagggtgggggcaggagggacagagggtgtccttggccccaggcccctgggagaagcagagaacagaggccctgcagtagtgccctctgctggggtggccatcacagacactgccccatccctgggctccattaagtcccacgaacaggggagacctggagggtcttggggcccttctaggactcctggctctgccccaacttgctgtgtgacctggagcagggctctgtccctctctgggtctccctcttcaagtcctcactgggcaccgaggacttgaagaggaagcattgggcgcctgccttcatggggcaccctgcctcacagggcagacggtgagaagtcagcagtcataagtcgctgggccctctggagcccaggggaggtgtctaacccagtggcaggaggggtgcttcctagaggagtatctgccagtggggaggcagcagcgagcagcaggggtgacaaccccgcctgagactaaccatagcacagtgacacagctaagagcaccagagtcctgcagtcttggtgcagattccagcttcactctccaggcactgggccttgggcaagacccaccctgactgtgtgcaaaccagggggctggcccagctactccacagaagccctgccagccctccattccaggatctaaactattcggggtttgtggggaaggtgtgacgagatgggcacagccttgacaccatcatatcagggaagctcagcgtgtgcaggcacagaggctgaggcatcaccccagggggcctcagatgtcatattaatgagcctagacttgatcccaaaggcaatggggagcccaagggccataagagagcttgaaactataagagttctggggcaacaaggcatgaattcaaatcctgtctccatcccttcttgtgtggccttgggctagccacataacctctctgaaccgcagttttctcacctataaaatggaactaatcatagcacctatctcatgaggttgcaatggagtttccatgagtgaacacatggtgactggccagctgggaactccctgtccccccaccctctcccttcatcacagctatgagcctctgcctcaccctgcagagagtcacaggcccctttagggtctcagctggaccccactccaggcaagaaggaatgatgggcaggaaacccagcgggaggcacaggtcagcaaaggcaccctggcttctgattttcatacagctgtaaattttccagcttcaacttaattggagtctcagacacgtcctgagcagccagcatgtgcacaggagagcaaggacccaaggtaaggacacaagaagcatcctgggaccagaaagaccaccaaaggaaaggctgggaaatttgccaacataaaaatatgtatgatgtcaaaaccaatcataagtaaaataaaagaaaaataatgtgtttgtttaaaaaggacccatgtgcttaatatataaagagttcttatgaatcaataagaaaaaaggacacagtaggaatgagcagagagctagggttgggcttccaatgtctctggaatgtcccacaactcagagcctcagccggagctggcccctcaccatgaaatgcctttctctgcctctcagaatgcaatgcatcctccaa
